United States Patent Application Publication US 2020/0163878 A1 - sequence listing, part 37

SEQ ID NO: 137168 - RNA, 1701 nt, Artificial Sequence
  derived and/or modified CDS sequence (opt3) from hemagglutinin__InfluenzaA__AFM72268
augaagaccaucauugcccugagcuacauacucugccuuguguucgcucagaaacugcccgucaacgacaauuccacagcaacuuuguguuuaggccaccaugccguuccuaacgggacgcuggugaagaccaucacaaaugaucacauugagguaacuaacgcgaccgaacuggugcaaucuucaaguacaggaagaaucugcgacagcccacaucagauucucgauggugagaauuguacccugaucgacgcccuucugggcgauccgcacugcgacggguuucagaacaaagaaugggauuuguucgucgagagguccacugcuuauucuaauuguuaccccuaugacgugccugauuacgcaucgcuccggucacugguugccagcaguggaacacuggaauuuaacaaugaguccuucaacuggaccggcguggcucagaaugguacgucuagcgcaugcaagcgccgauccauaaaaucauuuuucagucgucucaacugguuacaucaacugaauuauaaguacccagcccuuaacgucacuaugcccaauaacgagaaguuugacaaauuguauaucuggggagugcaccacccuaacaccgauagcgaccagauuucuaucuacgcucaggccuccgggagaguaacaguuucaacuaagaggagccagcaaaccgugauuccaaauaucggcagucggcccuggguccgcggcgugucuuccgggauaagcauuuacuggacaaucgugaaaccuggagauauucugcuaaucaacucgaccgguaaucucaucgcgccaagaggcuauuucaagauuaggucugggaaauccucaauaaugcggaguaacgcaccgaucggaaaguguaauagcgaaugcauuacgcccaacggcuccaucccuaaugacaagccauuucagaacgucaaucgcauaacuuacggugccuguccccgauauguuaaacagaacacacugaaacuugcuaccgggaugagaaaugugccugagaagcagacuaggggaauuuucggcgccaucgcaggcuuuaucgaaaacgggugggagggaaugguagacgguugguacggcuuccggcaucaaaauucugaggggacaggacaggcugccgaucuaaagagcacccaggcggccauuaaccaaaucaauggcaaauugaaccgucucauugaaaagacgaacgagaaauuucaccagauagaaaaggaguucucagaaguggagggucgcauccaggaccuggagaaguaugucgaagauaccaaaauugacuuauggaguuacaaugcagagcugcucguggcucuugaaaaccagcauacaaucgaucugacugacuccgagaugaauaaguuguucgaaagaaccaggaaacaacuacgggagaacgccgaggauauggggaauggcugcuuuaagaucuaucacaaaugugacaacgcuugcauuggaagcauacgaaauggcacauacgaucacgacguuuaccgcgaugaagcccugaacaauagauuccagaucaaggggguggagcucaagucuggauauaaagacuggauucuguggaucucauuugcaauuaguugcuuccuucugugugucguguugcucgguuuuaucaugugggccugccagaagggcaacauaagguguaauaucugcauuuga

SEQ ID NO: 137169 - RNA, 1701 nt, Artificial Sequence
  derived and/or modified CDS sequence (opt3) from hemagglutinin__InfluenzaA__AFM72279
augaagaccaucauugcccugagcuacauacucugccuuguguucgcucagaaacugcccgucaacgacaauuccacagcaacuuuguguuuaggccaccaugccguuccuaacgggacgcuggugaagaccaucacaaaugaucacauugagguaacuaacgcgaccgaacuugugcaaucuucaaguacaggaagaaucugcgacagcccacaucagauucucgauggugagaauuguacccugaucgacgcccuucugggcgauccgcacugcgacggguuucagaacaaagaaugggauuuguucgucgagagguccacugcuuauucuaauuguuaccccuaugacgugccugauuacgcaucgcuccggucacugguugccagcaguggaacacuggaauuuaacaaugaguccuucaacuggaccggcguggcucagaaugguacgucuagcgcaugcaagcgccgauccauaaaaucauuuuucagucgucucaacugguuacaucaacugaaguauaaguacccagcccuuaaugucacuaugcccaacaaugagaaauuugacaaguuguauaucuggggagugcaccacccuagcaccgauucugaccagauuuccaucuacgcucaggccucagggagaguaacaguuagcacuaaaaggagucagcaaaccgugauuccaaacaucggcucuaagcauuggguccggggcguguccagccgcauaucgauuuacuggacaaucgugaaacccggggauauucugcuaaucaacucuaccggaaaucucaucgcgccuagagguuauuucaagauuagguccggcaagucaaguauaaugcggagcaacgcaccaaucgggaaauguaauuccgaaugcauuacgccgaacggaucuauccccaaugacaagccuuuucagaacgucaaucgcauaacuuacggcgccuguccacgauauguuaaacagaacacacugaagcuagcuaccgguaugagaaaugugcccgagaaacagacuagggggauuuucggagccaucgcaggcuuuaucgaaaacggcugggaggggaugguagacggaugguacgguuuccggcaccaaaauagcgagggcacagggcaggcugccgaucugaagucaacccaggcggccauuaaccaaaucaauggaaaauugaaccgucucauugaaaagacgaaugagaaguuucaucagauagaaaaagaguucagugaaguggagggccgcauccaggaccuggagaaguaugucgaagauaccaaaauugacuuaugguccuacaacgcagagcugcucguggcucuugaaaaccagcacacaaucgaucugacugacagcgagaugaauaaguuguucgaaagaaccaggaaacaacuacgggagaacgccgaggauauggguaaugggugcuuuaagaucuaucacaagugugacaacgcuugcauuggcucuauacgaaauggaacauacgaucaugacguuuaccgcgaugaagcccugaacaauagauuccagaucaaaggcguggagcucaagucaggguauaaagacuggauucuguggaucaguuuugcaauuagcugcuuccuucugugugucguguugcucggauuuaucaugugggccugccagaaggguaacauaagguguaauaucugcauuuga

SEQ ID NO: 137170 - RNA, 1701 nt, Artificial Sequence
  derived and/or modified CDS sequence (opt3) from hemagglutinin__InfluenzaA__AFM72290
augaagaccaucauugcccugagcuacauacucugccuuguguucgcucagaaacugcccgucaacgacaauuccacagcaacuuuguguuuaggccaccaugccguuccuaacgggacgcuggugaagaccaucacaaaugaucacauugagguaacuaacgcgaccgaacuugugcaaucuucaaguacaggaagaaucugcgacagcccacaucagauucucgauggugagaauuguacccugaucgacgcccuucugggcgauccgcacugcgacggguuucagaacaaagaaugggauuuguucgucgagagguccacugcuuauucuaauuguuaccccuaugacgugccugauuacgcaucgcuccggucacugguugccagcaguggaacacuggaauuuaacaaugaguccuucaacuggaccggcguggcucagaaugguacgucuagcgcaugcaagcgccgauccauaaaaucauuuuucagucgucucaacugguuacaucaacugaaggacaaguauccagcccuuaaugucacuaugcccaacaaugagaaauuugauaaguuguacaucuggggagugcaccacccuagcaccgacucugaucagauuuccaucuaugcucaggccucagggagaguaacaguuagcacuaaaaggagucagcaaaccgugauuccaaacaucggcucuaagcauuggguccggggcguguccagccgcauaucgauuuacuggacaaucgugaaacccggggacauucugcuaaucaacucuaccggaaaucucaucgcgccuagagguuacuucaagauuagguccggcaagucaaguauaaugcggagcaacgcaccaaucgggaaauguaauuccgaaugcauuacgccgaacggaucuauccccaaugacaagccuuuucagaacgucaaucgcauaacuuauggcgccuguccacgauacguuaaacagaacacacugaagcuagcuaccgguaugagaaaugugcccgagaaacagacuagggggauuuucggagccaucgcaggcuuuaucgaaaacggcugggaggggaugguagauggaugguaugguuuccggcaccaaaauagcgagggcacagggcaggcugccgaccugaagucaacccaggcggccauuaaccaaaucaauggaaaauugaaccgucucauugaaaagacgaaugagaaguuucaucagauagaaaaagaguucagugaaguggagggccgcauccaggaucuggagaaguacgucgaagacaccaaaauugauuuaugguccuauaacgcagagcugcucguggcucuugaaaaccagcacacaaucgaccugacugauagcgagaugaauaaguuguucgaaagaaccaggaaacaacuacgggagaacgccgaggacauggguaaugggugcuuuaagaucuaccacaagugugauaacgcuugcauuggcucuauacgaaauggaacauaugaccaugauguuuaccgcgacgaagcccugaacaauagauuccagaucaaaggcguggagcucaagucaggguacaaagacuggauucuguggaucaguuuugcaauuagcugcuuccuucugugugucguguugcucggauuuaucaugugggccugccagaaggguaacauaagguguaauaucugcauuuga

SEQ ID NO: 137171 - RNA, 1701 nt, Artificial Sequence
  derived and/or modified CDS sequence (opt3) from hemagglutinin__InfluenzaA__AFM72301
augaagaccaucauugcccugagcuacauacucugccuuguguucucccagaaacugcccggcaacgacaauucuacagcuacuuuguguuuagggcaccaugcagucccuaacggaacgaucguuaagaccauuacaaaugaucaaaucgaggugacuaacgccaccgaacugguacagucaaguagcacagguggcauuugcgacuccccacaccagauccuagauggggagaauuguacccucauagacgcgcugcuuggagauccgcagugcgacggcuuucaaaacaaaaagugggaucuguucguggaaagaucuaaggcuuauucgaauuguuaccccuaugacgucccugauuacgccucauugaggagccucguggcaaguuccgguacucuggaguuuaacaaugaaucuuucaacugggccgggguuacacagaauggaaccagcuccgcuugcaagcggcgcucaaacaagagcuuuuucagucgacugaauuggcucacgcaguuaaaauauaaguacccagcacugaacgugacuaugcccaauaacgagaaauuugacaaacuuuauaucuggggcguccaucacccugugaccgauucugaccagauuuccuuguacgcccaggcuucaggccguaucacaguaagcacuaaaagaagucagcagaccguuauuccaaacaucggguacaggccccgggugcgcgauauaucuuccagaauuagcaucuauuggacaauugucaagccuggagacauccugcuaaucaauucgaccgguaaccucauugccccaaggggcuacuucaagauacggucugggaaauccucaaucaugcgcagugacgcgccgauuggaaaguguaauagcgagugcaucacgcccaacggcuccauaccuaaugauaaaccauuucagaacgugaaucgaauuacuuauggugcaugucccagauacgugaagcaaaacacacugaaacuugccaccgggaugaggaaugucccugaaaagcagacucggggaaucuucggcgcuaucgccggcuuuauugagaacgggugggaaggaaugguugacgguugguauggcuuccgucaucaaaauucugaggggacaggacaagcagcugaucugaaaagcacccaggccgcgaucaaccagauuaauggcaaguugaaccgccucauagguaagacgaaugagaaauuucaccagaucgaaaaggaguucucagaaguggaggggaggauucaagaccuggaaaaauacguagaggauaccaagaucgacuuauggaguuauaacgccgagcugcucguggcacuugaaaaccagcacacaaucgaucugacugacuccgagaugaauaaauuguucgaaagaaccaagaagcagcuacgggagaacgcugaagauaugggcaauggaugcuuuaaaauuuaccauaagugugacaacgccugcauagagagcauccgaaauggcacauacgaucacgacgucuaucgcgacgaggcucugaacaauagauuccagauuaaagggguggaacucaagucuggauacaaagauuggauccuguggauuucauuugccaucaguugcuuccuucuguguguugcauugcucgguuuuauaaugugggccugccaaaagggcaacaucagguguaauauuugcaucuga

SEQ ID NO: 137172 - RNA, 1701 nt, Artificial Sequence
  derived and/or modified CDS sequence (opt3) from hemagglutinin__InfluenzaA__AFM72312
augaagaccaucauugcccugagcuacauacucugccuuguguucgcucagaaacugcccggcaacgacaauuccacagcaacuuuguguuuagggcaccaugccgucccuaacggaacgaucguuaagaccauuacaaaugaucaaaucgaggugacuaacgcgaccgaacugguacagucuucaaguacagguggcauuugcgacagcccacaccagauccuagauggggagaauuguacccucauagacgcucugcuuggagauccgcagugcgacggcuuucaaaacaaaaagugggaucuguucguggaaagauccaaagccuauucuaauuguuaccccuaugacgucccugauuacgcaucguugaggucacucguggccagcagugguacucuggaguuuaacaaugaauccuucaacuggacagggguuacccagaauggaacgucuagcgcuugcaagcggcgcuccaacaagucauuuuucagucgacugaauuggcucacucauuuaaaauauaaguacccagcacugaacgugaccaugcccaauaacgagaaauuugacaaacuuuauaucuggggcguccaccauccugugacagauagcgaccagauuaacuuguacgcccaggcuucuggccguaucacuguauccaccaagagaucacaacagacaguuauuccaaauaucggguacaggccccgggugcgcgauauaccuagcagaauuaguaucuauuggaccauugucaagccaggagacauccugcuaaucaacucuacggguaaucucauugccccgaggggcuacuucaagauacgguccgggaaaagcucgaucaugcgcucugacgcgcccauuggaaaguguaacuccgagugcaucacuccuaauggcucaauaccaaacgauaaacccuuucagaaugugaaccgaauuacauauggugcauguccuagauacgugaagcagaauacccugaaacuugccacugggaugaggaacgucccagaaaagcaaacacggggaaucuucggcgcuaucgccggcuuuauugagaaugggugggaaggaaugguugacgguugguauggcuuccgucaccagaacagugaggggaccggacaggcagcugaucugaaaagcacgcaagccgcgaucaaucagauuaacggcaaguugaaucgccucauagguaagaccaacgagaaauuucaccagaucgaaaaggaguucuccgaaguggaggggaggauucaggaccuggaaaaauacguagaggauacaaagaucgacuuauggucuuauaacgccgagcugcucguggcacuugaaaaucaacauacuaucgaucugaccgacagcgagaugaacaaauuguucgaaagaacaaagaagcagcuacgggagaaugcugaagauaugggcaacggaugcuuuaaaauuuaccacaagugugacaaugccugcauaggcucaauccgaaacgggacuuacgaucaugacgucuaucgcgacgaggcucugaauaacagauuccagauuaaaggaguggagcucaagagugguuacaaagauuggauccuguggauuuccuuugccaucagcugcuuccuucuguguguugcauugcucggcuuuauaaugugggccugccagaaggggaauaucagguguaacauuugcaucuga

SEQ ID NO: 137173 - RNA, 1701 nt, Artificial Sequence
  derived and/or modified CDS sequence (opt3) from hemagglutinin__InfluenzaA__AFM72323
augaaggccaucauugcucugagcuacauacucugccuuguguucgcacagaaacugcccggcaacgacaauuccaccgccacauuguguuuagggcaccaugcggucccuaacggaacuaucguuaagacgauuaccaaugaucaaaucgaggugacaaacgcuacugaacugguacagucuucaaguaccgguggcauuugcgacagcccacaccagauccuagauggggagaauuguacacucauagacgcccugcuuggagauccgcagugcgacggcuuucaaaacaaaaagugggaucuguucguggaaagauccaaagcauauucuaauuguuaccccuaugacgucccugauuacgccucguugaggucacucguggcuagcagugguacccuggaguuuaacaaugaauccuucaacuggacugggguuacacagaauggaaccucuagcgcaugcaagcggcgcuccaacaagucauuuuucagucgacugaauuggcucacgcauuuaaaauauaaguacccagcccugaacgugacuaugcccaauaacgagaaauuugacaaacuuuauaucuggggcguccaccauccugugaccgauagcgaccagauuaacuuguacgcucaggccucuggccguaucacaguauccacuaagagaucacaacagaccguuauuccaaauaucggguacaggccccgggugcgcgauaacccuagcagaauaaguauuuauuggacaaucgucaagccaggagacauucugcuaaucaauucuaccgguaaccucaucgcgccgaggggcuacuucaagauucgguccgggaaaagcucgauaaugcgcucugacgcacccaucggaaaguguaauuccgagugcauuacgccuaacggcucaaucccaaaugauaaacccuuucagaacgugaaucgaauaacuuauggugccuguccuagauacgugaagcagaacacacugaaacuugcuaccgggaugaggaaugucccagaaaagcaaacucggggaauuuucggcgccaucgcaggcuuuaucgagaacgggugggaaggaaugguugacgguugguauggcuuccgucaccagaauagugaggggacaggacaggcugccgaucugaaaagcacccaagcggccauuaaccagaucaauggcaaguugaaccgccucauugguaagacgaacgagaaauuucaccagauagaaaaggaguucuccgaaguggaggggagaauccaggaccuggaaaaauacguagaggauaccaagauugacuuauggucuuauaaugcagagcugcucguggcucuugaaaaccaacauacaaucgaucugacugacagcgagaugaauaaauuguucgaaaggaccaagaagcagcuacgggagaacgccgaagauaugggcaauggaugcuuuaaaaucuaccacaagugugacaacgcuugcauuggcucaauacgaaaugggacauacgaucaugacgucuaucgcgacgaggcccugaacaauagauuccagaucaaaggaguggagcucaagagugguuacaaagauuggauucuguggaucuccuuugcaauuagcugcuuccuucuguguguugccuugcucggcuuuaucaugugggcuugccagaaggggaacauaagguguaauaucugcauuuga

SEQ ID NO: 137174 - RNA, 1701 nt, Artificial Sequence
  derived and/or modified CDS sequence (opt3) from hemagglutinin__InfluenzaA__AFM72334
augaagaccaucauugcccugagcuacauacucugccuuguguucgcucagaaacugcccggcaacgacaauuccacagcaacuuuguguuuagggcaccaugccgucccuaacggaacgaucguuaagaccauuacaaaugaucaaaucgaggugacuaacgcgaccgaacugguacagucuucaaguacaggugagauuugcaauagcccacaccagauccuagacggcgaaaacuguacccucauagaugcucugcuuggggacccgcagugcgauggauuucaaaauaaaaagugggaccuguucguggagagauccaaagcccauucuaacuguuaucccuacgaugucccugacuaugcaucguugaggucacucguggccagcaguggcacucuggaauuuaauaacgaguccuucaauuggacagguguuacccagaacgggacgucuagcgcuugcauccggcgcuccaauaacucauuuuucagucgacugaauuggcucacucacuuaaacuuuaaguacccagcacugaacgugaccaugcccaauaacgagcaguucgauaaacuuuauauuuggggagucuugcauccuggcacauacaaagaccagaucuuucuguaugcccaagcuagcggccguauuacugugucuaccaagagaucccagcaggccguaaucccaaauauagggucaaggccccggguucgcaacauuccuagcagagugaguaucuacuggacaauugucaaaccaggagauauccuacucaucaauucuaccgguaaccugauugcgccgaggggcuacuucaagauacgguccgggaaaagcucgaucaugcgcucugacgcacccauuggaaaguguaauuccgccugcaucacgccuaacggcucaauaccaaaugauaagcccuuucagaacgugaaucgaauuacuuauggugcuuguccuagauacgugaaacaaaacacacuuaagcuggccaccgggaugaggaaugucccagaaaaacagacucggggaaucuucggcgcaaucgcuggcuuuauugagaacgggugggaaggaaugguugacgguugguauggcuuccgucaccagaauagugaggggcgcggacaagccgcggaccucaagagcacacaggccgcaaucgaucagauuaacggcaaauugaacagacugauagguaagaccaaugagaaauuccaccagaucgaaaaggaguuuuccgaaguggaggggaggauucaagacuuagaaaaguacguagaggauacgaaaaucgaccuguggucuuauaacgcugagcuccuuguggcccuggaaaaucagcauaccaucgauuugacagacagcgagaugaacaagcuauucgaaaagacuaagaaacagcugcgggagaaugcugaagauaugggcaacggaugcuuuaagauuuaccacaagugugacaaugccugcauaggcucaauccgaaacgggaccuaugaucaugacgucuaccgcgaugaggcacucaauaacagauuccagauuaaaggaguggagcugaagagugguuacaaagacuggauccuuuggauuuccuuugccaucagcugcuuccuguuguguguugcucuccugggcuuuauaaugugggcgugccaaaaggggaauaucagguguaacauuugcaucuga

SEQ ID NO: 137175 - RNA, 1701 nt, Artificial Sequence
  derived and/or modified CDS sequence (opt3) from hemagglutinin__InfluenzaA__AFM72345
augaagaccaucauugcccugagcuacauacucugccuuguguucgcucagaaacugcccggcaacgacaauuccacagcaacuuuguguuuagggcaccaugccgucccuaacggaacgaucguuaagaccauuacaaaugaucaaaucgaggugacuaacgcgaccgaacugguacagucuucaaguacagguggcauuugcgacagcccacaccagauccuagauggggagaauuguacccucauagacgcucugcuuggagauccgcagugcgacggcuuucaaaacaaaaagugggaucuguucguggaaagauccaaagccuauucuaauuguuaccccuaugacgucccugauuacgcaucguugaggucacucguggccagcagugguacucuggaguuuaacaaugaauccuucgacuggacagggguuacccagaacggaacgucuagcgcuugcaagcggcgcuccaauaagucauuuuucagucgacugaacuggcucacucauuuaaaauauaaguacccagcacugaaugugaccaugcccaacaaugagaaauuugauaaacuuuauaucuggggcguccaccauccugugacagacagcgaucagauuucuuuguacacucaggccuccggccguaucaccguaucaacaaagagaagccaacagaccguuauuccaaacaucggguucaggccccgggugcgcgacauaaguucuagaauuuccaucuacuggacgauugucaagccuggagacauccugcuaaucaacagcacugguaaucucauugcuccaaggggcuauuuuaagauacggucggggaaaucuuccaucaugcgcucagaugccccgauuggaaaguguaacagugagugcaucacacccaauggcagcauaccuaacgacaaaccauuccagaaugugaaccgaauuaccuacggugcgugucccagauaugugaagcagaauacucugaaacuugcaacagggaugaggaacgucccugaaaagcaaacccggggaaucuuuggcgccaucgcuggcuucauugagaaugggugggaaggaaugguugaugguugguacggcuuucgucaccagaacuccgaggggacgggacaggccgcagaccugaaaucuacccaagcugccaucaaucagauuaacggcaaguugaaucgccucauagguaagacaaacgagaaauuccaccagaucgaaaaggaguucagcgaaguggaggggaggauucaggaucuggaaaaauauguagaggacacuaagaucgauuuauggucauacaaugcggagcugcucguggcccuugaaaaccaacauaccaucgaccugacagauagugagaugaacaaauuguuugaaagaacuaagaagcagcuacgggagaaugcagaagacaugggcaacggaugcuucaaaauuuaucacaagugugauaaugcuugcauaggcuccauccgaaacgggaccuacgaccaugacgucuaccgcgaugaggcccugaauaacagauuucagauuaaaggaguggagcucaagagcgguuauaaagacuggauccuguggauuucuuucgcuaucucaugcuuucuucuguguguugccuugcucggcuucauaaugugggcaugccagaaggggaauaucagguguaacauuugcaucuga

SEQ ID NO: 137176 - RNA, 1701 nt, Artificial Sequence
  derived and/or modified CDS sequence (opt3) from hemagglutinin__InfluenzaA__AFM72356
augaagaccaucauugcccugagcuacauacucugccuuguguucgcucagaaacugcccggcaacgacaauuccacagcaacuuuguguuuagggcaccaugccgucccuaacggaacgaucguuaagaccauuacaaaugaucaaaucgaggugacuaacgcgaccgaacugguacagucuucaaguacagguggcauuugcgacagcccacaccagauccuagauggggagaauuguacccucauagacgcucugcuuggagauccgcagugcgacggcuuucaaaacaaaaagugggaucuguucguggaaagauccaaagccuauucuaauuguuaccccuaugacgucccugauuacgcaucguugaggucacucguggccagcagugguacucuggaguuuaacaaugaauccuucaacuggacagggguuacccagaauggaacgucuagcgcuugcaagcggcgcuccaacaagucauuuuucagucgacugaauuggcucacucauuuaaaauuuaaguauccagcacugaacgugaccaugcccaauaacgagaaauucgacaaacuuuacaucuggggcguccaccauccuggcacagauaacgaccagauuaauuuguaugugcaggccagcgggcguaucacuguaucuaccaagagaucccaacagacaguuauuccaaacaucggaucaaggccccgggugcgcgaugucccuagcagaauaaguauuuacuggaccaucgugaagccaggugacauucugcuaaucucuuccacgggcaaucucaucgcuccgaggggguacuuuaagauucggagcggaaaaucgucuauaaugcgcuccgacgcccccaucggcaaguguaacucagagugcauuacuccuaaugguaguaucccaaacgauaaacccuuccagaaugugaaccgaauaacauauggggcguguccuagauacgucaagcagaauacccugaaacuugcaacuggaaugaggaacguuccagaaaagcaaacacggggcauuuuuggcgccaucgcuggguucaucgagaauggaugggaagguaugguggacggcugguauggguuucgucaccagaacagcgagggaaccggccaggccgcagaucugaaauccacgcaagcugccauuaaucagaucaacgguaaguugaaucgccucauugggaagaccaacgagaaauuccaccagauagaaaaggaguucucugaaguagagggcagaauccaggaccuggaaaaauacguggaggauacaaagauugacuuauggagcuauaacgcggagcugcucgucgcccuugaaaaucaacauacuaucgaucugaccgacucagagaugaacaaauuguuugaaaggacaaagaagcagcuacgggagaaugcagaagauaugggaaacggcugcuucaaaaucuaccacaagugugacaaugcuugcauugggaguauacgaaacggaacuuaugaucaugacguguaccgcgacgaggcccugaauaacagauuucagaucaaagguguugagcucaaguccggcuacaaagauuggauucuguggaucagcuucgcuauuucuugcuuucuucuguguguggccuugcucggguucaucaugugggcaugccagaagggaaauauaagguguaacaucugcauuuga

SEQ ID NO: 137177 - RNA, 1701 nt, Artificial Sequence
  derived and/or modified CDS sequence (opt3) from hemagglutinin__InfluenzaA__AFM72367
augaagaccaucauugcccugagcuacauacucugccuuguguucgcucagaaacugcccggcaacgacaauuccacagcaacuuuguguuuagggcaccaugccgucccuaacggaacgaucguuaagaccauuacaaaugaucaaaucgaggugacuaacgcgaccgaacugguacagucuucaaguacagguggcauuugcgacagcccacaccagauccuagauggggagaauuguacccucauagacgcucugcuuggagauccgcagugcgacggcuuucaaaacaaaaagugggaucuguucguggaaagauccaaagccuauucuaauuguuaccccuaugacgucccugauuacgcaucguugaggucacucguggccagcagugguacucuggaguuuaacaaugaauccuucaacuggacagggguuacccagaauggaacgucuagcgcuugcaagcggcgcuccaacaagucauuuuucagucgacugaauuggcucacucauuuaaaauuuaaguauccagcacugaacgugaccaugcccaauaacgagaaauucgacaaacuuuacaucuggggcguccaccauccugugacagauaacgaccagauuaauuuguaugcccaggcuagcggccguaucacuguaucuaccaagagaucccaacagacaguuauuccaaacaucgggucaaggccccgggugcgcgaugucccuagcagaauaaguauuuacuggaccaucgugaagccaggagacauucugcuaaucucuuccacggguaaucucaucgccccgaggggcuacuuuaagauucggagcgggaaaucgucuauaaugcgcuccgacgcgcccaucggaaaguguaacucagagugcauuacuccuaauggcaguaucccaaacgauaaacccuuccagaaugugaaccgaauaacauauggugcauguccuagauacgucaagcagaauacccugaaacuugccacugggaugaggaacguuccagaaaagcaaacacggggaauuuuuggcgcuaucgccggcuucaucgagaaugggugggaaggaaugguggacgguugguauggcuuucgucaccagaacagcgaggggaccggacaggcagcugaucugaaauccacgcaagccgcgauuaaucagaucaacggcaaguugaaucgccucauugguaagaccaacgagaaauuccaccagauagaaaaggaguucucugaaguagaggggagaauccaggaccuggaaaaauacguggaggauacaaagauugacuuauggagcuauaacgccgagcugcucgucgcacuugaaaaucaacauacuaucgaucugaccgacucagagaugaacaaauuguuugaaaggacaaagaagcagcuacgggagaaugcugaagauaugggcaacggaugcuucaaaaucuaccacaagugugacaaugccugcauuggcaguauacgaaacgggacuuaugaucaugacguguaccgcgacgaggcucugaauaacagauuucagaucaaaggaguugagcucaaguccgguuacaaagauuggauucuguggaucagcuucgccauuucuugcuuucuucuguguguggcauugcucggcuucaucaugugggccugccagaaggggaauauaagguguaacaucugcauuuga

SEQ ID NO: 137178 - RNA, 1701 nt, Artificial Sequence
  derived and/or modified CDS sequence (opt3) from hemagglutinin__InfluenzaA__AFM72378
augaagaccaucauugcccugagcuacauacucugccuuguguucgcucagaaacugcccggcaacgacaauuccacagcaacuuuguguuuagggcaccaugccgucccuaacggaacgaucguuaagaccauuacaaaugaucaaaucgaggugacuaacgcgaccgaacugguacagucuucaaguacaggugagauuugcaauagcccacaccagauccuagacggcgaaaacuguacccucauagaugcucugcuuggggacccgcagugcgauggauuucaaaauaaaaagugggaccuguucguggagagauccaaagcccauucuaacuguuaucccuacgaugucccugacuaugcaucguugaggucacucguggccagcaguggcacucuggaauuuaauaacgaguccuucaauuggacagguguuacccagaacgggacgucuagcgcuugcauccggcgcuccaauaacucauuuuucagucgacugaauuggcucacucaguuaaacuuuaaguacccagcacugaacgugaccaugcccaauaacgagcaguucgauaaacuuuauauuuggggaguccaccauccugugacagacaaagaucaaaucuuuuuguacgcccaggcuagcggccguauuacuguaucuaccaagagaucccagcaggccguuaucccaaauauaggcuauaggccccgggugcgcaacauuccuucaagagucagcaucuacuggacaauugugaaaccaggggacauccugcuaaucaauaguaccggaaaccucauugcgccgagggguuacuucaagauacggucuggcaaauccagcaucaugcgcucggaugcacccauugggaaguguaauucugccugcaucacgccuaacggauccauaccaaaugacaagcccuuucaaaacgugaaucgaauuacuuauggcgcuuguccuagauacgucaaacagaacacacugaaacuugccaccgguaugaggaauguuccagaaaagcagacucgggggaucuucggagcaaucgcuggcuuuauugagaacggcugggaagggaugguggacggaugguaugguuuccgucaccaaaauucagagggccgcgggcaggccgcggaucugaagaguacacaggccgcaaucgaccagauuaacggaaaauugaacagacucauaggcaagaccaaugagaaauuccaccaaaucgaaaaggaguuuagcgaaguagaggguaggauucaggaucuggaaaaguacguggaggacacgaaaaucgauuuaugguccuauaacgcugagcugcucgucgcccuugaaaaucagcauaccaucgaccugacagauucugagaugaacaaguuguucgaaaagacuaagaaacagcuacgggagaaugcugaagacauggggaacggcugcuuuaagauuuaccacaagugugauaaugccugcauaggaagcauccgaaacggcaccuaugaccaugauguguaccgcgacgaggcacugaauaacagauuccaaauuaaagggguugagcucaagucaggauacaaagacuggauccuguggauuaguuuugccaucuccugcuuccuucuguguguggcuuugcucgguuuuauaaugugggcgugccagaagggcaauaucagguguaacauuugcaucuga

SEQ ID NO: 137179 - RNA, 1701 nt, Artificial Sequence
  derived and/or modified CDS sequence (opt3) from hemagglutinin__InfluenzaA__AFM72389
augaagaccaucauugcccugagcuacauacucugccuuguguucgcucagaaacugcccggcaacgacaauuccacagcaacuuuguguuuagggcaccaugccgucccuaacggaacgaucguuaagaccauuacaaaugaucaaaucgaggugacuaacgcgaccgaacugguacagucuucaaguacaggugagauuugcaauagcccacaccagauccuagacggcgaaaacuguacccucauagaugcucugcuuggggacccgcagugcgauggauuucaaaauaaaaagugggaccuguucguggagagauccaaagcccauucuaacuguuaucccuacgaugucccugacuaugcaucguugaggucacucguggccagcaguggcacucuggaauuuaauaacgaguccuucaauuggacagguguuacccagaacgggacgucuagcgcuugcauccggcgcuccaauaacucauuuuucagucgacugaauuggcucacucacuuaaacuuuaaguacccagcacugaacgugaccaugcccaauaacgagcaguucgauaaacuuuauauuuggggaguccaucacccugugacagacaaagaucagaucuuuuuguacgcccaagcuagcggccguauuacuguaucuaccaagagaucccagcaggccguuaucccaaauauaggcuauaggccccgggugcgcaacaauccuucaagagucagcauuuacuggacaaucgugaaaccaggggacauucugcuaaucaacaguaccggaaaucucaucgcgccgagggguuacuucaagauucggucuggcaaauccagcauaaugcgcucggaugcacccaucgggaaguguaacucugccugcauuacgccuaauggauccaucccaaacgacaagcccuuucagaaugugaaccgaauaacuuauggcgcuuguccuagauacgucaaacaaaauacacugaaacuugccaccgguaugaggaacguuccagaaaagcagacucgggggauuuucggagcaaucgcuggcuuuaucgagaauggcugggaagggaugguggacggaugguaugguuuccgucaccagaacucagagggccgcgggcaagccgcggaucugaagaguacacaggccgcaauugaccagaucaacggaaaauugaauagacucauuggcaagaccaacgagaaauuccaucagauagaaaaggaguuuagcgaaguagaggguaggauccaagaucuggaaaaguacguggaggacacgaaaauugauuuaugguccuauaaugcugagcugcucgucgcccuugaaaaccagcacaccaucgaccugacagauucugagaugaauaaguuguucgaaaagacuaagaaacagcuacgggagaacgcugaagacauggggaauggcugcuuuaagaucuaccauaagugugauaacgccugcauuggaagcauacgaaauggcaccuaugaccacgauguguaccgcgacgaggcacugaacaauagauuccagaucaaagggguugagcucaagucaggauacaaagacuggauucuguggaucaguuuugccauuuccugcuuccuucuguguguggcuuugcucgguuuuaucaugugggcgugccaaaagggcaacauaagguguaauaucugcauuuga

SEQ ID NO: 137180 - RNA, 1701 nt, Artificial Sequence
  derived and/or modified CDS sequence (opt3) from hemagglutinin__InfluenzaA__AFM72400
augaagaccaucauugcccugagcuacauacucugccuuguguucgcucagaaacugcccggcaucgacaacuccacagcaacuuuguguuuagggcaccaugccgucccuaauggaacgauuguuaagaccaucacaaacgaucaaauugaggugacuaaugcgaccgaacugguacagucuucaaguacaggugagaucugcgacagcccacaccagauacuagauggcgaaaacuguacccucaucgacgcucugcuuggggauccgcagugcgacggauuucaaaauaaaaagugggaucuguucguggagagauccaaagccuauucuaacuguuaccccuaugacgucccugauuacgcaucguugaggucacucguggccagcaguggcacucuggaauuuaauaacgaguccuucaauugggcugguguuacacagaacgggaccucuagcgcaugcaagcggggauccaauaacucauuuuucagucgccugaauuggcucacgcauagcaaguuuaaauauccagccuuaaacgugacuaugcccaauaacgaggaguucgacaagcuguacauuuggggcguccuucacccuggcaccgauaacgaccagaucuuuuuguaugcucaggccucugggcgaauuacaguguccacuaaacguucacaacagaccguaaucccaaauauaggaagcagacccaggguucggaacauuccuagucgcaucucuauuuacuggacaaucgugaagccaggugauauccugcuaauuaauuccaccggcaaccucauagcgccgagaggguacuucaaaaucaggagcggaaagucgucuauuaugcgguccgacgcacccaucggcaaguguaauucagaaugcauaacgccuaacgguaguauuccaaaugacaaacccuuucagaacgucaaucgcaucacuuauggggccuguccucgauacgugaagcagaacacacugaaacuugcuaccggaaugagaaaugugccagaaaagcaaacuaggggcaucuucggcgccauugcaggguuuaucgagaacggaugggaggguauggucgauggcugguauggguuccggcaucagaauagcgaaggaauuggccaggcugccgaccugaaauccacacaagcggccauagaucagaucaacgguaaguugaaucgucucauugggaaaaccaacgagaaguuccaccagaucgaaaaggaguuuucugaaguugagggccgcauccaggaccuggagaaauacguggaagauacgaagauugacuuauggagcuauaacgcagagcugcucguagcucuugaaaaucaacacaccauagaucugacagacucagagaugaacaaauuguucgaaaagacuaaaaagcagcuaagagagaaugccgaggauaugggaaacggcugcuuuaagaucuaccauaaaugugacaaugcuugcauugggaguaucaggaacggaaccuaugaucacgacguguaccgggacgaagcccugaauaaccgauuccagauuaagggugucgagcucaaauccggcuacaaggauuggauccuguggaucagcuuugcaauaucuugcuuccuucuguguguggccuugcucggguuuauuaugugggcuugccagaaaggaaauauccgcuguaacauuugcaucuga

SEQ ID NO: 137181 - RNA, 1701 nt, Artificial Sequence
  derived and/or modified CDS sequence (opt3) from hemagglutinin__InfluenzaA__AFM72411
augaagaccaucauugcccugagcuacauacucugccuuguguucgcucagaaacugcccggcaucgacaacuccacagcaacuuuguguuuagggcaccaugccgucccuaauggaacgauuguuaagaccaucacaaacgaucaaauugaggugacuaaugcgaccgaacugguacagucuucaaguacaggugagaucugcgacagcccacaccagauacuagauggcgaaaacuguacccucaucgacgcucugcuuggggauccgcagugcgacggauuucaaaauaaaaagugggaucuguucguggagagauccaaagccuauucuaacuguuaccccuaugacgucccugauuacgcaucguugaggucacucguggccagcaguggcacucuggaauuuaauaacgaguccuucaauugggcugguguuacacagaacgggaccucuagcgcaugcaagcggggauccaauaacucauuuuucagucgccugaauuggcucacgcagagcaaguuuaaauauccagccuuaaacgugacuaugcccaauaacgaggaguucgacaagcuguacauuuggggcguccaucacccugugaccgauaacgaccagaucuuucuuuaugcucaagccucuggccgaauuacaguauccacuaaacguucacagcagaccguuaucccaaauauagggagcagacccagggugcggaacauuccuagucgcaucucuauuuacuggacaaucgucaagccaggagauaucuugcugauuaauuccaccgguaaccuaauagcgccgagaggcuacuucaaaaucaggagcgggaagucgucuauuaugcgguccgacgcacccaucggaaaguguaauucagaaugcauaacgccuaacggcaguauuccaaaugacaaacccuuucagaacgugaaucgcaucacuuauggugccuguccucgauacgugaagcaaaacacacucaaacuggcuaccgggaugagaaaugucccagaaaagcagacuaggggaaucuucggcgccauugcaggcuuuaucgagaacgggugggagggaaugguugaugguugguauggcuuccggcaucagaauagcgaagggauuggacaagcugccgaccuuaaauccacacaggcggccauagaucagaucaacggcaagcugaaucguuugauugguaaaaccaacgagaaguuccaccagaucgaaaaggaguuuucugaaguggaggggcgcauccaagacuucgagaaauacguagaagauacgaagauugaccucuggagcuauaacgcagagcuguuaguggcucuggaaaaucagcacaccauagaucucacagacucagagaugaacaaacuuuuugaaaagacuaaaaagcagcugagagagaaugccgaggauaugggcaacggaugcuucaagaucuaccauaaaugugacaaugcuugcauuggcaguaucaggaacgggaccuaugaucacgacgucuaccgggacgaagccuugaauaaccgauuucagauuaagggaguggagcuaaaauccgguuacaaggauuggauccuguggaucagcuucgcaauaucuugcuuucuccuguguguugcccuucugggcuucauuaugugggcuugccaaaaagggaauauccgcuguaacauuugcaucuga

SEQ ID NO: 137182 - RNA, 1701 nt, Artificial Sequence
  derived and/or modified CDS sequence (opt3) from hemagglutinin__InfluenzaA__AFM72422
augaagaccaucauugcccugagcuacauacucugccuuguguucgcucagaaacugcccggcaacgacaauuccacagcaacuuuguguuuagggcaccaugccgucccuaacggaacgaucguuaagaccauuacaaaugaucaaaucgaggugacuaacgcgaccgaacugguacagucuucaaguacaggugagauuugcgacagcccacaccagauccuagauggcgaaaauuguacccucauagacgcucugcuuggggauccgcagugcgacggauuucaaaacaaaaagugggaucuguucguggagagauccaaagccuauucuaauuguuaccccuaugacgucccugauuacgcaucguugaggucacucguggccagcaguggcacucuggaauuuaacaaugaguccuucaacuggacagguguuacccagaaugggacgucuagcgcuugcauccggcgcuccaacaauucauuuuucagucgacugaacuggcucacucauuuaaaguuuaaguauccagcacugaaugugaccaugcccaacaacgaggaguucgacaaacuuuacauuuggggaguccaccauccugugacagauaaugaccagaucuuuuuguaugcccaggcuagcggccguauuacuguaucuaccaagagaucccaacagacaguuaucccaaacauaggcuucaggccccgggugcgcaauauuccuucaagaaucagcauuuacuggaccaucgucaaaccaggggauauccugcuaauuaacaguacgggaaaucucauagccccgagggguuacuuuaagauccggucuggcaaauccagcauuaugcgcucggacgcgcccaucgggaaguguaacucugaaugcauaacuccuaauggauccauuccaaacgacaagcccuuccagaaugugaaccgaaucacauauggcgcauguccuagauacgugaaacagaauacccugaaacuugccacugguaugaggaacgucccagaaaaacaaacacgggggaucuuuggagcuauugccggcuucaucgagaauggcugggaggggaugguugauggaugguaugguuuccgucaccagaacucagaaggcauugggcaggcagcugaccugaagaguacccaagccgcgauagaucagaucaauggaaaauugaaccgccucauuggcaagacgaacgagaaauuucaccagaucgaaaaggaguucagcgaaguggaggguagaauccaggaccuggagaaguacgccgaagauaccaaaauugacuuaugguccuauaaugcagagcugcucguagcucuugaaaaccaacauacaauagaucugacugacucugagaugaauaaguuguuugaaaagaccaagaaacagcuaagggagaacgccgaggauauggggaauggcugcuucaagaucuaccacaagugugacaacgcuugcauuggaagcauccggaauggcacauaugaucaugacguguaccgagacgaagcccugaacaaucgcuuucagauuaaaggggucgagcucaagucaggauacaaagauuggauccuguggauaaguuucgcaaucuccugcuuucuucuguguguggccuugcucgguuucauuaugugggcuugccagaagggcaacaucagauguaauauuugcaucuga

SEQ ID NO: 137183 - RNA, 1701 nt, Artificial Sequence
  derived and/or modified CDS sequence (opt3) from hemagglutinin__InfluenzaA__AFM72433
augaagaccaucauugcccugagcuacauacucugccuuguguucgcucagaaacugcccggcaacgacaauuccacagcaacuuuguguuuagggcaccaugccgucccuaacggaacgaucguuaagaccauuacaaaugaucaaaucgaggugacuaacgcgaccgaacugguacagucuucaaguacaggugagauuugcgacagcccacaccagauccuagauggcgaaaauuguacccucauagacgcucugcuuggggauccgcagugcgacggauuucaaaacaaaaagugggaucuguucguggagagauccaaagccuauucuaauuguuaccccuaugacgucccugauuacgcaucguugaggucacucguggccagcaguggcacucuggaauuuaacaaugaguccuucaacuggacagguguuacccagaaugggacgucuagcgcuugcauccggcgcuccaacaauucauuuuucagucgacugaacuggcucacucauuuaaaguuuaaguauccagcacugaaugugaccaugcccaacaacgaggaguucgacaaacuuuacauuuggggaguccaccauccugugacagauaaugaccagaucuuuuuguaugcccaggcuagcggccguauuacuguaucuaccaagagaucccaacagacaguuaucccaaacauaggcuucaggccccgggugcgcaauaacccuucaagaauuagcaucuacuggaccauugucaaaccaggggauauccugcuaaucaauaguacgggaaaccucauugccccgagggguuacuuuaagauacggucuggcaaauccagcaucaugcgcucggacgcgcccauugggaaguguaauucugaaugcaucacuccuaacggauccauaccaaaugacaagcccuuccagaacgugaaucgaauuacauauggcgcauguccuagauacgugaaacagaacacccugaaacuugccacugguaugaggaaugucccagaaaaacaaacacgggggaucuuuggagcuaucgccggcuucauugagaacggcugggaggggaugguugauggaugguaugguuuccgucaccaaaauucagaaggcaucgggcaggcagcugaccugaagaguacccaggccgcgauugaucagauaaacggaaaauugaaccgccucaucggcaagacgaaugagaaauuucaccagauugaaaaggaguucagcgaaguggaggguagaauccaggaccuggagaaguacgccgaagauaccaaaaucgacuuaugguccuauaacgcagagcugcucguagcucuugaaaaucaacauacaauugaucugacugacucugagaugaacaaguuguuugaaaagaccaagaaacagcuaagggagaaugccgaggauauggggaacggcugcuucaagauauaccacaagugugacaaugcuugcaucggaagcauucggaacggcacauaugaucaugacguguaccgagacgaagcccugaauaaccgcuuucagaucaaaggggucgagcucaagucaggauacaaagauuggauucuguggaucaguuucgcaauauccugcuuucuucuguguguggccuugcucgguuucaucaugugggcuugccagaagggcaauauuagauguaacaucugcauuuga

SEQ ID NO: 137184 - RNA, 1701 nt, Artificial Sequence
  derived and/or modified CDS sequence (opt3) from hemagglutinin__InfluenzaA__AFM72444
augaagaccaucauugcccugagcuacauacucugccuuguguucgcucagaaacugcccggcaacgacaauuccacagcaacuuuguguuuagggcaccaugccgucccuaacggaacgaucguuaagaccauuacaaaugaucaaaucgaggugacuaacgcgaccgaacugguacagucuucaaguacaggugagauuugcgacagcccacaccagauccuagauggcgaaaauuguacccucauagacgcucugcuuggggauccgcagugcgacggauuucaaaacaaaaagugggaucuguucguggagagauccaaagccuauucuaauuguuaccccuaugacgucccugauuacgcaucguugaggucacucguggccagcaguggcacucuggaauuuaacaaugaguccuucaacuggacagguguuacccagaaugggacgucuagcgcuugcauccggcgcuccaacaauucauuuuucagucgacugaacuggcucacucauuuaaaguuuaaguauccagcacugaaugugaccaugcccaacaacgaggaguucgacaaacuuuacauuuggggaguccaccauccugugacagauaaugaccagaucuugcuguaugcccaggcuagcggccguauuacuguaucuaccaagagaucccaacagacaguuaucccaaacauaggcuuuaggccccgggugcgcaauaacccuucaagaauuagcaucuacuggaccauugucaaaccaggggauauccuacucaucaauaguacgggaaaccugauugccccgagggguuacuucaagauacggucuggcaaauccagcaucaugcgcucggacgcgcccauugggaaguguaauucugaaugcaucacuccuaacggauccauaccaaaugacaagcccuuucagaacgugaaucgaauuacauauggcgcauguccuagauacgugaaacagaacacccuuaagcuggccacugguaugaggaaugucccagaaaaacaaacacgggggaucuucggagcuaucgccggcuuuauugagaacggcugggaggggaugguugauggaugguaugguuuccgucaccaaaauucagaaggcaucgggcaggcagcugacuugaagaguacccaggccgcgauugaucagauaaacggaaaacucaaccgccugaucggcaagacgaaugagaaauuccaccagauugaaaaggaguuuagcgaaguggaggguagaauccaggacuuagagaaguacgccgaagauaccaaaaucgaccugugguccuauaacgcagagcuccuuguagcucuggaaaaucaacauacaauugauuugacugacucugagaugaacaagcuauucgagaaaaccaagaaacagcugagggaaaaugccgaggauauggggaacggcugcuuuaagauauaccacaagugugacaaugcuugcaucggaagcauucggaacggcacauaugaucaugacguguaccgagacgaagcccucaauaaccgcuuccagaucaaaggggucgagcugaagucaggauacaaagauuggauucuuuggaucaguuuugcaauauccugcuuccuguuguguguggcccuccuggguuuuaucaugugggcuugccagaagggcaauauuagauguaacaucugcauuuga

SEQ ID NO: 137185 - RNA, 1701 nt, Artificial Sequence
  derived and/or modified CDS sequence (opt3) from hemagglutinin__InfluenzaA__AFM72455
augaagaccaucauugcccugagcuacauacucugccuuguguucgcucagaaacugcccggcaacgacaauuccacagcaacuuuguguuuagggcaccaugccgucccuaacggaacgaucguuaagaccauuacaaaugaucaaaucgaggugacuaacgcgaccgaacugguacagucuucaaguacaggugagauuugcgacagcccacaccagauccuagauggcgaaaauuguacccucauagacgcucugcuuggggauccgcagugcgacggauuucaaaacaaaaagugggaucuguucguggagagauccaaagccuauucuaauuguuaccccuaugacgucccugauuacgcaucguugaggucacucguggccagcaguggcacucuggaauuuaacaaugaguccuucaacuggacagguguuacccagaaugggacgucuagcgcuugcauccggcgcuccaacaauucauuuuucagucgacugaacuggcucacucaguuaaaguuuaaguauccagcacugaaugugaccaugcccaacaacgaggaguucgacaaacuuuacauuuggggaguccaucacccugugacagauaaugaccagaucuuuuuguaugcccaagcuagcggccguauuacuguaucuaccaagagaucccagcagacaguuaucccaaacauaggcuucaggccccgggugcgcaauaacccuucaagaauuagcaucuacuggaccauugucaaaccaggggauauccugcuaaucaauaguacgggaaaccucauugccccgagggguuacuuuaagauacggucuggcaaauccagcaucaugcgcucggacgcgcccauugggaaguguaauucugaaugcaucacuccuaacggauccauaccaaaugacaagcccuuccagaacgugaaucgaauuacauauggcgcauguccuagauacgugaaacaaaacacccugaaacuugccacugguaugaggaaugucccagaaaaacagacacgggggaucuuuggagcuaucgccggcuucauugagaacggcugggaggggaugguugauggaugguaugguuuccgucaucaaaauucagaaggcaucgggcaggcagcugaccugaagaguacccaggccgcgauugaucagauaaacggaaaauugaaccgccucaucggcaagacgaaugagaaauuucaccagauugaaaaggaguucagcgaaguggaggguagaauccaagaccuggagaaguacgccgaagauaccaaaaucgacuuaugguccuauaacgcagagcugcucguagcucuugaaaaucagcacacaauugaucugacugacucugagaugaacaaguuguuugaaaagaccaagaaacagcuaagggagaaugccgaggauauggggaacggcugcuucaagauauaccauaagugugacaaugcuugcaucggaagcauucggaacggcacauaugaucacgacguguaccgagacgaagcccugaauaaccgcuuucagaucaaaggggucgagcucaagucaggauacaaagauuggauucuguggaucaguuucgcaauauccugcuuucuucuguguguggccuugcucgguuucaucaugugggcuugccaaaagggcaauauuagauguaacaucugcauuuga

SEQ ID NO: 137186 - RNA, 1701 nt, Artificial Sequence
  derived and/or modified CDS sequence (opt3) from hemagglutinin__InfluenzaA__AFM72466
augaagaccaucauugcccugagcuacauacucugccuuguguucgcucagaaacugcccggcaacgacaauuccacagcaacuuuguguuuagggcaccaugccgucccuaacggaacgaucguuaagaccauuacaaaugaucaaaucgaggugacuaacgcgaccgaacugguacagucuucaaguacaggugagauuugcgacagcccacaccagauccuagauggcgaaaauuguacccucauagacgcucugcuuggggauccgcagugcgacggauuucaaaacaaaaagugggaucuguucguggagagauccaaagccuauucuaauuguuaccccuaugacgucccugauuacgcaucguugaggucacucguggccagcaguggcacucuggaauuuaacaaugaguccuucaacuggacagguguuacccagaaugggacgucuagcgcuugcauccggcgcuccaacaauucauuuuucagucgacugaacuggcucacucauuuaaaguuuaaguauccagcacugaaugugaccaugcccaacaacgaggaguucgacaaacuuuacauuuggggaguccaccauccugugacagauaaggaccagaucuuuuuguaugcccaggcuagcggccguauuacuguaucuaccaaaagaucccaacagacaguuaucccaaauauaggcuucaggccccgggugcgcaacaauccuucaagaauuagcaucuacuggaccauugucaagccaggggauauccugcuaaucaacaguacgggaaaucucauugccccgagggguuacuuuaaaauacggucuggcaaguccagcaucaugcgcucggacgcgcccauugggaaguguaacucugaaugcaucacuccuaauggauccauaccaaacgacaaacccuuccagaaugugaaccgaauuacauauggcgcauguccuagauacgugaagcagaauacccugaaacuugccacugguaugaggaacgucccagaaaagcaaacacgggggaucuuuggagcuaucgccggcuucauugagaauggcugggaggggaugguugauggaugguaugguuuccgucaccagaacucagaaggcaucgggcaggcagcugaccugaaaaguacccaagccgcgauugaucagauaaauggaaaguugaaccgccucaucggcaaaacgaacgagaaguuucaccagauugaaaaggaguucagcgaaguggaggguagaauccaggaccuggagaaauacgccgaagauaccaagaucgacuuaugguccuauaaugcagagcugcucguagcucuugaaaaccaacauacaauugaucugacugacucugagaugaauaaauuguuugaaaagaccaaaaagcagcuaagggagaacgccgaggauauggggaauggcugcuucaagauauaccacaaaugugacaacgcuugcaucggaagcauucggaauggcacauaugaucaugacguguaccgagacgaagcccugaacaaucgcuuucagaucaagggggucgagcucaaaucaggauacaaggauuggauucuguggaucaguuucgcaauauccugcuuucuucuguguguggccuugcucgguuucaucaugugggcuugccagaaaggcaacauuagauguaauaucugcauuuga

SEQ ID NO: 137187 - RNA, 1701 nt, Artificial Sequence
  derived and/or modified CDS sequence (opt3) from hemagglutinin__InfluenzaA__AFM72488
augaagaccaucauugcccugagcuacauacucugccuuguguucgcucagaaacugcccggcaacgacaauuccacagcaacuuuguguuuagggcaccaugccgucccuaacggaacgaucguuaagaccauuacaaaugaucaaaucgaggugacuaacgcgaccgaacugguacagucuucaaguacagguggcauuugcgacagcccacaccagauccuagauggggagaauuguacccucauagacgcucugcuuggagauccgcagugcgacggcuuucaaaacaaaaagugggaucuguucguggaaagauccaaagccuauucuaauuguuaccccuaugacgucccugauuacgcaucguugaggucacucguggccagcagugguacucuggaguuuaacaaugaauccuucaacuggacagggguuacccagaauggaacgucuagcgcuugcaagcggcgcuccaacaauucauuuuucagucgacugaacuggcucacucaguuaaaguuuaaauauccagcacugaaugugaccaugcccaacaacgagaaguucgacaaacuuuacaucuggggcguccaucacccugugacagauaaugagcagaucuuuuuguaugcccaagcuagcggccguauuacuguaucuaccaagagaucccagcagacaguuauuccaaacaucggguucaggccccgggugcgcaauauaccuucaagaauuagcaucuacuggaccauugucaaaccaggagacauccugcuaaucaacaguacggguaaucucauugccccgaggggcuacuuuaagauacggucugggaaguccagcaucaugcgcucggaugcgcccauuggaaaauguaacucuaagugcaucacuccuaauggcuccauaccaaacgacaaacccuuccagaaugugaaccgaauuacauauggugcauguccuagauacgugaagcaaaauacccugaaacuugccacugggaugaggaacgucccagaaaagcagacacggggaaucuuuggcgcuaucgccggcuucauugagaaugggugggaaggaaugguugacgguugguauggcuuccgucaucagaacucagaggggaucggacaagcagcugaucugaaaaguacccaggccgcgauugaccagauaaauggcaaguugaaccgccucaucgguaagacgaacgagaaauuucaccagauugaaaaggaguucagcgaaguggaggggagaauccaagaucuggaaaaauacguagaggacaccaagaucgauuuaugguccuauaaugccgagcugcucguggcacuugaaaaccagcacacaauugaccugacugauucugagaugaauaaauuguuugaaaagaccaagaaacagcuaagggagaacgcugaagacaugggcaauggaugcuucaagauauaccauaaaugugauaacgccugcaucggcagcauucggaaugggacauaugaccacgaugucuaccgagacgaggcucugaacaaucgcuuucagaucaagggaguggagcucaaaucagguuacaaggacuggauucuguggaucaguuucgccauauccugcuuucuucuguguguugcauugcucggcuucaucaugugggccugccaaaaggggaacauuagauguaauaucugcauuuga

SEQ ID NO: 137188 - RNA, 1701 nt, Artificial Sequence
  derived and/or modified CDS sequence (opt3) from hemagglutinin__InfluenzaA__AFM72499
augaagaccaucauugcccugagcuacauacucugccuuguguucgcucagaaacugcccggcaacgacaauuccacagcaacuuuguguuuagggcaccaugccgucccuaacggaacgaucguuaagaccauuacaaaugaucaaaucgaggugacuaacgcgaccgaacugguacagucuucaaguacagguggcauuugcgacagcccacaccagauccuagauggggagaauuguacccucauagacgcucugcuuggagauccgcagugcgacggcuuucaaaacaaaaagugggaucuguucguggaaagauccaaagccuauucuaauuguuaccccuaugacgucccugauuacgcaucguugaggucacucguggccagcagugguacucuggaguuuaacaaugaauccuucaacuggacagggguuacccagaauggaacgucuagcgcuugcaagcggcgcuccaacaauucauuuuucagucgacugaacuggcucacucaguuaaaguuuaaauauccagcacugaaugugaccaugcccaacaacgagaaguucgacaaacuuuacaucuggggcguccaucacccugugacagauaaugaccagaucuuuuuguaugcccaagcuagcggccguauuacuguaucuaccaagagaucccagcagacaguuauuccaaacaucgggucaaggccccgggugcgcaauauaccuagcagaauuaguaucuacuggaccauugucaaaccaggagauauccugcuaaucaacucuacggguaaucucauugccccgaggggcuacuucaagauacgguccgggaaaagcucgaucaugcgcucugacgcgcccauuggaaaauguaacuccgagugcaucacuccuaauggcucaauaccaaacgacaagcccuuucagaaugugaaccgaauuacauauggugcauguccuagauacgugaaacaaaauacccugaagcuggccacugggaugaggaacgucccagaaaaacagacacggggaaucuucggcgcuaucgccggcuuuauugagaaugggugggaaggaaugguugaugguugguauggcuuccgucaucagaacagugaggggaucggacaagcagcugaccuuaagagcacccaggccgcgauugaucagauaaauggcaaauugaaccgccucaucgguaagacgaacgagaaguuccaccagauugaaaaagaguuuuccgaaguggaggggagaauccaagaccuggaaaaguacguagaggauaccaaaaucgacuuauggucuuauaaugccgagcugcucguggcacuugaaaaccagcacacaauugaucugacugacagcgagaugaauaaguuguucgaaaagaccaagaagcagcuaagggagaacgcugaagauaugggcaauggaugcuuuaaaauauaccauaagugugacaacgccugcaucggcucaauucggaaugggacauaugaucacgacgucuaccgagacgaggcucugaacaaucgcuuccagaucaaaggaguggagcucaagagugguuacaaagauuggauucuguggaucuccuuugccauaagcugcuuccuucuguguguugcauugcucggcuuuaucaugugggccugccaaaaggggaacauuagauguaauaucugcauuuga

SEQ ID NO: 137189 - RNA, 1698 nt, Artificial Sequence
  derived and/or modified CDS sequence (opt3) from hemagglutinin__InfluenzaA__AFM72521
augaaggugaaacugcucguccuucugugcaccuucacagccacuuacgcugacacgaucuguauuggcuaucacgcaaacaauagcaccgauacaguugacacuguguuggagaagaacguaaccgugacacauuccgucaauuuacuggaaaacucucacaaugggagacuaugccuccugaaaggaauagcccccuuacagcuggguaacuguucaguggcgggcuggaucuuggggaauccugagugcgaacuccugauuaguaaggagagcugguccuacaucguugaaaaaccaaacccggagaauggaaccuguuaucccggccauuuugcugauuacgaggaacugagggagcaacucucuucggugucaagccuugaacgguucgagauuuuuccuaaggagaguuccuggccaaaccacacugucacaggugugucugccagcugcucccauaauggggaaucaaguuucuaucgcaaccugcuuugguugaccggaaagaauggccuguaccccaaccuaagcaaaucuuaugcaaauaacaaggagaaagaaguacucguucuguggggcgugcaccacccuccaaacaucgggaaucagaaggcccuuuaccauacggagaacgcuuacgucuccguggugucaagccacuauagucgaaaauuuacucccgaaauagcaaagcguccuaaggucagagaccaggagggaaggaucaauuacuauuggacccuguuggagccaggugauacaauuaucuucgaagccaacggcaaucucauugcuccgcgguacgccuuugcgcugucucgcggguucggauccggcaucauaaacagcaaugcacccauggacaaaugugaugccaagugccagacuccucaaggugcuauuaacucgucuuuaccauuucagaauguucaucccgugaccaucggggaguguccuaaauauguaagauccgccaagcugaggauggugacaggacuccggaacauuccaucaauccagagucgcggccuuuucggcgcaaucgcuggguuuauugaaggagguuggaccggcauggucgacgggugguacggauaucaccaccagaaugagcaaggcagcgguuacgccgcggaucagaaauccacgcagaacgccauaaaugggaucacuaacaagguaaauucuguuauugagaaaaugaacacacaguucaccgcagugggcaaggaauuuaacaagcuggagcgaagaauggaaaauuugaacaaaaaggucgacgauggauucaucgacauauggacuuacaaugcugagcuacuggugcuccuggaaaacgagaggacacuugauuuccaugacagcaaugugaaaaaccuguaugaaaagguuaaaucacaauugaagaauaacgccaaggagauuggcaaugggugcuuugaguucuaccacaaauguaacgacgaaugcauggagagugugaagaauggaaccuaugauuaccccaaauauuccgaagagagcaagcucaaccgggagaaaaucgacggugucaagcuggaaucuaugggcguguaccagaucuuagcuauuuauucaacggucgccaguagccuggugcuacucguuucccugggggcaaucucuuuuuggaugugcucgaauggaagccuucagugucguauuugcauauga

SEQ ID NO: 137190 - RNA, 1698 nt, Artificial Sequence; identical to SEQ ID NO: 137189
  derived and/or modified CDS sequence (opt3) from hemagglutinin__InfluenzaA__AFM72532

SEQ ID NO: 137191 - RNA, 1698 nt, Artificial Sequence; identical to SEQ ID NO: 137189
  derived and/or modified CDS sequence (opt3) from hemagglutinin__InfluenzaA__AFM72543

SEQ ID NO: 137192 - RNA, 1698 nt, Artificial Sequence
  derived and/or modified CDS sequence (opt3) from hemagglutinin__InfluenzaA__AFM72554
augaaggugaaacugcucguccuucugugcaccuucacagccacuuacgcugacacgaucuguauuggcuaucacgcaaacaauagcaccgauacaguugacacuguguuggagaagaacguaaccgugacacauuccgucaauuuacuggaaaacucucacaaugggagacuaugccuccugaaaggaauagcccccuuacagcuggguaacuguucaguggcgggcuggaucuuggggaauccugagugcgaacuccugauuaguaaggagagcugguccuacaucguugaaaaaccaaacccggagaauggaaccuguuaucccggccauuuugcugauuacgaggaacugagggagcaacucucuucggugucaagccuugaacgguucgagauuuuuccuaaggagaguuccuggccaaaccacacugucacaggugugucugccagcugcucccauaauggggaaucaaguuucuaucgcaaccugcuuugguugaccggaaagaauggccuguaccccaaccuaagcaaaucuuaugcaaauaacaaggagaaagaaguacucguucuguggggcgugcaccacccuccaaacaucgggaaucagaaggcccuuuaccauacggagaacgcuuacgucuccguggugucaagccacuauagucgaaaauuuacucccgaaauagcaaagcguccuaaggucagagaccaggagggaaggaucaauuacuauuggacccuguuggagccaggugauacaauuaucuucgaagccaacggcaaucucauugcuccgcgguacgccuuugcgcugucucgcggguucggauccggcaucauaaacagcaaugcacccauggacaaaugugaugccaagugccagacuccucaaggugcuauuaacucgucuuuaccauuucagaauguucaucccgugaccaucggggaguguccuaaauauguaagauccgccaagcugaggauggugacaggacuccggaacauuccaucaauccagagucgcggccuuuucggcgcaaucgcuggguuuauugaaggagguuggaccggcauggucgacgggugguacggauaucaccaccagaaugagcaaggcagcgguuacgccgcggaucagaaauccacgcagaacgccauaaaugggaucacuaacaagguaaauucuguuauugagaaaaugaacacacaguucaccgcagugggcaaggaauuuaacaagcuggagcgaagaauggaaaauuugaacaaaaaggucgacgauggauucaucgacauauggacuuacaaugcugagcuacuggugcuccuggaaaacgagaggacacuugauuuccaugacagcaaugugaaaaaccuguaugaaaagguuaaaucacaauugaagaauaacgccaaggagauuggcaaugggugcuuugaguucuaccacaaauguaacgacgaaugcauggagagugugaagaauggaaccuaugauuaccccaaauauuccgaagagagcaagcucaaccgggagaaaaucgacgaagucaagcuggagucuauggguguguaccagaucuuagcuauuuauucaacggucgccaguagccuggugcuacucguuucccugggcgcaaucucuuuuuggaugugcucgaaugggagccuucagugucguauuugcauauga

SEQ ID NO: 137193 - RNA, 1701 nt, Artificial Sequence
  derived and/or modified CDS sequence (opt3) from hemagglutinin__InfluenzaA__AFM72565
augaagaccaucauugcccugagcuacauacucugccuuguguucgcucagaaacugcccggcaacgacaauuccacagcaacuuuguguuuagggcaccaugccgucccuaacggaacgaucguuaagaccauuacaaaugaucaaaucgaggugacuaacgcgaccgaacugguacagucuucaaguacaggugagauuugcgacagcccacaccagauccuagauggcgaaaauuguacccucauagacgcucugcuuggggauccgcagugcgacggauuucaaaacaaaaagugggaucuguucguggagagauccaaagccuauucuaauuguuaccccuaugacgucccugauuacgcaucguugaggucacucguggccagcaguggcacucuggaauuuaacaaugaguccuucaacuggacagguguuacccagaaugggacgucuagcuccugcauccggcgcucaaacaauagcuuuuucagccgacugaacuggcucacucauuuaaaguuuaaguauccagcucugaaugugaccaugcccaacaacgagaaauucgacaaacuuuacauuuggggaguccaccauccuggcacagauaaugaccagaucuuuccauaugcacaggccucuggccguauuacuguguccaccaagagaucacaacagacaguaauccccaacauagggagcaggccucggguucgcaauauuccaaguagaaucucuauuuacuggaccaucgugaagccgggagauaucuugcugauuaacuccacggguaaucuaauagcucccaggggcuacuucaaaauccggagcgggaagucgucuauuaugcgcuccgacgccccuaucggaaaguguaacucagaaugcauaacuccaaauggcaguauucccaacgacaaaccuuuucagaaugucaaccgaaucacauauggugcguguccaagauacgugaagcagaauacccucaaacuggcaacugggaugaggaacgugcccgagaagcaaacacggggaaucuucggcgccauugcuggcuuuaucgaaaaugggugggagggaauggucgaugguugguauggcuuccgucaccagaacagcgaggggauuggacaggccgcagaccuuaaauccacccaagcugccauagaucagaucaauggcaagcugaaccgcuugauugguaaaacgaacgaaaaguuccaccagaucgagaaggaauuuucugagguugaagggagaauccaggaccucgagaaauacguggaggauaccaagauugaccuguggagcuauaaugcggaauuacugguagcccucgagaaccaacauacaauagaucuuacugacucagaaaugaauaaacuguucgagaagaccaaaaagcaguugagggaaaacgcagaggauaugggcaauggaugcuuuaagaucuaccacaaaugugacaacgcuugcauuggcaguauccggaaugggacauaugaucaugacguguaccgagacgaggcccuaaacaaucgcuuccagauuaagggagucgaacugaaauccgguuacaaggauuggauccucuggauaaguuuugcuaucucuugcuuccugcuuuguguggcccuguugggcuuuauuaugugggcaugccagaaagggaacaucagauguaauauuugcaucuga

SEQ ID NO: 137194 - RNA, 1701 nt, Artificial Sequence
  derived and/or modified CDS sequence (opt3) from hemagglutinin__InfluenzaA__AFM72576
augaagaccaucauugcccugagcuacauacucugccuuguguucgcucagaaacugcccggcaacgacaauuccacagcaacuuuguguuuagggcaccaugccgucccuaacggaacgaucguuaagaccauuacaaaugaucaaaucgaggugacuaacgcgaccgaacugguacagucuucaaguacaggugagauuugcgacagcccacaccagauccuagauggcgaaaauuguacccucauagacgcucugcuuggggauccgcagugcgacggauuucaaaacaaaaagugggaucuguucguggagagauccaaagccuauucuaauuguuaccccuaugacgucccugauuacgcaucguugaggucacucguggccagcaguggcacucuggaauuuaacaaugaguccuucaacuggacagguguuacccagaaugggacgucuagcuccugcauccggggaucaaacaauagcuuuuucagccgccugaacuggcucacucauuuaaaguuuaaguauccagcucugaaugugaccaugcccaacaacgagaaauucgacaaacuuuacauuuggggcguccaccauccuggcacagauaaugaccagaucuuuccauaugcacaggccucugggcgaauuacuguguccaccaagcguucacaacagacaguaauccccaacauaggaagcagaccuaggguucggaauauuccaagucgcaucucuauuuacuggaccaucgugaagccgggugauaucuugcugauuaacuccacgggcaaucuaauagcucccagaggguacuucaaaaucaggagcggaaagucgucuauuaugcgguccgacgccccuaucggcaaguguaacucagaaugcauaacuccaaaugguaguauucccaacgacaaaccuuuucagaaugucaaccgcaucacauauggggcguguccacgauacgugaagcagaauacccucaaacuggcaacuggaaugagaaacgugcccgagaagcaaacaaggggcaucuucggcgccauugcuggguuuaucgaaaauggaugggaggguauggucgauggcugguauggguuccggcaccagaacagcgagggaauuggccaggccgcagaccuuaaauccacccaagcugccauagaucagaucaaugguaagcugaaccguuugauugggaaaacgaacgaaaaguuccaccagaucgagaaggaauuuucugagguugaaggccgcauccaggaccucgagaaauacguggaggauaccaagauugaccuguggagcuauaaugcggaauuacugguagcccucgagaaccaacauacaauagaucuuacugacucagaaaugaauaaacuguucgagaagaccaaaaagcaguugagagaaaacgcagaggauaugggaaauggcugcuuuaagaucuaccacaaaugugacaacgcuugcauugggaguaucaggaauggaacauaugaucaugacguguaccgggacgaggcccuaaacaaucgauuccagauuaagggugucgaacugaaauccggcuacaaggauuggauccucuggauaaguuuugcuaucucuugcuuccugcuuuguguggcccuguugggguuuauuaugugggcaugccagaaaggaaacauccgcuguaauauuugcaucuga

SEQ ID NO: 137195 - RNA, 1698 nt, Artificial Sequence
  derived and/or modified CDS sequence (opt3) from hemagglutinin__InfluenzaA__AFM72799
augaaggugaaacugcucguccuucugugcaccuucacagccacuuacgcugacacgaucuguauuggcuaucacgcaaacaauagcaccgauacaguugacacuguguuggagaagaacguaaccgugacacauuccgucaauuuacuggaagauaaccacaaugggaaacuaugccuccugaagggaaaagcgccccuucagcuggguaacuguucuguggccggcuggauauuggggaauccugagugcggacuccugaucucaaaggaaaguuggagcuacauuguugagagaccaaacccggaaaauggcaccuguuaucccggucauuuugcugacuacgaggagcugagggaacaacucuccucugugucgucauucgagcgguuugaaaucuucccuaaggagagcaguuggccaaaccacacugucacagggguguccgccucuugcagccauaauggagaguccucauuuuauaaaaacuuacuguggcuuaccggcaagaauggcuuguaccccaaccugaguaaaagcuaugcaaauaacaaggaaaaagaggugcuaguucucuggggagugcaccacccuccaaacauugggaaucagaugacgcuguaccauaaggaaaacgccuacgucucugugguguccucacacuauagccgcaaguucacucccgagaucgcuaaacgaccuaagguccgugaucaggaagguagaauaaauuacuauuggacccuucuggagccaggcgacacaaucauuuuugaggcaaacgggaauuugaucgccccgagguacgcuuucgcccucagucggggauuuggcucugguauuaucaacuccaaugcgcccauggaugaaugugacgcaaaaugccagacuccucaaggggccauaaacagcucgcugccauuccagaauguucaucccgugaccauuggagaguguccuaaguauguacgcucugcuaaauuaagaauggugacaggccugaggaacaucccauccauucagucacggggccucuuuggggccaucgcaggauucaucgaagguggcuggaccgggauggucgauggaugguacggcuaucaccaccagaaugagcaagguaguggguacgcugccgaccaaaagagcacgcagaacgcgauuaauggcauaacuaacaaaguaaauuccguuaucgaaaagaugaacacacaguuuaccgccgugggaaaggaguucaacaaacuugagcgccgaauggaaaaucugaacaagaaagucgaugacggcuucauugauguguggacuuacaaugcagaguugcuaguacugcucgaaaacgagagaacacuggacuuucaugacucuaauguuaagaaccuuuaugaaaaagugaagaaucagcugaagaacaaugcuaaagagaucgggaacggaugcuucgaguuuuaccacaaguguaaugaugaaugcauggagagcgucaaaaacgguaccuaugacuaccccaaguauucagaagagaguaaauuguccagggagaagauagauggcgugaagcucgaaagcaugggggucuaccagauucuggccaucuauucuacgguggcuucaaguuuaguucugcuagugagccucggagccaucuccuucuggaugugcucuaauggcucgcugcagugucggauuugcaucuga

SEQ ID NO: 137196 - RNA, 1698 nt, Artificial Sequence; identical to SEQ ID NO: 137195
  derived and/or modified CDS sequence (opt3) from hemagglutinin__InfluenzaA__AFM72810

SEQ ID NO: 137197 - RNA, 1698 nt, Artificial Sequence; identical to SEQ ID NO: 137195
  derived and/or modified CDS sequence (opt3) from hemagglutinin__InfluenzaA__AFM72821

SEQ ID NO: 137198 - RNA, 1701 nt, Artificial Sequence
  derived and/or modified CDS sequence (opt3) from hemagglutinin__InfluenzaA__AFM72852
augaaggccauccuggugguccuccuuuacaccuucgcuacagcaaacgccgacacucugugcauuggcuaucacgcgaauaacagcacggauaccguugacacaguguuggagaaaaauguaacugugacccauuccgucaacuuacuggaagauaagcacaaugggaaacuauguaagcucagaggaguggcuccccugcaucuugguaaaugcaacauagccggcuggauccuggggaauccugagugugaaucuuugucaacagcaaguagcugguccuacauuguugagaccccaucuucggacaacggaacuugcuauccgggcgauuuuaucgacuacgaggagcucagggagcagcugucaagcgugaguuccuucgaacgguuugagauuuuccccaagacaucuagcuggccuaaucacgauuccgacaagggugucaccgccgcuuguccacaugcaggggccaaaucauuuuauaagaaccugaucuggcucgugaaaaagggaaauaguuaccccaaauuaagcaagucuuauauaaacgauaagggcaaagaaguacugguucuuuggggcauccaccacccuuccacgucagcugaccaacagagcuuguaccagaaugccgaugcguacguguucgucgggaguucucgcuauuccaagacuuuuaaaccagagauugcaauccgacccaaggugcgugacagagagggaaggaugaacuacuauuggacccugguggaaccuggugauaaaauuacauucgaggccacuggcaaucuagucguuccacgguacgcuuuugccauggaacgcaacgcagggagcggaaucauaauuucggacaccccggugcaugacugcaacacaaccugucagacgcccaagggcgcuaucaauacuucucucccuuuccaaaacauucacccaaucacaaucgguaaaugccccaaguauguaaaguccaccaaacugagacuugccacugggcugaggaauauuccuucaauacagagucggggauuguuuggcgcgaucgccggcuucauugaagggggauggacagguaugguggauggcugguacggguaucaucaccagaacgaacagggaagcggcuacgcagcugaccucaaguccacccaaaaugccaucgaugagauaacgaacaaagucaauucugugauugagaagaugaacacccaguuuacagcuguugguaaagaguucaaucaccuggaaaagcgcaucgaaaacuuaaauaagaaaguggacgauggguuccuggacaucuggacuuacaacgccgagcuccuuguccuguuggaaaaugagcgaacccuagauuaucaugacagcaacgugaagaaucuguacgagaaaguaagaucacagcucaagaacaacgcaaaagaaauuggcaauggauguuuugaguucuaucacaagugcgauaacacauguauggaaaguguuaagaauggcacuuacgacuauccaaaauacuccgaggaagccaagcugaacagggaggagaucgauggggugaaacuugaaagcacccggauuuaucagauacuggcuaucuacucuacagucgcgucaaguuuggugcucgucgugagccugggagcaauuuccuuuuggaugugcucuaaugguucguuacaaugccguaucuguaucuga

SEQ ID NO: 137199 - RNA, 1701 nt, Artificial Sequence
  derived and/or modified CDS sequence (opt3) from hemagglutinin__InfluenzaA__AFM72862
augaaggccauccuggugguccuccuuuacaccuucgcuacagcaaacgccgacacucugugcauuggcuaucacgcgaauaacagcacggauaccguugacacaguguuggagaagaauguaacugugacccauuccgucaacuuacuggaagauaagcacaaugggaaacuauguaagcucagaggaguggcuccccugcaucuugguaaaugcaacauagccggcuggauccuggggaauccugagugugaaucuuugucaacagcaaguagcugguccuacauuguugagaccccaucuucggacaacggaacuugcuauccgggcgauuuuaucgacuacgaggagcucagggagcagcugucaagcgugaguuccuucgaacgguuugagauuuuccccaagacaucuagcuggccuaaucacgauuccaacaagggugucaccgccgcuuguccacaugcaggggccaaaucauuuuauaagaaucugaucuggcucgugaaaaagggaaacaguuaccccaaauuaagcaauucuuauauaaacgacaagggcaaggaaguacugguucuuuggggcauccaccacccuuccacgucagcugaucaacagagcuuguaccagaaugccgacgcguacguguucgucgggaguucucgcuauuccaaaacuuuuaagccagagauugcaauccgacccaaagugcgugauagagagggaaggaugaacuacuauuggacccugguggaaccuggugacaagauuacauucgaggccacuggcaaccuagucguuccacgguacgcuuuugccauggaacgcaaugcagggagcggaaucauaauuucggauaccccggugcaugacugcaacacaaccugucagacgcccaaaggcgcuaucaauacuucucucccuuuccaaaacauucacccaaucacaaucgguaagugccccaaauauguaaaguccaccaagcugagacuugccacugggcugaggaauauuccuucaauacagagucggggauuguuuggcgcgaucgccggcuucauugaagggggauggacagguaugguggacggcugguacggguaucaucaccagaacgaacagggaagcggcuacgcagcugaucucaaauccacccaaaaugccaucgacgagauaacgaacaaggucaauucugugauugagaaaaugaacacccaguuuacagcuguugguaaggaguucaaucaccuggaaaaacgcaucgaaaacuuaaauaagaagguggaugacggguuccuggauaucuggacuuacaacgccgagcuccuuguccuguuggaaaaugagcgaacccuagacuaucaugauagcaacgugaaaaaccuguacgagaagguaagaucacagcucaaaaauaacgcaaaggaaauuggcaauggauguuuugaguucuaucacaaaugcgacaacacauguauggaaaguguuaagaauggcacuuacgauuauccaaaguacuccgaggaagccaaacugaacagggaggagaucgacggggugaaacuugaaagcacccggauuuaucagauacuggcuaucuacucuacagucgcgucaaguuuggugcucgucgugagccugggagcaauuuccuuuuggaugugcucuaaugguucguuacaaugccguaucuguaucuga

SEQ ID NO: 137200 - RNA, 1701 nt, Artificial Sequence
  derived and/or modified CDS sequence (opt3) from hemagglutinin__InfluenzaA__AFM72872
augaagaccaucauugcccugagcuacacacucugccuuguguucgcucagaaacugcccggcaacgacaauuccacugcaacguuguguuuagggcaccaugccgucccuaacggaaccauaguuaagacaaucacuaaugaucaaauugaggugaccaacgcgacagaacugguacagucuucaaguaccggugagaucugcgacagcccacaccagauucuagauggcaaaaauuguacucucaucgacgcucugcuuggggauccgcagugcgacggauuucaaaacaagaaaugggaucuguucguggaaagauccaaggccuauucuaauuguuaccccuaugacgucccugauuacgcaucguugaggucacucguggccagcaguggcacacuggaguuuaacaaugaauccuucaacuggaccgguguuacgcagaaugggacuucuagcgcuugcauacggcgcuccaagaacucauuuuucagucgacugaauuggcucacccauuuaaacuuuaaauauccagcacugaaugugacaaugcccaacaacgagcaguucgacaaacuuuacaucuggggaguccaccauccuggcacugauaaagaccagauuuuuccauaugcccaagcuagcggccguaucaccgugucuacaaagagaucccagcagaccgccauucccaauaucgggucaaggccucggguacgcaacauaccaagcagaauuaguaucuacuggacgauuguuaaaccgggagauaucuugcugaucaauucuacugguaaccuaauugcgcccaggggcuacuucaagauacgguccggaaagagcucgaucaugcgcucugacgcaccuauugggaaauguaauuccgagugcaucacaccaaacggcucaauacccaaugacaagccuuuucagaacgugaaucgaauuaccuauggugccuguccaagauacgucaaacaaaacacucucaagcuggcuacagggaugaggaaugugcccgaaaaacagacccggggaaucuucggcgccaucgcaggcuuuauugagaacgggugggaaggaaugguggaugguugguauggcuuccgucaccagaauagugaggggcgcggacaagcugccgaccuuaagagcacgcaggcggccaucgaucagauuaacggcaaacugaauagauugauagguaagaccaacgagaaguuccaccagaucgaaaaagaguuuuccgaagucgaggggaggauucaagaccucgaaaaguacguugaggauacaaaaaucgaccuguggucuuauaacgcagaguuacugguggcucucgaaaaucagcauacuaucgaucuuaccgacagcgagaugaacaagcuguucgaaaagacaaagaagcaguugcgggagaaugccgaagauaugggcaacggaugcuuuaaaauuuaccacaagugugacaaugcuugcauaggcucaauccgaaacgggacuuaugaucaugacguauaccgcgacgaggcccuaaauaacagauuccagauuaaaggaguggagcugaagagugguuacaaagauuggauccucuggauuuccuuugcaaucagcugcuuccugcuuugugucgcccuguugggcuuuauaaugugggcuugccaaaaggggaauaucagguguaacauuugcaucuga

SEQ ID NO: 137201 - RNA, 1701 nt, Artificial Sequence
  derived and/or modified CDS sequence (opt3) from hemagglutinin__InfluenzaA__AFM72883
augaagaccaucauugcccugagcuacauacucugccuuguguucgcucagaaacugcccggcaacgacaauuccacagcaacuuuguguuuagggcaccaugccgucccuaacggaacgaucguuaagaccauuacaaaugaucaaaucgaggugacuaacgcgaccgaacugguacaaaauucuucaacaggugagauuugcgacaguccacaccagauccuagauggcaaaaacuguacccucauagacgcucugcuuggggauccgcagugcgacggauuucagaauaagaaaugggaucuguucguggaaagaagcaaggccuauuccaacuguuaccccuaugacgucccugauuacgcaucuuugaggucgcucguggccucaagcggcacucuggaguuuaauaacgaaaguuucaauuggacagguguuacccagaacgggacguccucugcuugcauccggcgcagcaaaaauuccuuuuucucacgacugaacuggcucacucauuuaaauuuuaaauauccagcacugaacgugaccaugcccaacaaugagcaguucgacaaacuuuacauuuggggaguccaccauccugugacagauaaggaccagaucuuuuuguaugcccaagcuaguggccguauuacuguaagcaccaagagaucucagcagacaguuaucccaaacauaggcuccaggccccgggugcgcaauauuccuaccagaaucucaauuuacuggacgaucgucaaaccaggggauauccugcuaauuaacagcacuggaaaucucauagccccgagggguuacuucaagaugcagaguggcaagucuuccaucaugcggagcgacgcgcccauugggaaauguaacucggagugcaucacaccuaauggaucuauaccaaacgacaagcccuuucaaaaugugaaccgcauuaccuauggcgcauguccucgauacgugaaacagaauacucugaaacuugccacagguaugagaaacgucccagaaaagcagaccagggggaucuucggagcuaucgccggcuuuauugagaauggcugggaagggaugguugauggaugguaugguuuccggcaccaaaacuccgagggccgugggcaggcagcugaccugaagucaacgcaggccgcgaucgaucagauuaauggaaaauugaaccgccucauaggcaagaccaacgagaaguuccaccaaaucgaaaaagaguuuagugaaguggaggguaggauucaggaccuggaaaaguacguagaggauacaaaaaucgacuuauggagcuauaaugccgagcugcucguggcacuugaaaaccagcauacuaucgaucugaccgacuccgagaugaauaaguuguucgaaaagacaaagaagcagcuaagagagaacgcugaagauauggggaauggcugcuuuaaaauuuaccacaagugugacaacgccugcauaggaucuauccggaauggcacuuaugaucauaacgucuaccgagacgaggcucugaauaaccgcuuccaaauuaaagggguggagcucaagagcggauacaaagacuggauccuguggauuucauuugccaucaguugcuuccuucuguguguugcauugcucgguuuuauaaugugggccugccagaagggcaauaucagauguaacauuugcaucuga

SEQ ID NO: 137202 - RNA, 1701 nt, Artificial Sequence
  derived and/or modified CDS sequence (opt3) from hemagglutinin__InfluenzaA__AFM72894
augaagaccaucauugcccugagcuacauacucugccuuguguucgcucagaaacugcccggcaacgacaauuccacagcaacuuuguguuuagggcaccaugccgucccuaacggaacgaucguuaagaccauuacaaaugaucaaaucgaggugacuaacgcgaccgaacugguacaaaauucuucaacaggugagauuugcgacaguccacaccagauccuagauggcaaaaacuguacccucauagacgcucugcuuggggauccgcagugcgacggauuucagaauaagaaaugggaucuguucguggaaagaagcaaggccuauuccaacuguuaccccuaugacgucccugauuacgcaucuuugaggucgcucguggccucaagcggcacucuggaguuuaauaacgaaaguuucaauuggacagguguuacccagaacgggacguccucugcuugcauccggcgcagcaaaaauuccuuuuucucacgacugaacuggcucacucaguuaaauuuuaaauauccagcacugaacgugaccaugcccaacaaugagcaguucgacaaacuuuacauuuggggaguccaucacccugugacagauaaggaccaaaucuuuuuguaugcccaggcuaguggccguauuacuguaagcaccaagagaucucagcagacaguuaucccaaacauaggcuccaggccccgggugcgcaauauuccuucaagaaucagcauuuacuggaccaucgucaaaccaggggauauccugcuaauuaacaguacgggaaaucucauagccccgagggguuacuucaagaugcaaucuggcaaguccagcaucaugcggucggacgcgcccauugggaaauguaacucugagugcaucacuccuaauggauccauaccaaacgacaagcccuuucagaaugugaaccgcauuacauauggcgcauguccucgauacgugaaacagaauacccugaaacuugccacugguaugagaaacgucccagaaaagcaaacaagggggaucuucggagcuaucgccggcuuuauugagaauggcugggaagggaugguugauggaugguaugguuuccggcaucagaacucagagggccgugggcaggcagcugaccugaagaguacccaggccgcgaucgaucaaauuaauggaaaauugaaccgccucauaggcaagacgaacgagaaguuccaccagaucgaaaaagaguuuagcgaaguggaggguaggauucaggaccuggaaaaguacguagaggauaccaaaaucgacuuaugguccuauaaugccgagcugcucguggcacuugaaaaccagcacacaaucgaucugacugacucugagaugaauaaguuguucgaaaagaccaagaagcaacuaagagagaacgcugaagauauggggaauggcugcuuuaaaauuuaccauaagugugacaacgccugcauaggaagcauccggaauggcacauaugaucacaacgucuaccgagacgaggcucugaauaaccgcuuccagauuaaagggguggagcucaagucaggauacaaagacuggauccuguggauuaguuuugccaucuccugcuuccuucuguguguugcauugcucgguuuuauaaugugggccugccagaagggcaauaucagauguaacauuugcaucuga

SEQ ID NO: 137203 - RNA, 1701 nt, Artificial Sequence
  derived and/or modified CDS sequence (opt3) from hemagglutinin__InfluenzaA__AFM72916
augaagaccaucauugcccugagcuacauacucugccuuguguucgcucagaaaauccccggcaacgacaauuccacagcaacucuguguuuggggcaccaugccgucccuaacggaacgauuguuaagaccaucacaaaugaucaaauugaggugacuaacgcgaccgaauuaguacagucuucaaguacaggugagaucugcgacagcccacaccagauacuggauggcaaaaauuguacccuaaucgacgcucuccugggggauccgcagugcgacggauuucaaaacaagaaaugggaucuuuucguggaaagauccaaggccuauucuaauuguuaccccuaugacgucccugauuacgcaucgcugaggucauugguggccagcaguggcacucucgaguuuaacaaugaauccuucaacuggacagguguuacccagaaugggacgucuagcgcuugcauucggcgcuccaagaacucauuuuucagucgacugaauuggcugacucaucucaacuuuaaauauccagcauuaaaugugaccaugcccaacaacgagcaguucgacaagcuguacaucuggggaguccaccauccuggcacagauaaagaccagauuuuuccauaugcccaagcuagcggccguaucacugugucuaccaagagaucccagcagacagccauacccaauauugggucaaggccucggguacgcaacaucccaagcagaauuaguaucuacuggaccaucguuaaaccgggagauauucuuuugauaaauucuacggguaaccugaucgcgcccaggggcuacuucaagauucgguccggaaagagcucgaucaugcgcucugacgcaccuauagggaaauguaauuccggcugcauuacuccaaacgguucaauccccaaugacaagccuuuucagaacgugaaucgaaucacauauggggccuguccaagauacgucaaacaaaacacccuaaagcucgcuacuggaaugaggaaugugcccgagaaacagacacggggcauuuucggcgccaucgcaggguuuauugaaaacggaugggaggguaugguggauggcugguauggguuccgucaccagaauagugaaggacgcggccaagcugccgaccuuaagagcacccaggcggccauagaucagaucaacgguaaacuuaauagacugauugggaagacgaacgagaaguuccaccagaucgagaaagaauuuuccgaggucgaaggcaggauccaagacuuggagaaguacguugaagauaccaaaauugaccucuggucuuauaacgcagagcuguuaguggcucuggagaaucagcauacaauagaucucacugacagcgaaaugaacaagcuguucgagaaaaccaagaagcagcugcgggaaaaugccgaggauaugggaaacggcugcuuuaaaaucuaccacaagugugacaaugcuugcauugggucaauccgaaacggaacauaugaucaugacguauaccgcgacgaagccuugaauaacagauuccagauuaaagguguggagcuaaagaguggcuacaaagauugguuucuguggaucuccuucgcaauaagcugcuuucuccugugugucgcccuucugggguucaucaugugggcuugccaaaagggaaauauuagguguaacaucugcauuuga

SEQ ID NO: 137204 - RNA, 1701 nt, Artificial Sequence
  derived and/or modified CDS sequence (opt3) from hemagglutinin__InfluenzaA__AFM72927
augaagaccaucauugcccugagcuacauacucugccuuguguucgcucagaaacugcccggcaacgacaauuccacagcaacuuuguguuuagggcaccaugccgucccuaacggaacgaucguuaagaccauuacaaaugaucaaaucgaggugacuaacgcgaccgaacugguacagucuucaaguacaggugagauuugcgacagcccacaccagauccuagauggcgaaaauuguacccucauagacgcucugcuuggggauccgcagugcgacggauuucaaaacaaaaagugggaucuguucguggagagauccaaagccuauucuaauuguuaccccuaugacgucccugauuacgcaucguugaggucacucguggccagcaguggcacucuggaauuuaacaaugaguccuucaacuggacagguguuacccagaaugggacgucuagcgcuugcauccggcgcuccaacaauucauuuuucagucgacugaacuggcucacucauuuaaaguuuaaguauccagcacugaaugugaccaugcccaacaacgagcaguucgacaaacuuuacauuuggggaguccaccauccuggcacagauaaugaccagacuagcuuguaugcccaggcuucuggccguaucaccguguccacaaagagaucacaacagaccguaauuccaaacaucgggagcaggccccggguucgcaauauaccuaguagaauuucuaucuacuggacgauugugaaaccaggagauauccugcuaaucaacuccauugguaaucucauagccccgaggggcuacuuuaagauccggagcgggaaaucgucuauuaugcgcuccgacgcgcccaucggaaaguguaacucagaaugcauaacuccuaauggcaguauuccaaacgacaagcccuuccagaaugucaaccgaaucacauauggugcauguccuagauacgugaaacaaaauacccugaaacuugccacugggaugaggaacgugccagagaagcagacacggggaaucuuuggcgcuauugccggcuucaucgaaaaugggugggagggaauggucgaugguugguauggcuuucgucaccagaacagcgaggggcgcggacaagcagcugaccugaaguccacccaggccgcgauugaucagauaaauggcaaauugaacagacucaucgguaagacgaacgaaaaauuccaccagauugagaaggaguucucugaaguugaagggaggauccaagaccuggagaaguacguggaggauaccaaaaucgacuuauggagcuauaaugccgaacugcucguagcacuugagaaccagcauacaauugaucugacugacucagaaaugaauaaguuguuugagaaaaccaagaaacagcuacgggaaaacgcugaggauaugggcaauggaugcuucaagauauaccacaagugugacaacgccugcaucggcaguauucgaaaugggacauaugaucauaacguguaccgcgacgaggcucugaauaacagauuucagaucaaaggagucgaacucaaguccgguuacaaagacuggauucuguggaucagcuucgccauaucuugcuuucuucuguguguggcauugcucggcuucaucaugugggccugccaaaaggggaauauuagguguaacaucugcauuuga

SEQ ID NO: 137205 - RNA, 1701 nt, Artificial Sequence
  derived and/or modified CDS sequence (opt3) from hemagglutinin__InfluenzaA__AFM72938
augaagaccaucauugcccugagcuacauacucugccuuguguucgcucagaaacugcccggcaacgacaauuccacagcaacuuuguguuuagggcaccaugccgucccuaacggaacgaucguuaagaccauuacaaaugaucaaaucgaggugacuaacgcgaccgaacugguacagucuucaaguacaggugagauuugcgacagcccacaccagauccuagauggcgaaaauuguacccucauagacgcucugcuuggggauccgcagugcgacggauuucaaaacaaaaagugggaucuguucguggagagauccaaagccuauucuaauuguuaccccuaugacgucccugauuacgcaucguugaggucacucguggccagcaguggcacucuggaauuuaacaaugaguccuucaacuggacagguguuacccagaaugggacgucuagcgcuugcauccggcgcuccaacaauucauuuuucagucgacugaacuggcucacucauuuaaaguuuaaguauccagcacugaaugugaccaugcccaacaacgagcaguucgacaaacuuuacauuuggggaguccaccauccuggcacagauaaugaccagacuagcuuguaugcccaggcuucuggccguaucaccguguccacaaagagaucacaacagaccguaauuccaaacaucgggagcaggccccggguucgcaauaacccuaguagaauaucuauuuacuggacgaucgugaaaccaggagauauucugcuaaucaauuccaucgguaaccucauugccccgaggggcuacuuuaagauacggagcgggaaaucgucuaucaugcgcuccgacgcgcccauuggaaaguguaauucagaaugcaucacuccuaacggcaguauaccaaaugacaagcccuuccagaacgucaaucgaauuacauauggugcauguccuagauacgugaaacaaaacacccugaaacuugccacugggaugaggaaugugccagagaagcagacacggggaaucuuuggcgcuaucgccggcuucauugaaaacgggugggagggaauggucgaugguugguauggcuuucgucaccagaauagcgaggggcgcggacaagcagcugaccugaaguccacccaggccgcgaucgaucagauuaacggcaaauugaacagacucauagguaagacgaaugaaaaauuccaccagaucgagaaggaguucucugaaguugaagggaggauucaagaccuggagaaguacguggaggauaccaaaaucgacuuauggagcuauaacgccgaacugcucguagcacuugagaaucagcauacaaucgaucugacugacucagaaaugaacaaguuguuugagaaaaccaagaaacagcuacgggaaaaugcugaggauaugggcaacggaugcuucaagauuuaccacaagugugacaaugccugcauaggcaguauccgaaacgggacauaugaucauaauguguaccgcgacgaggcucugaacaauagauuucagauuaaaggagucgaacucaaguccgguuacaaagacuggauccuguggauuagcuucgccaucucuugcuuucuucuguguguggcauugcucggcuucauaaugugggccugccaaaaggggaacaucagguguaauauuugcaucuga

SEQ ID NO: 137206 - RNA, 1701 nt, Artificial Sequence
  derived and/or modified CDS sequence (opt3) from hemagglutinin__InfluenzaA__AFM72949
augaagaccaucauugcccugagcuacauacucugccuuguguucgcucagaaacugcccggcaacgacaauuccacagcaacuuuguguuuagggcaccaugccgucccuaacggaacgaucguuaagaccauuacaaaugaucaaaucgaggugacuaacgcgaccgaacugguacagucuucaaguacaggugagauuugcgacagcccacaccagauccuagauggcgaaaauuguacccucauagacgcucugcuuggggauccgcagugcgacggauuucaaaacaaaaagugggaucuguucguggagagauccaaagccuauucuaauuguuaccccuaugacgucccugauuacgcaucguugaggucacucguggccagcaguggcacucuggaauuuaacaaugaguccuucaacuggacagguguuacccagaaugggacgucuagcgcuugcauccggcgcuccaacaauucauuuuucagucgacugaacuggcucacucaguuaaaguuuaaguauccagcacugaaugugaccaugcccaacaacgagcaguucgacaaacuuuacauuuggggaguccaucacccuggcacagauaaugaccaaacuagcuuguaugcccaggcuucuggccguaucaccguguccacaaagagaucacagcagaccguaauuccaaacaucgggagcaggccccggguucgcaauaacccuaguagaauaucuauuuacuggacgaucgugaaaccaggagauauucugcuaaucaauuccaucgguaaccucauugccccgaggggcuacuuuaagauacggagcgggaaaucgucuaucaugcgcuccgacgcgcccauuggaaaguguaauucagaaugcaucacuccuaacggcaguauaccaaaugacaagcccuuccaaaacgucaaucgaauuacauauggugcauguccuagauacgugaaacagaacacccugaaacuugccacugggaugaggaaugugccagagaagcagacacggggaaucuuuggcgcuaucgccggcuucauugaaaacgggugggagggaauggucgaugguugguauggcuuucgucaucaaaauagcgaggggcgcggacaggcagcugaccugaaguccacccaggccgcgaucgaucagauuaacggcaaauugaacagacucauagguaagacgaaugaaaaauuccaccaaaucgagaaggaguucucugaaguugaagggaggauucaggaccuggagaaguacguggaggauaccaaaaucgacuuauggagcuauaacgccgaacugcucguagcacuugagaaucagcacacaaucgaucugacugacucagaaaugaacaaguuguuugagaaaaccaagaaacagcuacgggaaaaugcugaggauaugggcaacggaugcuucaagauuuaccauaagugugacaaugccugcauaggcaguauccgaaacgggacauaugaucacaauguguaccgcgacgaggcucugaacaauagauuucaaauuaaaggagucgaacucaaguccgguuacaaagacuggauccuguggauuagcuucgccaucucuugcuuucuucuguguguggcauugcucggcuucauaaugugggccugccagaaggggaacaucagguguaauauuugcaucuga

SEQ ID NO: 137207 - RNA, 1701 nt, Artificial Sequence
  derived and/or modified CDS sequence (opt3) from hemagglutinin__InfluenzaA__AFM72960
augaagaccaucauugcccugagcuacauacucugccuuguguucgcucagaaacugcccggcaacgacaauuccacagcaacuuuguguuuagggcaccaugccgucccuaacggaacgaucguuaagaccauuacaaaugaucaaaucgaggugacuaacgcgaccgaacugguacagucuucaaguacaggugagauuugcgacagcccacaccagauccuagauggcgaaaauuguacccucauagacgcucugcuuggggauccgcagugcgacggauuucaaaacaaaaagugggaucuguucguggagagauccaaagccuauucuaauuguuaccccuaugacgucccugauuacgcaucguugaggucacucguggccagcaguggcacucuggaauuuaacaaugaguccuucaaguggacagguguuacccagaacgggacgucuagcgcuugcauccggcgcuccaauaacucauuuuucagucgacugaauuggcucacucauuuaaaguuuaaauauccagcacugaacgugaccaugcccaauaacgagcaguucgacaaacuuuacauuuggggaguccaccauccuggcacagauaacgaccagacuagcuuguaugcccaggcuucuggccguaucaccguguccacaaagagaucacaacagaccguaauuccaaauaucgggagcaggccccggguucgcaacauaccuaguagaauuucuaucuacuggacgauugugaagccaggagauauccugcuaaucaauuccauugguaaccucauagccccgaggggcuacuuuaaaauccggagcgggaagucgucuauuaugcgcuccgacgcgcccaucggaaaguguaauucagaaugcauaacuccuaacggcaguauuccaaaugacaaacccuuccagaacgucaaucgaaucacauauggugcauguccuagauacgugaagcaaaacacccugaaacuugccacugggaugaggaaugugccagagaagcagacacggggaaucuuuggcgcuauugccggcuucaucgaaaacgggugggagggaauggucgaugguugguauggcuuucgucaccagaauagcgaggggcgcggacaagcagcugaccugaaauccacccaggccgcgauugaucagauaaacggcaaguugaauagacucaucgguaaaacgaacgaaaaguuccaccagauugagaaggaguucucugaaguugaagggaggauccaagaccuggagaaauacguggaggauaccaagaucgacuuauggagcuauaacgccgaacugcucguagcacuugagaaucagcauacaauugaucugacugacucagaaaugaacaaauuguuugagaagaccaaaaagcagcuacgggaaaaugcugaggauaugggcaacggaugcuucaagauauaccacaaaugugacaaugccugcaucggcaguauucgaaacgggacauaugaucauaauguguaccgcgacgaggcucugaacaauagauuucagaucaagggagucgaacucaaauccgguuacaaggacuggauucuguggaucagcuucgccauaucuugcuuucuucuguguguggcauugcucggcuucaucaugugggccugccaaaaagggaacauuagguguaauaucugcauuuga

SEQ ID NO: 137208 - RNA, 1701 nt, Artificial Sequence
  derived and/or modified CDS sequence (opt3) from hemagglutinin__InfluenzaA__AFM72971
augaagaccaucauugcccugagcuacauacucugccuuguguucgcucagaaacugcccggcaacgacaauuccacagcaacuuuguguuuagggcaccaugccgucccuaacggaacgaucguuaagaccauuacaaaugaucaaaucgaggugacuaacgcgaccgaacugguacagucuucaaguacaggugagauuugcgacagcccacaccagauccuagauggcgaaaauuguacccucauagacgcucugcuuggggauccgcagugcgacggauuucaaaacaaaaagugggaucuguucguggagagauccaaagccuauucuaauuguuaccccuaugacgucccugauuacgcaucguugaggucacucguggccagcaguggcacucuggaauuuaacaaugaguccuucaaguggacagguguuacccagaacgggacgucuagcgcuugcauccggcgcuccaauaacucauuuuucagucgacugaauuggcucacucaguuaaacuuuaaguauccagcacugaaugugaccaugcccaacaacgagcaguucgacaaacuuuacauuuggggaguccaucacccuggcacagauaaugaccaaacuagcuuguaugcccaggcuucuggccguaucaccguguccacaaagagaucacagcagaccguaauuccaaacaucgggagcaggccccggguucgcaauauaccuaguagaauuucuaucuacuggacgauugugaaaccaggagauauccugcuaaucaacuccauugguaaucucauagccccgaggggcuacuuuaagauccggagcgggaaaucgucuauuaugcgcuccgacgcgcccaucggaaaguguaacucagaaugcauaacuccuaauggcaguauuccaaacgacaagcccuuccaaaaugucaaccgaaucacauauggugcauguccuagauacgugaaacagaauacccugaaacuugccacugggaugaggaacgugccagagaagcagacacggggaaucuuuggcgcuauugccggcuucaucgaaaaugggugggagggaauggucgaugguugguauggcuuucgucaucaaaacagcgaggggcgcggacaggcagcugaccugaaguccacccaggccgcgauugaucagauaaauggcaaauugaacagacucaucgguaagacgaacgaaaaauuccaccaaauugagaaggaguucucugaaguugaagggaggauccaggaccuggagaaguacguggaggauaccaaaaucgacuuauggagcuauaaugccgaacugcucguagcacuugagaaccagcacacaauugaucugacugacucagaaaugaauaaguuguuugagaaaaccaagaaacagcuacgggaaaacgcugaggauaugggcaauggaugcuucaagauauaccauaagugugacaacgccugcaucggcaguauucgaaaugggacauaugaucacaacguguaccgcgacgaggcucugaauaacagauuucaaaucaaaggagucgaacucaaguccgguuacaaagacuggauucuguggaucagcuucgccauaucuugcuuucuucuguguguggcauugcucggcuucaucaugugggccugccagaaggggaauauuagguguaacaucugcauuuga

SEQ ID NO: 137209 - RNA, 1701 nt, Artificial Sequence
  derived and/or modified CDS sequence (opt3) from hemagglutinin__InfluenzaA__AFM72982
augaagaccaucauugcccugagcuacauacucugccuuguguucgcucagaaacugcccggcaacgacaauuccacagcaacuuuguguuuagggcaccaugccgucccuaacggaacgaucguuaagaccauuacaaaugaucaaaucgaggugacuaacgcgaccgaacugguacagucuucaaguacaggugagauuugcgacagcccacaccagauccuagauggcgaaaauuguacccucauagacgcucugcuuggggauccgcagugcgacggauuucaaaacaaaaagugggaucuguucguggagagauccaaagccuauucuaauuguuaccccuaugacgucccugauuacgcaucguugaggucacucguggccagcaguggcacucuggaauuuaacuccgagucuuucaauuggacagguguuacccagaacgggacgagcuccgcuugcauccggcgcucaaauaacagcuuuuucagucgacugaauuggcucacucauuuaaacuuuaaguauccagcacugaaugugaccaugcccaacaacgagcaguucgacaagcuguacauuuggggaguccaccauccuggcacagauaaagaccagaucuuuccauaugcccaggcuucuggccguauuacuguguccaccaagagaucacaacaggccguaauccccaauauagggagcaggccucggguucgcaacauuccaaguagaaucucuauuuacuggacaaucgugaaaccgggagauaucuugcugauuaauuccaccgguaaccuaauagcgcccaggggcuacuucaagauccggagcgggaaaucgucuauuaugcgcuccgacgcaccuaucggaaaguguaauucagaaugcauaacgccaaacggcaguauucccaaugacaagccuuuucagaacgucaaucgaaucacuuauggugccuguccaagauacaucaaacaaagcacacucaagcuggcuaccgggaugaggaacgugcccgagaaacagacucggggaauuuucggcgccaucgcaggcuuuauugaaaaugggugggagggaaugguggaugguugguauggcuuccgucaccagaacuccgaggggcgcggacaagcugccgaccuuaagucuacacaggcggccauagaucagaucaauggcaaacugaacagauugauugguaagaccaaugaaaaauuccaccagaucgagaaggaauuuagcgaggucgaagggaggauccaagaccucgagaaguacguugaggauacgaaaauugaccuguggucauauaacgcagaauuacugguggcucucgagaaccagcauaccauagaucuuacagacagugaaaugaauaagcuguucgagaaaacuaagaaacaguugcgggaaaacgccgaggauaugggcaauggaugcuuuaagaucuaccacaagugugacaacgcuugcauuggcuccauccgaaaugggaccuaugaucaugacguauaccgcgacgaggcccuaaacaauagauuccagauuaaaggaguggaacuuaagagcgguuacaaagauuggauccucuggauaucucuggcaaucucaugcuuucuucugugugucgccuugcucggcuucauuaugugggcuugccaaaaggggaacaucagguguaauauuugcaucuga

SEQ ID NO: 137210 - RNA, 1701 nt, Artificial Sequence
  derived and/or modified CDS sequence (opt3) from hemagglutinin__InfluenzaA__AFM72993
augaagaccaucauugcccugagcuacauacucugccuuguguucgcucagaaacugcccggcaacgacaauuccacagcaacuuuguguuuagggcaccaugccgucccuaacggaacgaucguuaagaccauuacaaaugaucaaaucgaggugacuaacgcgaccgaacugguacagucuucaagugcuggugagauuugcgacagcccacaccagauccuagauggcgaaaauuguacacucauagacgcccugcuuggggauccgcagugcgacggauuucaaaacaaaaagugggaucuguucguggagagauccagggcauauucuaauuguuaccccuaugacgucccugauuacgccucguugcggucacucguggcuagcaguggcacccuggaauuuaacaaugaguccuucaacuggacugguguuacacagaaugggaccucuagcgcaugcauccgccgauccaacaauucauuuuucagucgucugaacuggcucacgcauuuaaauuuuaaauauccagcccugaacgugacuaugcccaacaaugagcaguucgacaaacuuuacauuuggggagucuugcacccuggcaccuauaaggaucagaucuuucuguacgcucaagccagcggcagaauuacagugucuacuaaaaggucccagcaggcgguaaucccaaacauagggucacggccccgcguuagaaauauuccuagcaggaucaguauuuacuggaccaucgugaagccaggagacauccuacucauuaacucuacagguaaucugauagcaccgcggggcuauuucaaaauccgcuccggaaagagcucgauuaugcgaucugaugcccccaucgggaaauguaacuccgaaugcauaaccccuaauggcucaauuccaaacgacaagcccuuucagaaugucaacagaaucacguacggugcuuguccuagguaugugaagcaaaguacucuuaaacuggccacagggaugcggaaugugccagagaagcagacccguggaaucuucggcgcaauugcuggcuuuaucgaaaacgggugggagggaauggucgacgguugguacggcuuccgccaucagaauagcgaggggagaggacaagccgcggauuugaaauccacucaggccgcaauugaccagauaaacggcaagcucaauaggcugaucgguaaaacaaacgaaaaguuccaccagauugagaaagaauuuucugagguugaagggcggauccaagauuuagagaaguauguggaggacaccaagaucgaucuguggagcuacaacgcugaacuccuuguagcccuggagaaucagcacacgauugacuugaccgauucagaaaugaacaaacuauucgagaagacaaagaagcagcugcgagaaaaugcugaggacaugggcaacggaugcuuuaaaauauaucauaagugugauaaugccugcaucggcaguauucgcaacgggacuuacgaccacgauguguacagagacgaggcacucaauaacagguuccagaucaagggagucgaacugaaauccgguuauaaggacuggauucuuuggaucagcuuugccauaucuugcuuccuguuguguguggcucuccugggcuuuaucaugugggcgugccaaaaagggaauauucgguguaacaucugcauuuga

SEQ ID NO: 137211 - RNA, 1701 nt, Artificial Sequence
  derived and/or modified CDS sequence (opt3) from hemagglutinin__InfluenzaA__AFM73004
augaagaccaucauugcccugagcuacauacucugccuuguguucgcucagaaacugcccggcaacgacaauuccacagcaacuuuguguuuagggcaccaugccgucccuaacggaacgaucguuaagaccauuacaaaugaucaaaucgaggugacuaacgcgaccgaacugguacagucuucaagugcuggugagauuugcgacagcccacaccagauccuagauggcgaaaauuguacacucauagacgcccugcuuggggauccgcagugcgacggauuucaaaacaaaaagugggaucuguucguggagagauccagggcauauucuaauuguuaccccuaugacgucccugauuacgccucguugcggucacucguggcuagcaguggcacccuggaauuuaacaaugaguccuucaacuggacugguguuacacagaaugggaccucuagcgcaugcauccgccgauccaacaauucauuuuucagucgucugaacuggcucacgcauuuaaauuuuaaauauccagcccugaacgugacuaugcccaacaaugagcaguucgacaaacuuuacauuuggggagucuugcacccuggcaccuauaaggaucagaucuuucuguacgcucaagccagcggcagagugacaguaucuacuaaaaggucccagcaggcgguuauuccaaacaucgggucacggccccgcgugagaaauauaccuagcaggauuaguaucuacuggaccauugucaagccaggagacauccuacucaucaacucuacagguaaucugauugcaccgcggggcuauuucaaaauacgcuccggaaagagcucgaucaugcgaucugaugcccccauugggaaauguaacuccgaaugcaucaccccuaauggcucaauaccaaacgacaagcccuuucagaaugugaacagaauuacguacggugcuuguccuagguaugugaagcaaaguacucuuaaacuggccacagggaugcggaaugucccagagaagcagacccguggaaucuucggcgcaaucgcuggcuuuauugaaaacgggugggagggaaugguugacgguugguacggcuuccgccaucagaauagcgaggggagaggacaagccgcggauuugaaauccacucaggccgcaaucgaccagauuaacggcaagcucaauaggcugauagguaaaacaaacgaaaaguuccaccagaucgagaaagaauuuucugagguggaagggcggauucaagauuuagagaaguauguagaggacaccaagaucgaucuguggagcuacaacgcugaacuccuuguggcccuggagaaucagcacacgaucgacuugaccgauucagaaaugaacaaacuauucgagaagacaaagaagcagcugcgagaaaaugcugaggacaugggcaacggaugcuuuaaaauuuaucauaagugugauaaugccugcauaggcaguauccgcaacgggacuuacgaccacgaugucuacagagacgaggcacucaauaacagguuccagauuaagggaguggaacugaaauccgguuauaaggacuggauccuuuggauuagcuuugccaucucuugcuucuuucuguguguugcuuugcucggcuucauaaugugggcgugccaaaaagggaauauccgguguaacauuugcaucuga

SEQ ID NO: 137212 - RNA, 1701 nt, Artificial Sequence
  derived and/or modified CDS sequence (opt3) from hemagglutinin__InfluenzaA__AFM73015
augaaggccauccuggugguccuccuuuacaccuucgcuacagcaaacgccgacacucugugcauuggcuaucacgcgaauaacagcacggauaccguugacacaguguuggagaaaaauguaacugugacccauuccgucaacuuacuggaagauaagcacaaugggaaacuauguaagcucagaggaguggcuccccugcaucuugguaaaugcaacauagccggcuggauccuggggaauccugagugugaaucuuugucaacagcaaguagcugguccuacauuguugagaccucuucgucagacaacggaacuugcuauccaggcgauuuuaucgacuacgaagaacucagggagcagcugagcaguguguccucuuucgaacgguuugagauuuucccgaagacaagcuccuggcccaaucacgauucaaacaagggugucaccgccgcuuguccucaugcaggggccaaaggauuuuauaagaaucugaucuggcucgugaaaaagggcaacaguuacccaaaauuaagcaagucuuauauaaaugacaagggcaaagaaguacugguucuuugggggauccaccaccccuccacgacugcugaucaacagucauuguaccagaacgccgacaccuacguguucgucggaacaagccgcuauaguaagaaauuuaagccugagauugcgauccgaccaaaagugcgugauagagaggguaggaugaauuacuauuggacucugguggaacccggcgacaagauuaccuucgaggcaacagggaaccuagucguuccucgguacgccuuugcuauggaacgcaacgccggaucuggcaucauaauuuccgauaccccagugcaugacugcaauacgacuugucagacaccgaaaggugcaaucaacaccagccuccccuuccaaaauauucacccuaucacuaucgggaagugcccaaaguauguaaaaucgacaaagcugagacuugcuaccggacugaggaacgugcccucuauucagucccggggcuuguuuggcgccauagcgggguucaucgagggagguuggacgggcauggucgacgggugguacggauaucaucaccagaaugaacagggcucagguuacgccgcagaucucaaaaguacccaaaacgcuauugacaagaucacaaauaaagugaacagcguuauagagaagaugaauacucaguuuaccgccguggggaaggaguucaaccaccuggaaaaacgcauugagaauuuaaacaagaaagucgaugacggcuuccuggauaucuggacauacaaugcugaacuccuugugcuguuggagaacgaacgaacucuagacuaucaugauuccaauguaaagaaccuguacgagaaaguuagaaaccagcucaagaauaacgccaaggagaucggaaauggcuguuuugaguucuaucacaaaugcgacaacaccuguauggagucugugaagaaugggacauacgauuauccuaaauacagcgaagaggcaaagcugaacagggaagagauugacggagucaaacuugagucaacccggaucuaucagauucuggccauauacaguacuguggcuuccagcuugguccucgugguuucucugggugcgaucucauuuuggaugugcaguaauggcagcuuacaaugccguauuuguaucuga

SEQ ID NO: 137213 - RNA, 1701 nt, Artificial Sequence
  derived and/or modified CDS sequence (opt3) from hemagglutinin__InfluenzaA__AFM73025
augaaggccauccuggugguccuccuuuacaccuucgcuacagcaaacgccgacacucugugcauuggcuaucacgcgaauaacagcacggauaccguugacacaguguuggagaaaaauguaacugugacccauuccgucaacuuacuggaagauaagcacaaugggaaacuauguaagcucagaggaguggcuccccugcaucuugguaaaugcaacauagccggcuggauccuggggaauccugagugugaaucuuugucaacagcaaguagcugguccuacauuguugagaccucuucgucagacaacggaacuugcuauccaggcgauuuuaucgacuacgaagaacucagggagcagcugagcaguguguccucuuucgaacgguuugagauuuucccgaagacaagcuccuggcccaaucacgauucaaacaagggugucaccgccgcuuguccucaugcaggggccaaaggauuuuauaagaaucugaucuggcucgugaaaaagggcaacaguuacccaaaauuaagcaagucuuauauaaaugacaagggcaaagaaguacugguucuuugggggauccaccaccccuccacgacugaugaccaacagucauuguaccagaacgcugauaccuacguguucgucggaacaagccgcuauaguaagaaauuuaagccugagauugccauccgaccaaaagugcgugacagagaggguaggaugaauuacuauuggacucugguggaacccggcgauaagauuaccuucgaggcgacagggaaccuagucguuccucgguacgcauuugccauggaacgcaacgcuggaucuggcaucauaauuuccgacaccccagugcaugacugcaauacgacuugucagacaccgaaaggugccaucaacaccagccuccccuuccaaaauauucacccuaucacuaucgggaagugcccaaaguauguaaaaucgacaaagcugagacuugcaaccggacugaggaacgugcccucuauucagucccggggcuuguuuggcgcuauagccggguucaucgagggagguuggacgggcauggucgaugggugguacggauaucaucaccagaaugaacagggcucagguuacgcggccgaccucaaaaguacccaaaacgcaauugauaagaucacaaauaaagugaacagcguuauagagaagaugaauacucaguuuaccgcuguggggaaggaguucaaccaccuggaaaaacgcauugagaauuuaaacaagaaagucgacgauggcuuccuggacaucuggacauacaaugccgaacuccuugugcuguuggagaacgaacgaacucuagauuaucaugacuccaauguaaagaaccuguacgagaaaguuagaaaccagcucaagaauaacgcuaaggagaucggaaauggcuguuuugaguucuaucacaaaugcgauaacaccuguauggagucugugaagaaugggacauacgacuauccuaaauacagcgaagaggccaagcugaacagggaagagauugauggagucaaacuugagucaacccggaucuaucagauucuggcaauauacaguacuguggccuccagcuugguccucgugguuucucugggugcuaucucauuuuggaugugcaguaauggcagcuuacaaugccguauuuguaucuga

SEQ ID NO: 137214 - RNA, 1701 nt, Artificial Sequence; identical to SEQ ID NO: 137213
  derived and/or modified CDS sequence (opt3) from hemagglutinin__InfluenzaA__AFM73035

SEQ ID NO: 137215 - RNA, 1701 nt, Artificial Sequence
  derived and/or modified CDS sequence (opt3) from hemagglutinin__InfluenzaA__AFM73045
augaaggccauccuggugguccuccuuuacaccuucgcuacagcaaacgccgacacucugugcauuggcuaucacgcgaauaacagcacggauaccguugacacaguguuggagagaaauguaacugugacccauuccgucaacuuacuggaagauaaacacaaugggaagcuauguaaacucaggggaguggcuccccugcaucuugguaagugcaacauagccggcuggauccuggggaauccugagugugaaucuuugucaacagcaaguagcugguccuacauuguugagaccucuucgucagacaacggaacuugcuauccaggcgauuuuaucgacuacgaagaacuccgggagcagcugagcaguguguccucuuucgaacgcuuugagauuuucccgaaaacaagcuccuggcccaaucacgaaucaaacaagggugucaccgccgcuuguccucaugcaggggccaagaguuuuuauaaaaaucugaucuggcucgugaagaaaggaaacagcuacccaaaguuaucuaaauccuauauaaaugauaagggcaaggagguacugguucuuuggggcauccaccaccccucaacgagcgcugaccaacagaguuuguaccagaacgccgaugcguacguguucgucgggacuucucgauauuccaaaaaguuuaaaccugagauugcaauccguccaaaggugagagaccaggaaggaaggaugaauuacuauuggacccugguggagcccggugauaaaauuacauucgaagccacuggcaaccuagucguuccucgguacgcuuuugccauggagcgcaacgcagggagcggaaucauaauuucggacaccccagugcaugauugcaauacaaccugucaaacgccgaagggcgcuaucaacacuucucuccccuuccagaauauucacccuaucacaaucgguaaaugcccaaaguauguaaaguccaccaaacugagacuugccacugggcugaggaacgugcccucaauucagagucggggauuguuuggcgcgauagccggcuucaucgaagggggauggacagguauggucgacggcugguacggguaucaucaccagaaugagcaaggaagcggcuacgcagcugaccucaaguccacccagaacgccauugaugagaucacgaauaaagugaacucuguuauagaaaagaugaauacccaguuuacagcuguggguaaagaguucaaccaccuggaaaagcgcauugagaauuuaaacaagaaagucgacgauggguuccuggacaucuggacuuacaaugccgaacuccuugugcuguuggagaacgagcgaacccuagauuaucaugacagcaauguaaagaaccuguacgaaaaaguuagaucacagcucaagaacaaugcaaaagagaucggcaacggauguuuugaguucuaucacaagugcgauaauacauguauggagagugugaagaacggcacuuacgacuauccuaaauacuccgaagaggccaagcugaauagggaggaaauugauggggucaaacuugagagcacccggaucuaucaaauucuggcuauauacucuacaguggcgucaaguuugguccucgugguuagccugggagcaaucuccuuuuggaugugcucuaacgguucguuacagugccguauuuguaucuga

SEQ ID NO: 137216 - RNA, 1701 nt, Artificial Sequence
  derived and/or modified CDS sequence (opt3) from hemagglutinin__InfluenzaA__AFM73055
augaaggccauccuggugguccuccuuuacaccuucgcuacagcaaacgccgacacucugugcauuggcuaucacgcgaauaacagcacggauaccguugacacaguguuggagagaaauguaacugugacccauuccgucaacuuacuggaagauaaacacaaugggaagcuauguaaacucaggggaguggcuccccugcaucuugguaagugcaacauagccggcuggauccuggggaauccugagugugaaucuuugucaacagcaaguagcugguccuacauuguugagaccucuucgucagacaacggaacuugcuauccaggcgauuuuaucgacuacgaagaacuccgggagcagcugagcaguguguccucuuucgaacgcuuugagauuuucccgaaaacaagcuccuggcccaaucacgauucaaacaagggugucaccgccgcuuguccucaugcaggggccaagaguuuuuauaaaaaucugaucuggcucguggaaaagggaaacagcuacccaaaauuaucuaaguccuauauaaaugacaaaggcaaggagguacugguucuuuggggcauccaccaccccucaacgagcgcugaucaacagaguuuguaccagaacgccgacgcguacguguucgucgggacuucucgauauuccaagaaauuuaagccugagauugcaauccguccaaaagugagagauagggaaggacggaugaauuacuauuggacccugguggagcccggugacaagauuacauucgaagccacuggcaaccuagucguuccucgcuacgcuuuugccauggagagaaacgcagggagcggaaucauaauuucggauaccccagugcaugacugcaauacaaccugucagacgccgaaaggcgcuaucaacacuucucuccccuuccaaaauauucacccuaucacaaucgguaagugcccaaaauauguaaaguccaccaagcugaggcuugccacugggcugcggaacgugcccucaauucagagucgcggauuguuuggcgcgauagccggcuucaucgaagggggauggacagguauggucgacggcugguacggguaucaucaccagaaugagcagggaagcggcuacgcagcugaucucaaauccacccaaaacgccauugacgagaucacgaauaaggugaacucuguuauagaaaagaugaauacccaguuuacagcuguggguaaggaguucaaccaccuggaaaaacgaauugagaauuuaaacaagaaggucgaugacggguuccuggauaucuggacuuacaaugccgaacuccuugugcuguuggagaacgagagaacccuagacuaucaugauagcaauguuaaaaaccuguacgaaaagguaaggucacagcucaaaaacaaugcaaaggagaucggcaacggauguuuugaguucuaucacaaaugcgacaauacauguauggagagugugaagaacggcacuuacgauuauccuaaguacuccgaagaggccaaacugaaucgggaggaaauugacggggucaaacuugagagcacccguaucuaucagauucuggcuauauacucuacaguggcgucaaguuugguccucgugguuagccugggagcaaucuccuuuuggaugugcucuaacgguucguuacaaugccgcauuuguaucuga

SEQ ID NO: 137217 - RNA, 1701 nt, Artificial Sequence
  derived and/or modified CDS sequence (opt3) from hemagglutinin__InfluenzaA__AFM73065
augaaggccauccuggugguccuccuuuacaccuucgcuacagcaaacgccgacacucugugcauuggcuaucacgcgaauaacagcacggauaccguugacacaguguuggagagaaauguaacugugacccauuccgucaacuuacuggaagauaaacacaaugggaagcuauguaaacucaggggaguggcuccccugcaucuugguaagugcaacauagccggcuggauccuggggaauccugagugugaaucuuugucaacagcaaguagcugguccuacauuguugagaccucuucgucagacaacggaacuugcuauccaggcgauuuuaucgacuacgaagaacuccgggagcagcugagcaguguguccucuuucgaacgcuuugagauuuucccgaaaacaagcuccuggcccaaucacgauucaaacaagggugucaccgccgcuuguccucaugcaggggccaagaguuuuuauaaaaaucugaucuggcucgugaaggaaggaaacagcuacccaaaauuaucuaaguccuauauaaaugacaaaggcaaggagguacugguucuuuggggcauccaccaccccucaacgagcgcugaucaacagaguuuguaccagaacgccgacgcguacguguucgucgggacuucucgauauuccaagaaauuuaagccugagauugcaauccguccaaaagugagagauagggaaggacggaugaauuacuauuggacccugguggagcccggugacaagauuacauucgaagccacuggcaaccuagucguuccucgcuacgcuuuugccauggagagaaacgcagggagcggaaucauaauuucggauaccccagugcaugacugcaauacaaccugucagacgccgaaaggcgcuaucaacacuucucuccccuuccaaaauauucacccuaucacaaucgguaagugcccaaaauauguaaaguccaccaagcugaggcuugccacugggcugcggaacgugcccucaauucagagucgcggauuguuuggcgcgauagccggcuucaucgaagggggauggacagguauggucgacggcugguacggguaucaucaccagaaugagcagggaagcggcuacgcagcugaucucaaauccacccaaaacgccauugacgagaucacgaauaaggugaacucuguuauagaaaagaugaauacccaguuuacagcuguggguaaggaguucaaccaccuggaaaaacgaauugagaauuuaaacaagaaggucgaugacggguuccuggauaucuggacuuacaaugccgaacuccuugugcuguuggagaacgagagaacccuagacuaucaugauagcaauguuaaaaaccuguacgaaaagguaaggucacagcucaaaaacaaugcaaaggagaucggcaacggauguuuugaguucuaucacaaaugcgacaauacauguauggagagugugaagaacggcacuuacgauuauccuaaguacuccgaagaggccaaacugaaucgggaggaaauugacggggucaaacuugagagcacccguaucuaucagauucuggcuauauacucuacaguggcgucaaguuugguccucgugguuagccugggagcaaucuccuuuuggaugugcucuaacgguucguuacaaugccgcauuuguaucuga

SEQ ID NO: 137218 - RNA, 1701 nt, Artificial Sequence; identical to SEQ ID NO: 128963
  derived and/or modified CDS sequence (opt3) from hemagglutinin__InfluenzaA__AFM73477

SEQ ID NO: 137219 - RNA, 1707 nt, Artificial Sequence
  derived and/or modified CDS sequence (opt3) from hemagglutinin__InfluenzaA__AFM78567
auggagaagaucgugcugcuccuugccauugucagccugguuaaauccgaccagauaugcaucggcuaccacgcuaacaauucuaccgaacaaguggauacaauuauggagaagaacguaacugugacgcaugcacaggacaucuuggaaaagacccacaaugggaaauuaugugaucuggacggagucaaaccccuaauucucagagauugcucaguggccgguuggcugcuuggcaacccuaugugugacgaguucaucaauguuccagaauggaguuauauaguggagaaggcgaacccgacaaaugaucugugcuaccccgggagcuuuaacgacuaugaggaauugaagcaucuccuguccaggaucaaucacuucgagaaaauucagaucauuccuaagucuucguggucagaucaugaagcuagcaguggagucuccucugccuguccauaccugggcagccccuccuuuuuccggaacgugguauggcucaucaaaaagaacucaacuuauccuaccauuaaaaagaguuacaauaauacaaaccaggaggacuuacugguucuuugggguauacaccacccaaaugaugcagccgagcaaacccgcuuguaucagaaccccacuacauacaucagcauugggaccucuacgcugaaccagcggcuagugccuaagaucgcuacucguuccaaagucaauggacagucaggcagaauggaauuuuucuggaccauccucaagccaaacgacgcaauuaauuuugagagcaacggcaauuucauagccccggaauacgcuuauaaaaucgugaagaaaggggauagugccauuaugaagucugagcuggaauacggaaacugcaauacaaaaugucaaacucccaugggugcgaucaacuccagcaugccuuuucauaauauacacccacuuaccauuggcgagugccccaaguaugugaagucgaacaggcuggucuuggcaacagggcuccgaaauucuccucagcgcgaguccagaaggaaaaagcggggacuguucggcgccaucgcugguuuuaucgaagggggauggcagggcaugguugacggcugguacggguaucaucacucaaacgagcagggaagugguuacgccgcagacaaagaaagcacccaaaaggcuauugauggcgugacgaauaaaguaaacuccaucauugacaagaugaauacucaguucgaggccguggggcgcgaauuuaacaacuuagagcgaagaauagagaaucugaacaagaaaauggaagauggauuccucgacgucuggacauauaaugcggagcuucugguguugauggaaaacgagaggacccuagauuuccacgacucuaauguuaagaaccuguacgauaaagugcggcuccagcugcgugacaaugccaaggaacuuggcaacgguuguuuugaguucuaccauaaaugcgauaaugaguguauggaaagcauccgcaacgggacuuauaauuacccacaauauucagaggaagcaagacugaagagggaggagauuaguggcgucaaguuggaauccaucggaacauaccagauccucagcauuuauucuaccguggcuucaagucuggccuuagcuauaaugauggccggccugagccuauggaugugcuccaacgggucucuccagugccggaucuguauuuga

SEQ ID NO: 137220 - RNA, 1701 nt, Artificial Sequence
  derived and/or modified CDS sequence (opt3) from hemagglutinin__InfluenzaA__AFM78646
augaaggccauccuggugguccuccuuuacaccuucgcuacagcaaacgccgacacucugugcauuggcuaucacgcgaauaacagcacggauaccguugacacaguguuggagaaaaauguaacugugacccauuccgucaacuuacuggaagauaagcacaaugggaaacuauguaagcucagaggaguggcuccccugcaucuugguaaaugcaacauagccggcuggauccuggggaauccugagugugaaucuuugucaacagcaaguagcugguccuacauuguugagaccucuucgucagacaacggaacuugcuauccaggcgauuuuaucgacuacgaagaacucagggagcagcugagcaguguguccucuuucgaacgguuugagauuuucccgaagacaagcuccuggcccaaucacgauccuaacaagggugucaccgccgcuuguccacaugcaggggccaaaucauuuuauaagaaucugaucuggcucgugaaaaagggaaacaguuaccccaaauuaagcaagucuuauauaaaugacaagggcaaagaaguacugguucuuuggggcauccaccacccuuccacgucagcugaucaacagggguuguaccagaacgccgacgcguacguguucgucggaacuagccgcuauaguaagaaauuuaagccagagauugcaauccgacccaaagugcgugaucaggaggguagaaugaauuacuauuggacccugguggaaccuggcgacaagauuacauucgaggccacugggaaccuagucguuccaagguacgcuuuugccauggaacggaacgcaggaucuggcaucauaauuuccgauaccccggugcaugacugcaauacaaccugucaaacgcccaaaggugcuaucaacacuagccucccuuuccagaauauucacccaaucacaaucgggaagugccccaaguauguaaaaucgaccaagcugcgccuugccacuggacugagaaacgugccuucuauucaguccaggggcuuguuuggcgcgauagccggguucaucgagggagguuggacaggcauggucgacgggugguacggauaucaucaccagaaugaacaaggcucagguuacgcagcugaucucaaaaguacccagaacgccauugacgagaucacgaauaaggugaacagcguuauagagaaaaugaauacccaguuuacagcuguggggaaggaguucaaccaccuggagaagcggauugaaaauuuaaacaaaaaggucgaugacggcuuccuggauaucuggacuuacaaugccgagcuccuugugcuguuggaaaacgagcgcacccuagacuaucaugauuccaauguaaagaaccuguacgagaagguucgaucucagcucaaaaacaaugcaaaggaaaucggaaacggcuguuuugaguucuaucacaagugcgacaauacauguauggaaagcgugaaaaacgggacuuacgauuauccaaaguacucagaggaagccaaacugaauagagaggagauugacggagucaaacuugaaaguaccaggaucuaucaaauucuggcuauauacuccacaguggcgagcucuuugguccucgugguuucacugggugcaaucaguuuuuggaugugcagcaacggcuccuuacagugccggauuuguaucuga

SEQ ID NO: 137221 - RNA, 1698 nt, Artificial Sequence
  derived and/or modified CDS sequence (opt3) from hemagglutinin__InfluenzaA__AFM85179
augaaggugaaacugcucauccuucugugcaccuucacagccacuuacgcugacacgauuuguauaggcuaucacgcaaacaauagcaccgauacagucgacacuguuuuggagaagaacgugaccguaacacauuccgugaauuuacuggaaaacucucacaaugggaaacuaugccuccugaagggaaucgcgccccuucagcuggguaacuguucagucgccggcuggauuuuggggaauccugagugcgaacuccugaucaguaaagagagcugguccuacauuguggaaaccccaaacccggagaauggaacuuguuaucccggcuacuuugcugauuaugaggaacugagagagcaacucucuucgguuucaucuuucgaaagguuugagaucuucccuaaggagaguuccuggccaaaccauacagugaccggugucucugccagcugcucccacaaugggaagucaaguuuuuaccggaacuuacuguggcuuacgggcaaaaauggauuguaucccaaccugagcaagucuuacgcaaauaacaaagaaaaggaggugcuaauacucuggggcguacaucacccuccaaacaucggggaccagcgcacucuguacuauaccgaaaaugccuacguuuccguggucucaagccacuauagucgacguuucacacccgagauuacuaaaagaccuaaggugagggaucaggaaggacggaucaacuacuauuggacccuucuggagccaggugacacaauuaucuuugaggcuaauggcaacuugauagcaccgugguacgccuucgcucucucucgcggguuuggauccggcauuaucauuagcaaugcccccauggaugaaugugacgcgaagugccagaccccucaaggugcaaucaacucgucucugccauuccagaaugugcaucccgucacgaucggggaguguccuaaauauguuagauccgccaaguuaaggauggugacuggacugcggaacauuccaucaauacagagucgcggccucuuuggcgcuaucgccggguucauugaaggagguuggacaggcaugguagaugggugguacggauaccaccaucagaaugagcaaggcagcgguuaugcagcugaccagaaauccacccagaacgccaucaaugggauaacuaacaaggugaauagcgucauugaaaagaugaacacacaguuuaccgcggugggcaaagaguucaauaaauucgagcgaagaauggaaaaccuuaacaagaagguugaugacggauuucuggauaucuggacguacaaugccgaguugcuagugcugcucgaaaacgagaggacccuggacuuccacgacagcaaugucaaaaaccuuuaugaaaaggugaaaucacaacugaagaauaacgcaaaagagaucggcaaugggugcuuugaguucuaccacaaguguaacaaugaaugcauggagaguguaaagaacggaacauaugauuaccccaaauauuccgaagagagcaaguugaaucgggagaaaauugacgguguuaagcucgaaucuaugggcguguaccagauccuggcuauuuacucaacugucgccaguagcuuagugcugcuagucucccucggggcuauaucuuuuuggaugugcucgaacggaagccugcagugucguaucugcauuuga

SEQ ID NO: 137222 - RNA, 1701 nt, Artificial Sequence
  derived and/or modified CDS sequence (opt3) from hemagglutinin__InfluenzaA__AFN11846
augaagaccaucauugcccugagcuacauacucugccuuguguucgcucagaaacugcccggcaacgacaauuccacagcaacuuuguguuuagggcaccaugccgucccuaacggaacgcugguuaagaccaucacaaaugaucaaauugaggugacuaacgcgaccgaacuuguacagucuucaaguacagguagaaucugcgacagcccacacaggauucucgauggcaaaaauuguacccugaucgacgcucuacugggggauccgcauugcgacggauuucagaacaaggagugggauuuguucguggaacgguccaaagccuauucuaauuguuaccccuaugacgucccugauuacgcaucgcuccgcucacugguggccagcaguggcacucuggaguuuacaaacgaagguuucaauuggaccgggguugcucaggacggaaaguccuaugcaugcaagcgaggcucugugaaauccuuuuucagccgucucaacugguuacacaagcuggaguacaaauauccagcccuuaaugucacgaugcccaacaaugauaaguuugacaaauuguacauauggggcgugcaucacccuucaacugauagugaccaaaccagccuguacguacaggcuucugggagaguuacaguguccacuaagaggucacagcagaccgucaucccaaacauuggaagccggcccugggugcgcgguaucaguucuagaauuuccaucuauuggacaauagugaagccuggcgacauucuacucaucaauagcaccgggaaccugauugccccaaggggauacuucaaaauccggaacggcaagucgucuaucaugcgcuccgaugcgccgauugguaauuguaacucagagugcauaacgcccaaugggaguaucccuaacgacaaaccauuucaaaaugucaaccgaauuacuuauggagcaugucccagauacguuaagcagaauacacuuaaacuggccaccggcaugaggaacgugccugaaaagcagacucggggcaucuucggggcuauagccggauuuauugagaaugguugggaaggcaugguagaugggugguauggauuccgucaccagaacagcgagggcacaggucaagcagcugacuugaaauccacccaggccgcgaucgaucagaucaaugggaagcucaaccgccugauugagaagacgaaugaaaaauuucaucaaaucgagaaggaguucucugaaguggaaggcaggauucaggacuuagagaaauacgucgaggauaccaagauagaccuguggagcuauaacgccgaacuccuuguggcacuggagaaucagcacacaaucgauuugacugacucagaaaugaacaaacuauucgagagaacccggaagcagcugcgagaaaacgcugaggauaugggaaauggcugcuuuaagauuuaccauaaaugugacaacgccugcaucgggaguauccgcaauggaacauacgaccacgauguuuauagagacgaggcucucaacaauagguuccaaauuaaggguguggaacugaaauccggcuacaaggauuggauacuuuggaucagcuuugccauuucuugcuuccuguugugugucgugcuccugggguuuaucaugugggcaugccagaaaggaaacauucgguguaauaucugcauauga

SEQ ID NO: 137223 - RNA, 1701 nt, Artificial Sequence; identical to SEQ ID NO: 131578
  derived and/or modified CDS sequence (opt3) from hemagglutinin__InfluenzaA__AFN17371

SEQ ID NO: 137224 - RNA, 1701 nt, Artificial Sequence; identical to SEQ ID NO: 130717
  derived and/or modified CDS sequence (opt3) from hemagglutinin__InfluenzaA__AFN17381

SEQ ID NO: 137225 - RNA, 1701 nt, Artificial Sequence; identical to SEQ ID NO: 130717
  derived and/or modified CDS sequence (opt3) from hemagglutinin__InfluenzaA__AFN17391

SEQ ID NO: 137226 - RNA, 1701 nt, Artificial Sequence; identical to SEQ ID NO: 130717
  derived and/or modified CDS sequence (opt3) from hemagglutinin__InfluenzaA__AFN17401

SEQ ID NO: 137227 - RNA, 1701 nt, Artificial Sequence; identical to SEQ ID NO: 130717
  derived and/or modified CDS sequence (opt3) from hemagglutinin__InfluenzaA__AFN17411

SEQ ID NO: 137228 - RNA, 1701 nt, Artificial Sequence; identical to SEQ ID NO: 130717
  derived and/or modified CDS sequence (opt3) from hemagglutinin__InfluenzaA__AFN17421

SEQ ID NO: 137229 - RNA, 1701 nt, Artificial Sequence; identical to SEQ ID NO: 130808
  derived and/or modified CDS sequence (opt3) from hemagglutinin__InfluenzaA__AFN17431

SEQ ID NO: 137230 - RNA, 1701 nt, Artificial Sequence
  derived and/or modified CDS sequence (opt3) from hemagglutinin__InfluenzaA__AFN17441
augaaggccauccuggugguccuccuuuacaccuucgcuacagcaaacgccgacacucugugcauuggcuaucacgcgaauaacagcacggauaccguugacacaguguuggagaaaaauguaacugugacccauuccgucaacuuacuggaagauaagcacaaugggaaacuauguaagcucagaggaguggcuccccugcaucuugguaaaugcaacauagccggcuggauccuggggaauccugagugugaaucuuugucaaaggcaaguagcugguccuacauuguugagacaucuucgucagacaacggaaccugcuauccaggcgauuuuaucgacuacgaggagcucagggagcagcugagcaguguguccucuuucgaacgguuugagauuuucccgaagacuagcuccuggcccaaucacgauucaaacaaaggugucacagccgcuuguccucaugcaggggccaagaguuuuuauaaaaaucugaucuggcucgugaagaaaggaaacagcuacccaaaguuaucuaaguccuauauaaaugacaaaggcaaggaaguacugguucuuuggggcauccaccaccccucaaccagcgcugaucaacagaguuuguaccagaacgccgacgcguacguguucgucgggacgucucgcuauuccaaaaaguuuaaaccugagauugcaauccgaccaaaggugcgugaucaggagggaagaaugaauuacuauuggacucugguggaacccggugacaaaauuaccuucgaggccacaggcaaccuagucguuccuagguacgcuuuugccauggaacggaacgcagggagcggaaucauaauuucggauacuccagugcaugacugcaauaccacaugucaaaccccgaagggcgcuaucaacacgucucuccccuuccagaauauucacccuaucacuaucgguaagugcccaaaauauguaaaguccacaaaacugcgccuugccaccgggcugagaaacgugcccucaauucagaguaggggauuguuuggcgcgauagccggcuucaucgaagggggauggacugguauggucgacggcugguacggguaucaucaccagaaugaacaaggaagcggcuacgcagcugaucucaaguccacacagaacgccauugacgagaucaccaauaaagugaacucuguuauagagaagaugaauacgcaguuuaccgcuguggguaaggaguucaaccaccuggaaaaacggauugaaaauuuaaacaagaaagucgaugacggguuccuggauaucuggacauacaaugccgagcuccuugugcuguuggaaaacgagcgcacucuagacuaucaugauagcaauguaaagaaccuguacgagaaaguucgaucacagcucaagaacaaugcaaaggaaaucggcaacggauguuuugaguucuaucacaaaugcgacaauaccuguauggaaagugugaagaacggcacauacgauuauccuaaauacuccgaggaagccaagcugaauagagaggagauugacggggucaaacuugaaagcacuaggaucuaucaaauucuggcuauauacucuaccguggcgucaaguuugguccucgugguuagccugggagcaaucuccuuuuggaugugcucuaacgguucguuacagugccggauuuguaucuga

SEQ ID NO: 137231 - RNA, 1701 nt, Artificial Sequence; identical to SEQ ID NO: 133272
  derived and/or modified CDS sequence (opt3) from hemagglutinin__InfluenzaA__AFN17451

SEQ ID NO: 137232 - RNA, 1701 nt, Artificial Sequence; identical to SEQ ID NO: 131559
  derived and/or modified CDS sequence (opt3) from hemagglutinin__InfluenzaA__AFN17467

SEQ ID NO: 137233 - RNA, 1701 nt, Artificial Sequence; identical to SEQ ID NO: 130717
  derived and/or modified CDS sequence (opt3) from hemagglutinin__InfluenzaA__AFN17477

SEQ ID NO: 137234 - RNA, 1701 nt, Artificial Sequence; identical to SEQ ID NO: 131578
  derived and/or modified CDS sequence (opt3) from hemagglutinin__InfluenzaA__AFN17487

SEQ ID NO: 137235 - RNA, 1701 nt, Artificial Sequence; identical to SEQ ID NO: 130717
  derived and/or modified CDS sequence (opt3) from hemagglutinin__InfluenzaA__AFN17497

SEQ ID NO: 137236 - RNA, 1701 nt, Artificial Sequence; identical to SEQ ID NO: 130717
  derived and/or modified CDS sequence (opt3) from hemagglutinin__InfluenzaA__AFN17507

SEQ ID NO: 137237 - RNA, 1701 nt, Artificial Sequence; identical to SEQ ID NO: 131559
  derived and/or modified CDS sequence (opt3) from hemagglutinin__InfluenzaA__AFN17517

SEQ ID NO: 137238 - RNA, 1701 nt, Artificial Sequence; identical to SEQ ID NO: 131578
  derived and/or modified CDS sequence (opt3) from hemagglutinin__InfluenzaA__AFN17527

SEQ ID NO: 137239 - RNA, 1701 nt, Artificial Sequence; identical to SEQ ID NO: 130717
  derived and/or modified CDS sequence (opt3) from hemagglutinin__InfluenzaA__AFN17537

SEQ ID NO: 137240 - RNA, 1701 nt, Artificial Sequence; identical to SEQ ID NO: 130959
  derived and/or modified CDS sequence (opt3) from hemagglutinin__InfluenzaA__AFN17547

SEQ ID NO: 137241 - RNA, 1701 nt, Artificial Sequence; identical to SEQ ID NO: 132248
  derived and/or modified CDS sequence (opt3) from hemagglutinin__InfluenzaA__AFN17557

SEQ ID NO: 137242 - RNA, 1701 nt, Artificial Sequence; identical to SEQ ID NO: 131559
  derived and/or modified CDS sequence (opt3) from hemagglutinin__InfluenzaA__AFN17567

SEQ ID NO: 137243 - RNA, 1701 nt, Artificial Sequence; identical to SEQ ID NO: 130959
  derived and/or modified CDS sequence (opt3) from hemagglutinin__InfluenzaA__AFN17574

SEQ ID NO: 137244 - RNA, 1701 nt, Artificial Sequence; identical to SEQ ID NO: 130717
  derived and/or modified CDS sequence (opt3) from hemagglutinin__InfluenzaA__AFN17580

SEQ ID NO: 137245 - RNA, 1701 nt, Artificial Sequence; identical to SEQ ID NO: 130717
  derived and/or modified CDS sequence (opt3) from hemagglutinin__InfluenzaA__AFN17586

SEQ ID NO: 137246 - RNA, 1701 nt, Artificial Sequence; identical to SEQ ID NO: 131578
  derived and/or modified CDS sequence (opt3) from hemagglutinin__InfluenzaA__AFN17595

SEQ ID NO: 137247 - RNA, 1701 nt, Artificial Sequence; identical to SEQ ID NO: 130717
  derived and/or modified CDS sequence (opt3) from hemagglutinin__InfluenzaA__AFN17605

SEQ ID NO: 137248 - RNA, 1701 nt, Artificial Sequence; identical to SEQ ID NO: 130717
  derived and/or modified CDS sequence (opt3) from hemagglutinin__InfluenzaA__AFN17615

SEQ ID NO: 137249 - RNA, 1701 nt, Artificial Sequence; identical to SEQ ID NO: 130717
  derived and/or modified CDS sequence (opt3) from hemagglutinin__InfluenzaA__AFN17625

SEQ ID NO: 137250 - RNA, 1701 nt, Artificial Sequence; identical to SEQ ID NO: 130717
  derived and/or modified CDS sequence (opt3) from hemagglutinin__InfluenzaA__AFN17635

SEQ ID NO: 137251 - RNA, 1701 nt, Artificial Sequence
  derived and/or modified CDS sequence (opt3) from hemagglutinin__InfluenzaA__AFN17645
augaaggccauccuggugguccuccuuuacaccuucgcuacagcaaacgccgacacucugugcauuggcuaucacgcgaauaacagcacggauaccguugacacaguguuggagaaaaauguaacugugacccauuccgucaacuuacuggaagauaagcacaaugggaaacuauguaagcucagaggaguggcuccccugcaucuugguaaaugcaacauagccggcuggauccuggggaauccugagugugaaucuuugucaacagcaaguagcugguccuacauuguugagaccucuucgucagacaacggaacuugcuauccaggcgauuuuaucgacuacgaggagcucagggagcagcugagcaguguguccucuuucgaacgggucgagauuuuuccgaagacaagcuccuggcccaaucacgauucaaacaagggugugaccgccgcuuguccucaugcaggggccaaaaguuucuauaagaaucugaucuggcucguaaagaagggaaacagcuacccaaaauuaucuaaguccuauauaaaugacaagggcaaagaaguucuggugcuuuggggcauccaccaccccucaacgagcgcugaucaacagaguuuguaccagaacgccgacgcguacgucuuuguggggacuucucgcuauuccaagaaauucaagccugagauugcaauccgaccaaaagugcgugaucaggagggaagaaugaauuacuauuggacccuggucgaacccggugacaagauuacauuugaggccacuggcaaccuaguugugccuagguacgcuuucgccauggaacggaacgcagggagcggaaucauaauuucggauaccccaguacaugacugcaauacaaccugucaaacgccgaaaggcgcuaucaacacuucucuccccuuucagaauauucacccuaucacaaucgguaagugcccaaaguaugugaaauccaccaagcugcgccuugccacugggcugagaaacguccccucaauucagaguaggggauuguucggcgcgauagccggcuuuaucgaagggggauggacagguaugguggacggcugguacggguaucaucaccagaaugaacaaggaagcggcuacgcagcugaucucaaauccacccagaacgccauugacgagaucacgaauaagguuaacucugugauagagaaaaugaauacccaguucacagcugucgguaaggaauuuaaccaccuggagaagcggauugaaaauuuaaacaaaaagguggaugacggguuccuggauaucuggacuuacaaugccgagcuccuuguacuguuggaaaacgagcgcacccuagacuaucaugauagcaauguuaaaaaccuguacgagaaggugcgaucacagcucaaaaacaaugcaaaggaaaucggcaacggauguuucgaguuuuaucacaagugcgacaauacauguauggaaagugucaaaaacggcacuuacgauuauccuaaguacuccgaggaagccaaacugaauagagaggagauugacggggugaaacuugaaagcaccaggaucuaucaaauucuggcuauauacucuacagucgcgucaaguuuggugcucguugugagccugggagcaaucuccuucuggaugugcucuaacgguucguuacagugccggauuuguaucuga

SEQ ID NO: 137252 - RNA, 1701 nt, Artificial Sequence; identical to SEQ ID NO: 131578
  derived and/or modified CDS sequence (opt3) from hemagglutinin__InfluenzaA__AFN17655

SEQ ID NO: 137253 - RNA, 1701 nt, Artificial Sequence; identical to SEQ ID NO: 131578
  derived and/or modified CDS sequence (opt3) from hemagglutinin__InfluenzaA__AFN17665

SEQ ID NO: 137254 - RNA, 1701 nt, Artificial Sequence
  derived and/or modified CDS sequence (opt3) from hemagglutinin__InfluenzaA__AFN17675
augaaggccauccugauugugcuccuuuacaccuucgcuacagcaaacgccgacacucugugcauaggcuaucacgcgaauaacagcacggauaccgucgacacaguuuuggagaaaaaugugacuguaacccauuccgugaacuuacuggaagauaagcacaaugggaaacuauguaagcucagaggagucgcuccccugcaucuugguaaaugcaacaucgccggcuggauucuggggaauccugagugugaaucuuugucaacagcaaguagcugguccuacaucguggagaccucuucgucagacaacggaacuugcuauccaggcgauuuuauugacuacgaagaacucagggagcagcugagcaguguuuccucuuucgaacgguuugagaucuucccgaagacaagcuccuggcccaaucacgauucaaacaagggugugaccgccgcuuguccucaugcaggggccaaaaguuuuuauaagaaucugauauggcucgucaaaaagggaaacagcuacccaaaauuaucugaauccuauaucaaugacaagggcaaggaggugcugguacuuuggggcauucaccaccccucaacgagcgcugaucaacagaguuuguaccagaacgccgacgcguacguuuucguggggacuucucgcuauuccaaaaaguuuaaaccugagaucgcaauucgaccaaagguccgugaucaggaaggaagaaugaauuacuauuggacccugguggagcccggugacaaaaucacauucgaagccacuggcaaccuaguggucccuagguacgcuuuugccauggagcggaacgcagggagcggaauaauuaucucggauaccccaguucaugacugcaauacaaccugucaaacgccgaagggcgcuauuaacacuucucuccccuuccagaauauccacccuaucacaauugguaaaugcccaaaguaugugaaguccaccaaacugcgccuugccacugggcugagaaacguacccucaauacagaguaggggauuguuuggcgcgaucgccggcuucauugaagggggauggacagguaugguggacggcugguacggguaucaucaccagaaugagcaaggaagcggcuacgcagcugaucucaaguccacccagaacgccaucgacgagauaacgaauaaagucaacucugugauugaaaagaugaauacccaguuuacagcuguugguaaagaguucaaccaccuggaaaagcggaucgagaauuuaaacaagaaaguggaugacggguuccuggauaucuggacuuacaaugccgaacuccuuguccuguuggagaacgagcgcacccuagacuaucaugauagcaaugugaagaaccuguacgaaaaaguacgaucacagcucaagaacaaugcaaaagagauuggcaacggauguuuugaguucuaucacaagugcgacaauacauguauggagaguguuaagaacggcacuuacgauuauccuaaauacuccgaagaggccaagcugaauagagaggaaaucgacggggugaaacuugagagcaccaggauuuaucaaauacuggcuaucuacucuacagucgcgucaaguuuggugcucgucgugagccugggagcaauuuccuuuuggaugugcucuaacgguucguuacagugccggaucuguaucuga

SEQ ID NO: 137255 - RNA, 1701 nt, Artificial Sequence
  derived and/or modified CDS sequence (opt3) from hemagglutinin__InfluenzaA__AFN17685
augaaggccauccuggugguccuccuuuacaccuucgcuacagcaaacgccgacacucugugcauuggcuaucacgcgaauaacagcacggauaccguugacacaauauuggagaagaaugugacuguaacccauuccgugaacuuacuggaagauaagcacaaugggaaacuauguaagcucagaggagucgcuccccugcaucuugguaaaugcaacaucgccggcuggauucuggggaauccugagugugaaucuuugucaacagcaaguagcugguccuacaucguggagaccucuucgucagacaacggaacuugcuauccaggcgauuuuauugacuacgaagaacucagggagcagcugagcaguguuuccucuuucgaacgguuugagaucuucccgaagacaagcuccuggcccaaucacgauucaaacaagggugugaccgccgcuuguccucaugcaggggccaaaaguuuuuauaagaaucugauauggcucgucaaaaagggaaacagcuacccaaaauuaucuaaguccuauaucaaugacaagggcaaagaagugcugguacuuuggggcauucaccaccccucaacgagcgcugaucaacagaguuuguaccagaacgccgacgcguacguuuucguggggacuucucgcuauuccaagaaauuuaagccugagaucgcaauucgaccaaaaguccgugaucaggagggaagaaugaauuacuauuggacccugguggaacccagggacaagaucacauucgaggccacugguaaccuaguggucccucgguacgcuuuugccauggaacgcaacgcaggcagcgggauaauuaucucggauaccccaguucaugacugcaauacaaccugucaaacgccgaaaggagcuauuaacacuucucuccccuuccagaauauccacccuaucacaauuggcaagugcccaaaguaugugaaauccaccaagcugagacuugccacuggucugaggaacguacccucaauacagagucggggguuguuuggagcgaucgccggcuucauugagggcggguggacaggaaugguggacgguugguacggcuaucaucaccagaaugaacaagggagcggauacgcagcugaucucaaauccacccagaacgccaucgacgagauaacgaauaaggucaacucugugauugagaaaaugaauacccaguuuacagcuguuggcaaggaguucaaccaccuggagaagcgcaucgaaaauuuaaacaaaaagguggaugacgguuuccuggauaucuggacuuacaaugccgagcuccuuguccuguuggaaaacgagcgaacccuagacuaucaugauagcaaugugaaaaaccuguacgagaagguaagaucacagcucaaaaacaaugcaaaggaaauugggaacggcuguuuugaguucuaucacaagugcgacaauacauguauggaaaguguuaaaaacggaacuuacgauuauccuaaguacuccgaggaagccaaacugaauagggaggagaucgacggcgugaaacuugaaagcacccggauuuaucaaauacuggcuaucuacucuacagucgcgucaaguuuggugcucgucgugagccugggggcaauuuccuuuuggaugugcucuaacggaucguuacagugccguaucuguaucuga

SEQ ID NO: 137256 - RNA, 1701 nt, Artificial Sequence; identical to SEQ ID NO: 130717
  derived and/or modified CDS sequence (opt3) from hemagglutinin__InfluenzaA__AFN17695

SEQ ID NO: 137257 - RNA, 1701 nt, Artificial Sequence; identical to SEQ ID NO: 130717
  derived and/or modified CDS sequence (opt3) from hemagglutinin__InfluenzaA__AFN17705

SEQ ID NO: 137258 - RNA, 1701 nt, Artificial Sequence; identical to SEQ ID NO: 131346
  derived and/or modified CDS sequence (opt3) from hemagglutinin__InfluenzaA__AFN17715

SEQ ID NO: 137259 - RNA, 1701 nt, Artificial Sequence
  derived and/or modified CDS sequence (opt3) from hemagglutinin__InfluenzaA__AFN17725
augaaggccauccuggugguccuccuuuacaccuucgcuacagcaaacgccgacacucugugcauuggcuaucacgcgaauaacagcacggauaccguugacacaguguuggagaaaaauguaacugugacccauuccgucaacuuacuggaagauaagcacaaugggaaacuauguaagcucagaggaguggcuccccugcaucuugguaaaugcaacauagccggcuggauccuggggaauccugagugugaaucuuugucaacagcaaguagcugguccuacauuguugagaccucuucgucagacaacggaacuugcuauccaggcgauuuuaucgacuacgaggagcucagggagcagcugagcaguguguccucuuucgaacgguuugagauuuucccgaagacaagcuccuggcccaaucacgauucaaacaagggugucaccgccgcuuguccucaugcaggggccaaaaguuuuuauaagaaucugaucuggcucgugaaaaagggaaacagcuacccaaaauuaucuaaguccuauauaaaugacaagggcaaagaaguacugguucuuuggggcauccaccaccccucaacgagcgcugaucaacagaguuuguaccagaacgccgacgcguacguguucgucgggacuucucgcuauuccaagaaauuuaagccugagauugcaauccgaccacaggugcgugaucaagagggaagaaugaauuacuauuggacccugguggaacccggugacaaaauuacauucgaggccacuggcaaccuagucguuccuagguacgcuuuugccauggaacggaacgcagggagcggaaucauaauuucggauaccccagugcaugacugcaauacaaccugucagacgccgaagggcgcuaucaacacuucucuccccuuccagaauauucacccuaucacaaucgguaaaugcccaaaguauguaaaguccaccaaacugcgccuugccacugggcugagaaacgugcccucaauucagaguaggggauuguuuggcgcgauagccggcuucaucgaagggggauggacagguauggucgacggcugguacggguaucaucaccaaaaugaacagggaagcggcuacgcagcugaucucaaguccacccagaacgccauugacgagaucacgaauaaagugaacucuguuauagagaagaugaauacccaguuuacagcuguggguaaagaguucaaccaccuggaaaagcggauugaaaauuuaaacaagaaagucgaugacggguuccuggauaucuggacuuacaaugccgagcuccuugugcuguuggaaaacgagcgcacccuagacuaucaugauagcaauguaaagaaccuguacgagaaaguucgaucacaacucaagaacaaugcaaaagaaaucggcaacggauguuuugaguucuaucacaagugcgacaauacauguauggaaagugugaagaacggcacuuacgauuauccuaaauacuccgaggaagccaagcugaauagagaggagauugacggggucaaacuugaaagcaccaggaucuaucagauucuggcuauauacucuacaguggcgucaaguuugguccucgugguuagccugggagcaaucuccuuuuggaugugcucuaacgguucguuacagugccggauuuguaucuga

SEQ ID NO: 137260 - RNA, 1701 nt, Artificial Sequence; identical to SEQ ID NO: 130717
  derived and/or modified CDS sequence (opt3) from hemagglutinin__InfluenzaA__AFN17735

SEQ ID NO: 137261 - RNA, 1701 nt, Artificial Sequence; identical to SEQ ID NO: 130717
  derived and/or modified CDS sequence (opt3) from hemagglutinin__InfluenzaA__AFN17742

SEQ ID NO: 137262 - RNA, 1701 nt, Artificial Sequence; identical to SEQ ID NO: 130717
  derived and/or modified CDS sequence (opt3) from hemagglutinin__InfluenzaA__AFN17748

SEQ ID NO: 137263 - RNA, 1701 nt, Artificial Sequence; identical to SEQ ID NO: 130717
  derived and/or modified CDS sequence (opt3) from hemagglutinin__InfluenzaA__AFN17757

SEQ ID NO: 137264 - RNA, 1701 nt, Artificial Sequence; identical to SEQ ID NO: 131346
  derived and/or modified CDS sequence (opt3) from hemagglutinin__InfluenzaA__AFN17767

SEQ ID NO: 137265 - RNA, 1701 nt, Artificial Sequence; identical to SEQ ID NO: 135727
  derived and/or modified CDS sequence (opt3) from hemagglutinin__InfluenzaA__AFN17774

SEQ ID NO: 137266 - RNA, 1701 nt, Artificial Sequence; identical to SEQ ID NO: 130717
  derived and/or modified CDS sequence (opt3) from hemagglutinin__InfluenzaA__AFN17783

SEQ ID NO: 137267 - RNA, 1701 nt, Artificial Sequence; identical to SEQ ID NO: 131346
  derived and/or modified CDS sequence (opt3) from hemagglutinin__InfluenzaA__AFN17793

SEQ ID NO: 137268 - RNA, 1701 nt, Artificial Sequence; identical to SEQ ID NO: 130717
  derived and/or modified CDS sequence (opt3) from hemagglutinin__InfluenzaA__AFN17803

SEQ ID NO: 137269 - RNA, 1701 nt, Artificial Sequence; identical to SEQ ID NO: 130717
  derived and/or modified CDS sequence (opt3) from hemagglutinin__InfluenzaA__AFN17813

SEQ ID NO: 137270 - RNA, 1701 nt, Artificial Sequence
  derived and/or modified CDS sequence (opt3) from hemagglutinin__InfluenzaA__AFN17823
augaaggccauccuggugguccuccuuuacaccuucgcuacagcaaacgccgacacucugugcauuggcuaucacgcgaauaacagcacggauaccguugacacaguguuggagaaaaauguaacugugacccauuccgucaacuuacuggaagauaagcacaaugggaaacuauguaagcucagaggaguggcuccccugcaucuugguaaaugcaacauagccggcuggauccuggggaauccugagugugaaucuuugucaacagcaaguagcugguccuacauuguugagaccucuucgucagacaacggaacuugcuauccaggcgauuuuaucgacuacgaagaacucagggagcagcugagcaguguguccucuuucgaacgguuugagauuuucccgaagacaagcuccuggcccaaucacgauucaaacaagggugucaccgccgcuuguccucaugcaggggccaaaaguuuuuauaagaaucugaucuggcucgugaaaaagggaaacagcuacccaaaauuaucugaauccuauauaaaugacaagggcaaggagguacugguucuuuggggcauccaccaccccucaacgagcgcugaucaacagaguuuguaccagaacgccgacgcguacguguucgucgggacuucucgcuauuccaaaaaguuuaaaccugagauugcaauccgaccaaaggugcgugaucaggaaggaagaaugaauuacuauuggacccugguggagcccggugacaaaauuacauucgaagccacuggcaaccuagucguuccuagguacgcuuuugccauggagcggaacgcagggagcggaaucauaauuucggauaccccagugcaugacugcaauacaaccugucaaacgccgaagggcgcuaucaacacuucucuccccuuccagaauauucacccuaucacaaucgguaaaugcccaaaguauguaaaguccaccaaacugcgccuugccacugggcugagaaacgugcccucaauucagaguaggggauuguuuggcgcgauagccggcuucaucgaagggggauggacagguauggucgacggcugguacggguaucaucaccagaaugagcaaggaagcggcuacgcagcugaucucaaguccacccagaacgccauugacgagaucacgaauaaagugaacucuguuauagaaaagaugaauacccaguuuacagcuguggguaaagaguucaaccaccuggaaaagcggauugagaauuuaaacaagaaagucgaugacggguuccuggauaucuggacuuacaaugccgaacuccuugugcuguuggagaacgagcgcacccuagacuaucaugauagcaauguaaagaaccuguacgaaaaaguucgaucacagcucaagaacaaugcaaaagagaucggcaacggauguuuugaguucuaucacaagugcgacaauacauguauggagagugugaagaacggcacuuacgauuauccuaaauacuccgaagaggccaagcugaauagagaggaaauugacggggucaaacuugagagcaccaggaucuaucaaauucuggcuauauacucuacaguggcgucaaguuugguccucgugguuagccugggagcaaucuccuuuuggaugugcucuaacgguucguuacagugccggauuuguaucuga

SEQ ID NO: 137271 - RNA, 1701 nt, Artificial Sequence
  derived and/or modified CDS sequence (opt3) from hemagglutinin__InfluenzaA__AFN17833
augaaggccauccuggugguccuccuuuacaccuucgcuacagcaaacgccgacacucugugcauuggcuaucacgcgaauaacagcacggauaccguugacacaguguuggagaagaauguaacugugacccauuccgucaacuuacuggaagauaagcacaaugggaaacuauguaagcucagaggaguggcuccccugcaucuugguaaaugcaacauagccggcuggauccuggggaauccugagugugaaucuuugucaacagcaaguagcugguccuacauuguugagaccucuucgucagacaacggaacuugcuauccaggcgauuuuaucgacuacgaggagcucagggagcagcugagcaguguguccucuuucgaacgguuugagauuuucccgaagacaagcuccuggcccaaucacgauucaaacaagggugucaccgccgcuuguccuaaugcaggggccaaaaguuuuuauaagaaccugaucuggcucgugaaaaagggaaauagcuacccaaaauuaucuaaguccuauauaaacgacaagggcaaagaaguacugguucuuuggggcauccaucaccccucaacgagcgcugaucaacagaguuuguaccagaaugccgacgcguacguguucgucgggacuucucgcuauuccaagaaauuuaagccugagauugcaauccgaccaaaagugcgugaucaggagggaagaaugaacuacuauuggacccugguggaacccggugacaagauuacauucgaggccacuggcaaccuagucguuccuagguacgcuuuugccauggaacggaaugcagggagcggaaucauaauuucggauaccccagugcacgacugcaacacaaccugucaaacgccgaaaggcgcuaucaauacuucucuccccuuccagaacauucauccuaucacaaucgguaagugcccaaaguauguaaaauccaccaagcugcgccuugccacugggcugagaaaugugcccucaauucagaguaggggauuguuuggcgcgauagccggcuucaucgaagggggauggacagguauggucgacggcugguacggguaucaccaucagaacgaacaaggaagcggcuacgcagcugaucucaaauccacccagaaugccauugacgagaucacgaacaagguaaauucuguuauagagaaaaugaacacccaguuuacagcuguggguaaggaguucaaucaccuggaaaagcggauugaaaacuuaaauaaaaaggucgaugacggguuccuggauaucuggacuuacaacgccgagcuccuugugcuguuggaaaaugagcgcacccuagacuaucacgauagcaacgugaaaaaccuguacgagaagguucgaucacagcucaaaaauaacgcaaaggaaaucggcaauggauguuuugaguucuaucauaagugcgacaacacauguauggaaagugugaaaaauggcacuuacgauuauccuaaguacuccgaggaagccaaacugaacagagaggagauugacggggucaaacuugaaagcaccaggaucuaucaaauucuggcuauauacucuacaguggcgucaaguuugguccucgugguuagccugggagcaaucuccuuuuggaugugcucuaaugguucguuacagugccggauuuguaucuga

SEQ ID NO: 137272 - RNA, 1701 nt, Artificial Sequence; identical to SEQ ID NO: 135226
  derived and/or modified CDS sequence (opt3) from hemagglutinin__InfluenzaA__AFN17843

SEQ ID NO: 137273 - RNA, 1701 nt, Artificial Sequence; identical to SEQ ID NO: 130717
  derived and/or modified CDS sequence (opt3) from hemagglutinin__InfluenzaA__AFN17853

SEQ ID NO: 137274 - RNA, 1701 nt, Artificial Sequence; identical to SEQ ID NO: 130959
  derived and/or modified CDS sequence (opt3) from hemagglutinin__InfluenzaA__AFN17863

SEQ ID NO: 137275 - RNA, 1701 nt, Artificial Sequence
  derived and/or modified CDS sequence (opt3) from hemagglutinin__InfluenzaA__AFN17873
augaaggccauccuggugguccuccuuuacaccuucgcuacagcaaacgccgacacucugugcauuggcuaucacgcgaauaacagcacggauaccguugacacaguguuggagaaaaauguaacugugacccauuccgucaacuuacuggaagauaagcacaaugggaaacuauguaagcucagaggaguggcuccccugcaucuugguaaaugcaacauagccggcuggauccuggggaauccugagugugaaucuuugucaacagcaggaaguuggagcuacauuguugagaccuccucuucggacaacggcacuugcuauccaggugauuuuaucgacuacgaagaacucagggagcagcugucaagcgugaguuccuucgaacgguuugagauuuucccgaagacaucuagcuggcccaaucacgaucugaacaagggggucaccgccgcuuguccucaugcaggagccaaauccuuuuauaagaaucucaucugguuagugaaaaagggcaacucauacccaaaacugaguaagagcuauauaaaugacaagggcaaagaaguacuuguuuugugggggauccaccaccccucuacguccgcugaucaacagucacuguaccagaacgccgacgcguacguguucgucggaacuagccgcuauaguaagaaauuuaagccugagauugcaauccgaccaaaagugcgugaucaggaggguagaaugaauuacuauuggacccuaguggaacccggcgacaagauuacauucgaggccacugggaaccucgucguuccuagguacgcuuuugccauggaacggaacgcaggaucuggcaucauaauuuccgauaccccagugcaugacugcaauacaaccugucaaacgccgaaaggugcuaucaacacuagccugcccuuccagaauauucacccuaucacaaucgggaagugcccaaaguauguaaaaucgaccaaacuucgccuggccacuggauugagaaacgugcccucuauucaguccaggggccucuuuggcgcgauagccggguucaucgagggagguuggacaggcauggucgacgggugguacggauaucaucaccagaaugaacaaggcucagguuacgcagcugaucugaaaaguacccagaacgccauugacgagaucacgaauaaggugaacagcguuauagagaaaaugaauacccaguuuacagcuguggggaaggaguucaaccacuuagagaagcggauugaaaaucugaacaaaaaggucgaugacggcuuccucgauaucuggacuuacaaugccgagcuucugguguugcuagaaaacgagcgcacccuggacuaucaugauuccaauguaaagaaccucuacgagaagguucgaucucagcugaaaaacaaugcaaaggaaaucggaaacggcuguuuugaguucuaucacaagugcgacaauacauguauggaaagcgugaaaaacgggacuuacgauuauccuaaguacucagaggaagccaaacuuaauagagaggagauugacggagucaagcuggaaaguaccaggaucuaucaaauuuuggcuauauacuccacaguggcgagcucucucguccuggugguuucauuaggugcaaucaguuuuuggaugugcagcaacggcucccugcagugccggauuuguaucuga

SEQ ID NO: 137276 - RNA, 1701 nt, Artificial Sequence
  derived and/or modified CDS sequence (opt3) from hemagglutinin__InfluenzaA__AFN17883
augaaggccauccuggugguccuccuuuacaccuucgcuacagcaaacgccgacacucugugcauuggcuaucacgcgaauaacagcacggauaccguugacacaguguuggagaaaaauguaacugugacccauuccgucaacuuacuggaagauaagcacaaugggaaacuauguaagcucagaggaguggcuccccugcaucuugguaaaugcaacauagccggcuggauccuggggaauccugagugugaaucuuugucaacagcaaguagcugguccuacauuguugagaccucuucgucagacaacggaacuugcuauccaggcgauuuuaucgacuacgaggagcucagggagcagcugagcaguguguccucuuucgaacgguuugagauuuucccgaagacaagcuccuggcccaaucacgauucaaacaagggugucaccgccgcuuguccucaugcaggggccaaaaguuuuuauaagaaucugaucuggcucgugaaaaagggaaacagcuacccaaaauuaucuaaguccuauauaaaugacaagggcaaagaaguacugguucuuuggggcauccaccaccccucaacgagcgcugaucaacagaguuuguaccagaacgccgacgcguacguguucgucgggacuucucgcuauuccaagaaauuuaagccugagauugcaauccgaccaaaagugcgugaucaggagggaagaaugaauuacuauuggacccugguggaacccggugacaagauuacauucgaggccacuggcaaccuagucguuccuagguacgcuuuugccauggaacggaacgcagggagcggaaucauaauuucggauaccccagugcaugacugcaauacaaccugucaaacgcucaaaggcgcuaucaacacuucucugccguuccagaauauucaccccaucacaaucgguaagugcccuaaguauguaaaauccaccaaacuucgccuggccacuggguugagaaacgugccaucaauucagaguaggggacucuuuggcgcgauagccggcuucaucgaagggggauggacagguauggucgacggcugguacggguaucaucaccagaaugaacaaggaagcggcuacgcagcugaucugaaauccacccagaacgccauugacgagaucacgaauaaggugaacucuguuauagagaaaaugaauacccaguuuacagcuguggguaaggaguucaaccacuuagaaaagcggauugaaaaucugaacaaaaaggucgaugacggguuccucgauaucuggacuuacaaugccgagcuucugguguugcuagaaaacgagcgcacccuggacuaucaugauagcaauguaaagaaccucuacgagaagguucgaucacagcugaaaaacaaugcaaaggaaaucggcaacggauguuuugaguucuaucacaagugcgacaauacauguauggaaagugugaaaaacggcacuuacgauuaucccaaguacuccgaggaagccaaacuuaauagagaggagauugacggggucaagcuggaaagcaccaggaucuaucaaauuuuggcuauauacucuacaguggcgucaagucucguccuggugguuagcuuaggagcaaucuccuuuuggaugugcucuaacgguucgcugcagugccggauuuguaucuga

SEQ ID NO: 137277 - RNA, 1701 nt, Artificial Sequence; identical to SEQ ID NO: 130717
  derived and/or modified CDS sequence (opt3) from hemagglutinin__InfluenzaA__AFN17893

SEQ ID NO: 137278 - RNA, 1701 nt, Artificial Sequence
  derived and/or modified CDS sequence (opt3) from hemagglutinin__InfluenzaA__AFN17903
augaaggccauccuggugguccuccuuuacaccuucgcuacagcaaacgccgacacucugugcauuggcuaucacgcgaauaacagcacggauaccguugacacaguguuggagaaaaauguaacugugacccauuccgucaacuuacuggaagauaagcacaaugggaaacuauguaagcucagaggaguggcuccccugcaucuugguaaaugcaacauagccggcuggauccuggggaauccugagugugaaucuuugucaacagcaaguagcugguccuacauuguugagaccucuucgucagacaacggaacuugcuauccaggcgauuuuaucgacuacgaagaacucagggagcagcugagcaguguguccucuuucgaacgguuugagauuuucccgaagacaagcuccuggcccaaucacgaaucaaacaagggugucaccgccgcuuguccucaugcaggggccaaaaguuuuuauaagaaucugaucuggcucgugaaaaagggaaacagcuacccaaaauuaucuaaguccuauguaaaugauaagggcaaagagguucuggugcuuuggggcauacaccaccccucaacgagcgcugaccaacagaguuuguaccagaacgccgaugcguacgucuucguggggacuucucgcuauuccaagaaauuuaagccugagaucgcaauucgaccaaaagugcgugaccaggaaggaagaaugaauuacuauuggacccuggucgagcccggugauaagaucacauucgaagccacuggcaaccuaguugugccuagguacgcuuuugccauggagcggaacgcagggagcggaauuaucauaucggacaccccaguacaugauugcaauacaaccugucaaacgccgaaaggcgcuauuaacacuucucuccccuuccagaauauccacccuauuacaaucgguaagugcccaaaguaugugaaauccaccaagcugcgccuugccacugggcugagaaacguccccucaauccagaguaggggauuguuuggcgcgauugccggcuucauagaagggggauggacagguaugguggacggcugguacggguaucaucaccagaaugagcaaggaagcggcuacgcagcugaccucaaauccacccagaacgccaucgaugagauuacgaauaagguuaacucugugaucgaaaagaugaauacccaguuuacagcugucgguaaggaguucaaccaccuggaaaagcggauagagaauuuaaacaaaaagguggacgauggguuccuggacauuuggacuuacaaugccgaacuccuuguacuguuggagaacgagcgcacccuagauuaucaugacagcaauguuaaaaaccuguacgaaaaggugcgaucacagcucaaaaacaaugcaaaggagaucggcaacggauguuuugaguucuaucacaagugcgauaauacauguauggagagugucaaaaacggcacuuacgacuauccuaaguacuccgaagaggccaaacugaauagagaggaaaucgauggggugaaacuugagagcaccaggauuuaucaaauccuggcuauuuacucuacagucgcgucaaguuuggugcucguugugagccugggagcaauauccuuuuggaugugcucuaacgguucguuacagugccggaucuguauuuga

SEQ ID NO: 137279 - RNA, 1701 nt, Artificial Sequence; identical to SEQ ID NO: 131070
  derived and/or modified CDS sequence (opt3) from hemagglutinin__InfluenzaA__AFN17919

SEQ ID NO: 137280 - RNA, 1701 nt, Artificial Sequence; identical to SEQ ID NO: 130959
  derived and/or modified CDS sequence (opt3) from hemagglutinin__InfluenzaA__AFN17929

SEQ ID NO: 137281 - RNA, 1701 nt, Artificial Sequence; identical to SEQ ID NO: 136975
  derived and/or modified CDS sequence (opt3) from hemagglutinin__InfluenzaA__AFN17939

SEQ ID NO: 137282 - RNA, 1701 nt, Artificial Sequence; identical to SEQ ID NO: 131578
  derived and/or modified CDS sequence (opt3) from hemagglutinin__InfluenzaA__AFN17949

SEQ ID NO: 137283 - RNA, 1701 nt, Artificial Sequence
  derived and/or modified CDS sequence (opt3) from hemagglutinin__InfluenzaA__AFN17959
augaaggccauccuggugguccuccuuuacaccuucgcuacagcaaacgccgacacucugugcauuggcuaucacgcgaauaacagcacggauaccguugacacaguguuggagaagaauguaacugugacccauuccgucaacuuacuggaagauaagcacaaugggaaacuauguaagcucagaggaguggcuccccugcaucuugguaaaugcaacauagccggcuggauccuggggaauccugagugugaaucuuugucaacagcaaguagcugguccuacauuguugagaccucuucgucagacaacggaacuugcuauccaggcgauuuuaucgacuacgaggagcucagggagcagcugagcaguguguccucuuucgaacgguuugagauuuucccgaagacaagcuccuggcccaaucacgauucaaacaagggugucaccgccgcuuguccucaugcaggggccaaaaguuuuuauaagaaucugaucuggcucgugaaaaagggaaacagcuacccaaaauuaucuaaguccuauguaaaugacaagggcaaagaaguucuggugcuuuggggcauacaccaccccucaacgagcgcugaucaacagaguuuguaccagaacgccgacgcguacgucuucguggggacuucucgcuauuccaagaaauuuaagccugagaucgcaauucgaccaaaagugcgugaucaggagggaagaaugaauuacuauuggacccuggucgaacccggugacaagaucacauucgaggccacuggcaaccuaguugugccuagguacgcuuuugccauggaacggaacgcagggagcggaauuaucauaucggauaccccaguacaugacugcaauacaaccugucaaacgccgaaaggcgcuauuaacacuucucuccccuuccagaauauccacccuauuacaaucgguaagugcccaaaguaugugaaauccaccaagcugcgccuugccacugggcugagaaacguccccucaauccagaguaggggauuguuuggcgcgauugccggcuucauagaagggggauggacagguaugguggacggcugguacggguaucaucaccagaaugaacaaggaagcggcuacgcagcugaucucaaauccacccagaacgccaucgacgagauuacgaauaagguuaacucugugaucgagaaaaugaauacccaguuuacagcugucgguaaggaguucaaccaccuggaaaagcggauagaaaauuuaaacaaaaagguggaugacggguuccuggauauuuggacuuacaaugccgagcuccuuguacuguuggaaaacgagcgcacccuagacuaucaugauagcaauguuaaaaaccuguacgagaaggugcgaucacagcucaaaaacaaugcaaaggaaaucggcaacggauguuuugaguucuaucacaagugcgacaauacauguauggaaagugucaaaaacggcacuuacgauuauccuaaguacuccgaggaagccaaacugaauagagaggagaucgacggggugaaacuugaaagcaccaggauuuaucaaauccuggcuauuuacucuacagucgcgucaaguuuggugcucguugugagccugggagcaauauccuuuuggaugugcucuaacgguucguuacagugccggaucuguauuuga

SEQ ID NO: 137284 - RNA, 1701 nt, Artificial Sequence; identical to SEQ ID NO: 132399
  derived and/or modified CDS sequence (opt3) from hemagglutinin__InfluenzaA__AFN17969

SEQ ID NO: 137285 - RNA, 1701 nt, Artificial Sequence; identical to SEQ ID NO: 131578
  derived and/or modified CDS sequence (opt3) from hemagglutinin__InfluenzaA__AFN17979

SEQ ID NO: 137286 - RNA, 1701 nt, Artificial Sequence
  derived and/or modified CDS sequence (opt3) from hemagglutinin__InfluenzaA__AFN17989
augaaggccauccuggugguccuccuuuacaccuucgcuacagcaaacgccgacacucugugcauuggcuaucacgcgaauaacagcacggauaccguugacacaguguuggagaaaaauguaacugugacccauuccgucaacuuacuggaagauaagcacaaugggaaacuauguaagcucagaggaguggcuccccugcaucuugguaaaugcaacauagccggcuggauccuggggaauccugagugugaaucuuugucaacagcaaguagcugguccuacauuguugagaccucuucgucagacaacggaacuugcuauccaggcgauuuuaucgacuacgaggagcucagggagcagcugagcaguguguccucuuucgaacgguuugagauuuucccgaagacaagcuccuggcccaaucacgauucaaacaagggugucaccgccgcuuguccucaugcaggggccaaaaguuuuuauaagaaucugaucuggcucgugaaaaagggaaacagcuacccaaaauuaucuaaguccuauauaaaugacaagggcaaagaaguacugguucuuuggggcauccaccaccccucaacgagcgcugaucaacagaguuuguaccagaacgccgacgcguacguguucgucgggacuucucgcuauuccaagaaauuuaagccugagauugcaauccgaccaaaagugcgugaucaggagggaagaaugaauuacuauuggacccugguggaacccggugacaagauuacauucgaggccacuggcaaccuagucguuccuagguacgcuuuugccauggaacggaacgcagggagcggaaucauaauuucggauaccccagugcaugacugcaauacaaccugucaaacgccgaaaggcgcuaucaacacuucucuccccuuccagaauauucacccuaucacaaucgguaagugcccaaaguauguaaaauccaccaagcugcgccuugccacugggcugagaaacgugcccucaauucagaguaggggauuguuuggcgcgauagccggcuucaucgaagggggauggacagguauggucgacggcugguacggguaucaucaccagaaugaacaaggaagcggcuacgcagcugaucucaaauccacccagaacgccauugacgagaucacgaauaaggugaacucuguuauagguaaaaugaauacccaguuuacagcuguggggaaggaguucaaccaccuggaaaagcggauugagaauuuaaacaaaaaggucgaugacggcuuccuggauaucuggacuuacaaugccgaacuccuugugcuguuggagaacgaacgcacccuagacuaucaugauagcaauguaaagaaccuguacgagaagguucgaucacagcucaaaaacaaugcaaaggagaucggaaacggcuguuuugaguucuaucacaagugcgacaauacauguauggaaagugugaaaaacgggacuuacgauuauccuaaguacuccgaagaggccaaacugaauagagaagagauugacggagucaaacuugagagcaccaggaucuaucaaauucuggcuauauacucuacaguggcgucaaguuugguccucgugguuagccugggugcaaucuccuuuuggaugugcucuaacggcucguuacagugccggauuuguaucuga

SEQ ID NO: 137287 - RNA, 1701 nt, Artificial Sequence; identical to SEQ ID NO: 130717
  derived and/or modified CDS sequence (opt3) from hemagglutinin__InfluenzaA__AFN17999

SEQ ID NO: 137288 - RNA, 1701 nt, Artificial Sequence
  derived and/or modified CDS sequence (opt3) from hemagglutinin__InfluenzaA__AFN18019
augaaggccauccuggugguccuccuuuacaccuucgcuacagcaaaagccgacacucugugcauuggcuaucacgcgaacaauagcacggauaccguugacacaguguuggagaagaacguaacugugacccauuccgucaauuuacuggaagauaaacacaacgggaagcuauguaaacucagaggaguggcuccccugcaucuugguaagugcaauauagccggcuggauccuggggaacccugagugugaaucuuugucaacagcaaguagcugguccuacauuguugagaccucuucgucagacaauggaacuugcuauccaggcgauuuuaucgacuacgaggagcucagggagcagcugagcaguguguccucuuucgaacgguuugagauguucccgaagacaagcuccuggcccaaccacgauucaaauaaaggugucaccgccgcuuguccucaugcaggggccaagaguuuuuauaaaaaccugauuuggcucgugaagaaaggaaauagcuacccaaaguuaucuaaguccuauaucaacgacaaaggcaaggaaguacugguucuuuggggcauacaccaccccucaacgagcgcugaucaacagaguuuguaccagaaugccgacgcguacguguucgucgggacuucucgcuauuccaaaaaguuuaaaccugagaucgcaauucgaccaaaggugcgugaucaggagggaagaaugaacuacuauuggacccugguggaacccggugacaaaaucacauucgaggccacuggcaaucuagucguuccuagguacgcuuuugccauggaacggaacgcagggagcggaauuaucauaucggauaccccagugcaugacugcaacacaaccugucaaacgccgaagggcgcuauuaauacuucucuccccuuccagaacauccacccuauuacaaucgguaagugcccaaaauauguaaaguccaccaaacugcgccuugccacugggcugagaaaugugcccucaauccagaguaggggauuguuuggcgcgauugccggcuucauagaagggggauggacagguauggucgacggcugguacggguaucaucaccagaacgaacaaggaagcggcuacgcagcugaucucaaguccacccagaaugccaucgacgagauuacgaacaaaguuaauucugugaucgagaagaugaacacccaguuuacagcuguggguaaggaguucaaucaccuggaaaaacggauagaaaacuuaaauaagaaagucgaugacggguuccuggauauuuggacuuacaacgccgagcuccuugugcuguuggaaaaugagcgcacccuagacuaucaugauagcaacguaaagaaucuguacgagaaaguucgaucacagcucaagaacaacgcaaaggaaaucggcaauggauguuuugaguucuaucacaaaugcgacaacacauguauggaaagugugaagaauggcacuuacgauuauccuaaauacuccgaggaagccaagcugaacagagaggagaucgacggggucaaacuugaaagcaccaggauuuaucaaauccuggcuauuuacucuacaguggcgucaaguuugguccucgugguuagccugggagcaauauccuuuuggaugugcucuaaugguucguuacagugccggaucuguauuuga

SEQ ID NO: 137289 - RNA, 1701 nt, Artificial Sequence; identical to SEQ ID NO: 131578
  derived and/or modified CDS sequence (opt3) from hemagglutinin__InfluenzaA__AFN18039

SEQ ID NO: 137290 - RNA, 1701 nt, Artificial Sequence; identical to SEQ ID NO: 130717
  derived and/or modified CDS sequence (opt3) from hemagglutinin__InfluenzaA__AFN18049

SEQ ID NO: 137291 - RNA, 1701 nt, Artificial Sequence
  derived and/or modified CDS sequence (opt3) from hemagglutinin__InfluenzaA__AFN18059
augaaggccauccuggugguccuccuuuacaccuucgcuacagcaaacgccgacacucugugcauuggcuaucacgcgaauaacagcacggauaccguugacacaguguuggagaaaaauguaacugugacccauuccgucaacuuacuggaagauaagcacaaugggaaacuauguaagcucagaggaguggcuccccugcaucuugguaaaugcaacauagccggcuggauccuggggaauccugagugugaaucuuugucaacagcaaguagcugguccuacauuguugagaccucuucgucagacaacggaacuugcuauccaggcgauuuuaucgacuacgaggagcucagggagcagcugagcaguguguccucuuucgaacgguuugagauuuucccgaagacaagcuccuggcccaaucacgauucaaacaagggugucaccgccgcuuguccucaugcaggggccaaaaguuuuuauaagaaucugaucuggcucgugaaaaagggaaacagcuacccaaaauuaucuaaguccuauauaaaugacaagggcaaagaaguacugguucuuuggggcauccaccaccccucaacgagcgcugaucaacagaguuuguaccagaacgccgacgcguacguguucgucgggacuucucgcuauuccaagaaauuuaagccugagauugcaauccgaccaaaagugcgugaucaggagggaagaaugaauuacuauuggacccugguggaacccggugacaagauuacauucgaggccacuggcaaccuagucguuccuagguacgcuuuugccauggaacggaacgcagggagcggaaucauaauuucggauaccccagugcaugacugcaauacaaccugucaaacgccgaaaggcgcuaucaacacuucucuccccuuccagaauauucacccuaucacaaucgguaagugcccaaaguauguaaaauccaccaagcugcgccuugccacugggcugagaaacgugcccucaauucagaguaggggauuguuuggcgcgauagccggcuucaucgaagggggauggacagguauggucgacggcugguacggguaucaucaccagaaugaacaaggaagcggcuacgcagcugaucucaaauccacccagaacgccauugacgagaucacgaauaaggugaacucuguuauagagaaaaugaauacccaguuuacagcuguggguaaggaguucaaccaccuggaaaagcggauugaaaauuuaaacaaaaaggucgaugacggguuccuggauaucuggacuuacaaugccgagcuccuugugcuguuggaaaacgagcgcacccuagacuaucaugauagcaauguaaagaaccuguacgagaagguucgaucacagcucaaaaacaaugcaaaggaaaucggcaacggauguuuugaguucuaucacaagugcgacaaugccuguauggaaagugugaaaaacggcacauacgauuauccuaaguacuccgaggaagcuaaacugaauagagaggagauugacggggucaaacuugaaagcacuaggaucuaucaaauucuggcgauauacucuaccguggcaucaaguuugguccucgugguuagccugggagccaucuccuuuuggaugugcucuaacgguucguuacagugccggauuuguaucuga

SEQ ID NO: 137292 - RNA, 1701 nt, Artificial Sequence; identical to SEQ ID NO: 130717
  derived and/or modified CDS sequence (opt3) from hemagglutinin__InfluenzaA__AFN18078

SEQ ID NO: 137293 - RNA, 1701 nt, Artificial Sequence
  derived and/or modified CDS sequence (opt3) from hemagglutinin__InfluenzaA__AFN18088
augaaggccauccuggugguccuccuuuacaccuucgcuacagcaaacgccgacacucugugcauuggcuaucacgcgaauaacagcacggauaccguugacacaguguuggagaagaauguaacugugacccauuccgucaacuuacuggaagauaagcacaaugggaaacuauguaagcucagaggaguggcuccccugcaucuugguaaaugcaacauagccggcuggauccuggggaauccugagugugaaucuuugucaacagcaaguagcugguccuacauuguugagaccucuucgucagacaacggaacuugcuauccaggcgauuuuaucgacuacgaagaacucagggagcagcugagcaguguguccucuuucgaacgguuugagauuuucccgaagacaagcuccuggcccaaucacgauucaaacaagggugucaccgccgcuuguccucaugcaggggccaaaaguuuuuauaagaaucugaucuggcucgugaaaaagggaaacagcuacccaaaauuaucuaaguccuauauaaaugacaagggcaaagaaguacugguucuuuggggcauccaccaccccucaacgagcgcugaucaacagaguuuguaccagaacgccgacacuuacguguucgucgggaccucucgcuauuccaagaaauuuaagccugagauugcgauccgaccaaaagugcgugaucaggagggaagaaugaauuacuauuggacacugguggaacccggugacaagauuacuuucgaggcaaccggcaaccuagucguuccuagguacgccuuugcuauggugcggaacgccgggagcggaaucauaauuucggauacaccaguacaugacugcaauaccacgugucaaacuccgaaaggcgcaaucaacacaucucuccccuuccagaauauucacccuaucaccaucgguaagugcccaaaguaugugaaauccacuaagcugcgccuugcuacagggcugagaaacguccccucaauucagaguaggggauuguuuggcgccauagcgggcuucaucgaagggggauggaccgguaugguggacggcugguacggguaucaucaccagaaugagcaaggaagcggcuacgccgcagaucucaaauccacgcagaacgcuauugacgaaaucaccaauaagguuaacucugugauagagaaaaugaauacacaguuuacugccgucgguaaggaguucaaccaccuggaaaagcggauugagaauuuaaacaaaaagguggaugacggguuccuggauaucuggaccuacaaugcugaacuccuuguacuguuggagaacgaacgcacacuagacuaucaugauagcaauguuaaaaaccuguacgagaaggugcgaucacagcucaaaaacaaugccaaggagaucggcaacggauguuuugaguucuaucacaagugcgacaauacuuguauggagagugucaaaaacggcaccuacgauuauccuaaguacuccgaagaggcaaaacugaauagagaagagauugacggggugaaacuugagagcacaaggaucuaucaaauucuggccauauacucuaccgucgcuucaaguuuggugcucguugugagccugggagcgaucuccuuuuggaugugcucuaacgguucguuacagugccggauuuguaucuga

SEQ ID NO: 137294 - RNA, 1701 nt, Artificial Sequence
  derived and/or modified CDS sequence (opt3) from hemagglutinin__InfluenzaA__AFN18098
augaaggccauccuggugguccuccuuuacaccuucgcuacagcaaacgccgacacucugugcauuggcuaucacgcgaauaacagcacggauaccguugacacaguguuggagaagaauguaacugugacccauuccgucaacuuacuggaagauaagcacaaugggaaacuauguaagcucagaggaauagcuccccugcaucuugguaaaugcaacaucgccggcuggauucuggggaauccugagugugaaucuuugucaacagcaaguagcugguccuacaucguggagaccucuucgucagacaacggaacuugcuauccaggcaauuuuauugauuacgaggagcucagggagcagcugagcaguguuuccucuuucgaacgguuugagaucuucccgaagacaagcuccuggcccaaccacgacucaaauaagggugugaccgccgcuuguccucaugcaggggccaaaaguuuuuauaagaaccugauauggcucgucaaaaagggaaauagcuacccaaaauuaucuaaguccuauaucaacgauaagggcaaagaagugcugguacuuuggggcauucaccaccccucaacgagcgcugaccaacagaguuuguaccagaaugccgaugcguacguuuucguggggacuucucgcuauuccaagaaauuuaagccugagaucgcaauucgaccaaaaguccgugaccaggagggaagaaugaacuacuauuggacccugguggaacccggugauaagaucacauucgaggccacuggcaaccuaguggucccuagguacgcuuuugccguugaacggaaugcagggagcggaauaauuaucucggacaccccagugcaugauugcaacacaaccugucaaacgccgaaaggcgcuauuaauacuucucuccccuuccagaacauccacccuaucacaauugguaagugcccaaaguauguaaaauccaccaagcugcgccuugccacugggcugagaaaugugcccucaauacagaguaggggauuguuuggcgcgaucgccggcuucauugaagggggauggacagguauggucgacggcugguacggguaucaucaccagaacgaacaaggaagcggcuacgcagcugaccucaaauccacccagaaugccaucgaugagauaacgaacaagguaaauucuguuauugagaaaaugaacacccaguuuacagcuguggguaaggaguucaaucaccuggaaaagcggaucgaaaacuuaaauaaaaaggucgacgauggguuccuggacaucuggacuuacaacgccgagcuccuugugcuguuggaaaaugagcgcacccuagauuaucaugacagcaacgugaaaaaccuguacgagaagguucgaucacagcucaaaaauaacgcaaaggaaauuggcaauggauguuuugaguucuaucacaagugcgauaacacauguauggaaagugugaaaaauggcacuuacgacuauccuaaguacuccgaggaagccaaacugaacagagaggagaucgauggggucaaacuugaaagcaccaggauuuaucaaauacuggcuaucuacucuacaguggcgucaaguuugguccucgugguuagccugggagcaauuuccuuuuggaugugcucuaaugguucguuacagugccggaucuguaucuga

SEQ ID NO: 137295 - RNA, 1701 nt, Artificial Sequence
  derived and/or modified CDS sequence (opt3) from hemagglutinin__InfluenzaA__AFN18105
augaaggccauccugauugugcuccuuuacaccuucgcuacagcaaacgccgacacucugugcauaggcuaucacgcgaauaacagcacggauaccgucgacacaguuuuggagaagaaugugacuguaacccauuccgugaacuuacuggaagauaagcacaaugggaaacuauguaagcucagaggagucgcuccccugcaucuugguaaaugcaacaucgccggcuggauucuggggaauccugagugugaaucuuugucaacagcaaguagcugguccuacaucguggagaccucuucgucagacaacggaacuugcuauccaggcgauuuuauugacuacgaggagcucagggagcagcugagcaguguuuccucuuucgaacgguuugagaucuucccgaagacaagcuccuggcccaaucacgauucaaacaagggugugaccgccgcuuguccucaugcaggggccaaaaguuuuuauaagaaucugauauggcucgucaaaaagggaaacagcuacccaaaauuaucuaaguccuauaucaaugacaagggcaaagaagugcugguacuuuggggcauucaccaccccucaacgagcgcugaucaacagaguuuguaccagaacgccgacgcguacguuuucguggggacuucucgcuauuccaagaaauuuaagccugagaucgcaauucgaccaaaaguccgugaucaggagggaagaaugaauuacuauuggacccugguggaacccggugacaagaucacauucgaggccacuggcaaccuaguggucccuagguacgcuuuugccauggaacggaacgcagggagcggaauaauuaucucggauaccccaguucaugacugcaauacaaacugucaaaccccgaaaggcgcuauuaauacgucucuccccuuccagaacauccacccuaucacuauugguaagugcccaaaguaugugaaauccacaaagcugcgccuugccaccgggcugagaaauguacccucaauacagaguaggggauuguuuggcgcgaucgccggcuucauugaagggggauggacugguaugguggacggcugguacggguaucaucaccagaacgaacaaggaagcggcuacgcagcugaucucaaauccacacagaaugccaucgacgagauaaccaacaaggucaauucugugauugagaaaaugaacacgcaguuuaccgcuguugguaaggaguucaaucaccuggaaaagcggaucgaaaacuuaaauaaaaagguggaugacggguuccuggauaucuggacauacaacgccgagcuccuuguccuguuggaaaaugagcgcacucuagacuaucaugauagcaacgugaaaaaccuguacgagaagguacgaucacagcucaaaaauaacgcaaaggaaauuggcaauggauguuuugaguucuaucacaagugcgacaacaccuguauggaaaguguuaaaaauggcacauacgauuauccuaaguacuccgaggaagccaaacugaacagagaggagaucgacggggugaaacuugaaagcacuaggauuuaucaaauacuggcuaucuacucuaccgucgcgucaaguuuggugcucgucgugagccugggagcaauuuccuuuuggaugugcucuaaugguucguuacagugccggaucuguaucuga

SEQ ID NO: 137296 - RNA, 1701 nt, Artificial Sequence; identical to SEQ ID NO: 130959
  derived and/or modified CDS sequence (opt3) from hemagglutinin__InfluenzaA__AFN18107

SEQ ID NO: 137297 - RNA, 1701 nt, Artificial Sequence; identical to SEQ ID NO: 137291
  derived and/or modified CDS sequence (opt3) from hemagglutinin__InfluenzaA__AFN18117

SEQ ID NO: 137298 - RNA, 1701 nt, Artificial Sequence; identical to SEQ ID NO: 130717
  derived and/or modified CDS sequence (opt3) from hemagglutinin__InfluenzaA__AFN18119

SEQ ID NO: 137299 - RNA, 1701 nt, Artificial Sequence
  derived and/or modified CDS sequence (opt3) from hemagglutinin__InfluenzaA__AFN18121
augaaggccauccuggugguccuccuuuacaccuucgcuacagcaaacgccgacacucugugcauuggcuaucacgcgaauaacagcacggauaccguugacacaguguuggagaaaaauguaacugugacccauuccgucaacuuacuggaagauaagcacaaugggaaacuauguaagcucagaggaguggcuccccugcaucuugguaaaugcaacauagccggcuggauccuggggaauccugagugugaaucuuugucaacagcaaguagcugguccuacauuguugagaccucuucgucagacaacggaacuugcuauccaggcgauuuuaucgacuacgaagaacucagggagcagcugagcaguguguccucuuucgaacgguuugagauuuucccgaagacaagcuccuggcccaaucacgauucaaacaagggugucaccgccgcuuguccucaugcaggggcccgcaguuuuuauaaaaaucugaucuggcucgugaagaaaggaaacagcuacccaaaguuaucuaaauccuauauaaaugacaagggcaaggaaguacugguucuuuggggcauccaccaccccucaacgagcgcugaucaacagaguuuguaccagaacgccgacgcguacguguucgucgggacuucucgauauuccaaaaaguuuaaaccugagauugcaauccguccaaaggugagagaucaggagggaaggaugaauuacuauuggacccugguggaacccggugacaaaauuacauucgaggccacuggcaaccuagucguuccucgguacgcuuuugccauggugcgcaacgcagggagcggaaucauaauuucggauaccccaguacaugacugcaauacaaccugucaaacgccgaagggcgcuaucaacacuucucuccccuuccagaauauucacccuaucacaaucgguaaaugcccaaaguaugugaaguccaccaaacugagacuugccacugggcugaggaacguccccucaauucagagucggggauuguuuggcgcgauagccggcuucaucgaagggggauggacagguaugguggacggcugguacggguaucaucaccagaaugagcaaggaagcggcuacgcagcugaucucaaguccacccagaacgccauugacgaaaucacgaauaaaguuaacucugugauagagaagaugaauacccaguuuacagcugucgguaaagaguucaaccaccuggaaaagcgcauugagaauuuaaacaagaaaguggaugacggguuccuggauaucuggacuuacaaugccgaacuccuuguacuguuggagaacgaacgaacccuagacuaucaugauagcaauguuaagaaccuguacgagaaagugagaucacagcucaagaacaaugcaaaagagaucggcaacggauguuuugaguucuaucacaagugcgacaauacauguauggagagugucaagaacggcacuuacgauuauccuaaauacuccgaagaggccaagcugaauagggaagagauugacggggugaaacuugagagcacccggaucuaucaaauucuggcuauauacucuacagucgcgucaaguuuggugcucguugugagccugggagcaaucuccuuuuggaugugcucuaacgguucguuacagugccguauuuguaucuga

SEQ ID NO: 137300 - RNA, 1701 nt, Artificial Sequence; identical to SEQ ID NO: 137291
  derived and/or modified CDS sequence (opt3) from hemagglutinin__InfluenzaA__AFN18133

SEQ ID NO: 137301 - RNA, 1701 nt, Artificial Sequence; identical to SEQ ID NO: 136975
  derived and/or modified CDS sequence (opt3) from hemagglutinin__InfluenzaA__AFN18135

SEQ ID NO: 137302 - RNA, 1701 nt, Artificial Sequence; identical to SEQ ID NO: 131559
  derived and/or modified CDS sequence (opt3) from hemagglutinin__InfluenzaA__AFN18137

SEQ ID NO: 137303 - RNA, 1701 nt, Artificial Sequence
  derived and/or modified CDS sequence (opt3) from hemagglutinin__InfluenzaA__AFN18139
auggaggccauccuggugguccuccuuuacaccuucgcuacagcaaacgccgacacucugugcauuggcuaucacgcgaauaacagcacggauaccguugacacaguguuggaaaagaauguaacugugacccauuccgucaacuuacuggaggauaaacacaaugggaagcuauguaaacucagaggaguggcuccccugcaucuugguaagugcaacauagccggcuggauccuggggaauccugaaugugagucuuugucaacagcaaguagcugguccuacauuguugaaaccucuucgucagacaacggaacuugcuauccaggcgauuuuaucgacuacgaggagcucagggaacagcugagcaguguguccucuuucgagcgguuugaaauuuucccgaaaacaagcuccuggcccaaucacgauucaaacaagggugucaccgccgcuuguccucaugcaggggccaagaguuuuuauaaaaaucugaucuggcucgugaagaaaggaaacagcuacccaaaguuaucuaaauccuauauaaaugacaagggcaaggagguacugguucuuuggggcauccaccaccccucaacgagcgcugaucaacagggguuguaccagaacgccgacgcguacguguucgucggaaguucucgcuauuccaaaaaguuuaaaccugagauugcaauccgaccaaaggugcgugaucaggaagguagaaugaauuacuauuggacucugguggagcccggcgacaaaauuaccuucgaagccacagggaaccuagucguuccuagguacgcuuuugccauggagcggaacgcaggaagcggcaucauaauuucggauacuccagugcaugacugcaauaccacaugucaaaccccgaagggugcuaucaacacgucucuccccuuccacaauauucauccuaucacuaucgggaaaugcccaaaguauguaaaguccacaaaacugcgccuugccaccggacugagaaacgugcccucaauucagaguaggggcuuguuuggcgcgauagccggguucaucgaaggagguuggacuggcauggucgacgggugguacggauaucaccaccagaaugagcagggcagcgguuacgcagcugaucucaaguccacacaaaacgccauugacgagaucaccaauaaagugaacucuguuauagaaaagaugaauacgcaguuuaccgcuguggggaaagaguucaaccaucuggaaaagcggauugagaauuuaaacaagaaagucgaugacggcuuccuggauaucuggacauacaaugccgaacuccuugugcuguuggagaacgagcgcacucuagacuaucacgauagcaauguaaagaaccuguacgaaaaaguucgaucacagcucaagaacaaugcaaaagagaucggaaacggcuguuuugaguucuaucauaagugcgacaauaccuguauggaaagugugaagaacgggacauacgauuauccuaaauacuccgaagaggccaagcugaauagagaggaaauugacggagucaaacuugagagcacuaggaucuaucagauucuggcuauauacucuaccguggcgucaaguuugguccucgugguuagccugggugcaaucuccuuuuggaugugcucuaacggcucguuacaaugccggauuuguaucuga

SEQ ID NO: 137304 - RNA, 1701 nt, Artificial Sequence; identical to SEQ ID NO: 137299
  derived and/or modified CDS sequence (opt3) from hemagglutinin__InfluenzaA__AFN18141

SEQ ID NO: 137305 - RNA, 1701 nt, Artificial Sequence; identical to SEQ ID NO: 131578
  derived and/or modified CDS sequence (opt3) from hemagglutinin__InfluenzaA__AFN18148

SEQ ID NO: 137306 - RNA, 1701 nt, Artificial Sequence; identical to SEQ ID NO: 131881
  derived and/or modified CDS sequence (opt3) from hemagglutinin__InfluenzaA__AFN18155

SEQ ID NO: 137307 - RNA, 1701 nt, Artificial Sequence
  derived and/or modified CDS sequence (opt3) from hemagglutinin__InfluenzaA__AFN18157
augaaggccauccuggugguccuccuuuacaccuucgcuacagcaaacgccgacacucugugcauuggcuaucacgcgaauaacagcacggauaccguugacacaguguuggagaagaauguaacugugacccauuccgucaacuuacuggaagauaagcacaaugggaaacuauguaagcucagaggaguggcuccccugcaucuugguaaaugcaacauagccggcuggauccuggggaauccugagugugaaucuuugucaacagcaaguagcugguccuacauuguugagaccucuucgucaggaaacggcacuugcuauccaggugacuuuaucgauuacgaagaacucagggagcagcugagcaguguguccucuuucgaacgguuugagauuuucccgaagacaagcuccuggcccaaucacgacucaaacaagggggucaccgccgcuuguccucaugcaggagccaaaaguuuuuauaagaaucugaucuggcucgugaaaaagggcaacagcuacccaaaauuaucuaaguccuauauaaaugauaagggcaaagaaguacugguucuuugggggauccaccaccccucaacgagcgcugaccaacagaguuuguaccagaacgccgaugcguacgcauucgugggaacuucucgcuauuccaagaaauuuaagccugagauugccauccgaccaaaaguccgugaccaggaggguagaaugaauuacuauuggacccugguggaacccggcgauaagauuacauucgaggcuacugggaaccuaguggucccuagguacgccuuugcaauggaacggaacgcuggaagcggcaucauaauuucggacaccccaguucaugauugcaauacaaccugucaaacgccgaaaggugccaucaacacuucucuccccuuccagaauauucacccuaucacaaucgggaagugcccaaaguaugugaaauccaccaagcugcgccuugcgacuggacugagaaacguacccucaauucagaguaggggcuuguuuggcgccauagcaggguucaucgagggagguuggacaggcaugguggacgggugguacggauaucaucaccagaaugaacaaggcagcgguuacgcugccgaccucaaauccacccagaacgcuauugaugagaucacgaauaaggucaacucugugauagagaaaaugaauacccaguuuacagccguugggaaggaguucaaccaccuggagaagcggauugaaaauuuaaacaaaaagguggacgauggcuuccuggacaucuggacuuacaaugcagagcuccuuguccuguuggaaaacgagcgcacccuagauuaucaugacagcaaugugaaaaaccuguacgagaagguacgaucacagcucaaaaacaaugccaaggaaaucggaaacggcuguuuugaguucuaucacaagugcgauaauacauguauggaaaguguuaaaaacgggacuuacgacuauccuaaguacuccgaggaagcuaaacugaauagagaggagauugauggagugaaacuugaaagcaccaggaucuaucaaauucuggcgauauacucuacagucgcaucaaguuuggugcucgucgugagccugggugccaucuccuuuuggaugugcucuaacggcucguuacagugccggauuuguaucuga

SEQ ID NO: 137308 - RNA, 1701 nt, Artificial Sequence
  derived and/or modified CDS sequence (opt3) from hemagglutinin__InfluenzaA__AFN18159
auggaggccauccuggugguccuccuuuacaccuucgcuacagcaaacgccgacacucugugcauuggcuaucacgcgaauaacagcacggauaccguugacacaguguuggaaaagaauguaacugugacccauuccgucaacuuacuggaggauaaacacaaugggaagcuauguaaacucagaggaguggcuccccugcaucuugguaagugcaacauagccggcuggauccuggggaauccugaaugugagucuuugucaacagcaaguagcugguccuacauuguugaaaccucuucgucagacaacggaacuugcuauccaggcgauuuuaucgacuacgaggagcucagggaacagcugagcaguguguccucuuucgagcgguuugaaauuuucccgaaaacaagcuccuggcccaaucacgauucaaacaagggugucaccgccgcuuguccucaugcagggaguaagagcuuuuauaaaaaucugaucuggcucgugaagaaaggaaacucuuacccaaaguuauccaaaucauauauaaaugacaagggcaaggagguacugguucuuuggggcauccaccaccccagcacgagugccgaucaacagucuuuguaccagaacgcugacgccuacguguucgucggguccagccgcuauucgaaaaaguuuaaaccugagauugcgauccgaccaaaggugcgugaucaggaaggaagaaugaauuacuauuggacucugguggagcccggugacaaaauuaccuucgaagcaacaggcaaccuagucguuccuagguacgccuuugcuauggagcggaacgccgggucuggaaucauaauuuccgauacuccagugcaugacugcaauaccacaugucaaaccccgaagggcgcaaucaacacgucacuccccuuccacaauauucauccuaucacuaucgguaaaugcccaaaguauguaaagaguacaaaacugcgccuugcuaccgggcugagaaacgugcccagcauucaguccaggggauuguuuggcgccauagcgggcuucaucgaagggggauggacugguauggucgacggcugguacggguaucaccaccagaaugagcagggaucuggcuacgccgcagaucucaagagcacacaaaacgcuauugacgagaucaccaauaaagugaacucaguuauagaaaagaugaauacgcaguuuaccgccguggguaaagaguucaaccaucuggaaaagcggauugagaauuuaaacaagaaagucgaugacggguuccuggauaucuggacauacaaugcugaacuccuugugcuguuggagaacgagcgcacucuagacuaucacgauaguaauguaaagaaccuguacgaaaaaguucgaaaccagcucaagaauaacgccaaagagaucggcaauggauguuuugaguucuaucauaagugcgacaacaccuguauggaauccgugaagaauggcacauacgauuauccuaaauacagcgaagaggcaaagcugaacagagaggaaauugacggggucaaacuugagucuacuaggaucuaucagauucuggccauauacucaaccguggcuaguagcuugguccucgugguuucccugggagcgaucucuuuuuggaugugcucgaaugguagcuuacaaugccggauuuguaucuga

SEQ ID NO: 137309 - RNA, 1701 nt, Artificial Sequence
  derived and/or modified CDS sequence (opt3) from hemagglutinin__InfluenzaA__AFN18164
augaaggccauccuggugguccuccuuuacaccuucgcuacaacuaacgcagacacgcugugcauuggcuaucacgccaauaacagcaccgauacaguugacacuguguuggagaaaaauguaaccgugacacauuccgucaacuuacuggaagauaagcacaaugggaaacuauguaagcucagaggaguggcgccccugcaucuugguaaaugcaacauagcuggcuggauccuggggaauccugagugugaaucuuugucaaccgccaguagcugguccuacauuguugagacuucuucgucagacaacggaacaugcuauccaggcgauuuuaucgacuacgaggagcucagggagcagcugagcaguguguccucuuucgaacgguuugagauuuucccgaagaccagcuccuggcccaaucacgauucaaacaagggugucacggcagccuguccucaugcuggggcaaaaaguuuuuauaagaaucugaucuggcucgugaaaaagggaaacagcuacccaaaauuaucuaaguccuauauaaaugacaagggcaaagaaguacugguucuuuggggcauccaccaccccucaacuagcgccgaucaacagaguuuguaccagaacgcugacgccuacguguucgucgggaccucucgcuauuccaagaaauuuaagccugagauugcgauccgaccaaaagugcgugaucaggagggaagaaugaauuacuauuggacacugguggaacccggugacaagauuacuuucgaggcaaccggcaaccuaaucgucccuagguacgccuuugcuauggaacggaacgccgggagcggaauaauuaucucgaauacaccaguucaugauugcaacaccacgugucaaacuccgaaaggcgcaauuaauacaucucuccccuuccagaacauccacccuaucaccauugguaagugcccaaaguaugugaaauccacuaagcugcgccuugcuacagggcugagaaauguacccucaauacagaguaggggauuguuuggcgccaucgcgggcuucauugaagggggauggaccgguaugguggacggcugguacggguaucaucaccagaacgaacaaggaagcggcuacgccgcagaccucaaauccacgcagaaugcuaucgauaagauaaccaacaaagucaauucugugauugagaagaugaacacacaguuuacugccguugguaaggagcugaaucacuuagaaaaacggaucgagaaccugaauaagaaaguggacgauggguuccucgacaucuggaccuacaacgcugaacuucuggucuugcuagagaaugaacgcacacuggauuaucaugacagcaacgugaagaaccucuacgagaaaguacgaucacagcugaagaauaacgccaaggagauuggcaauggauguuucgaauuuuaucacaaaugcgauaacacuuguauggagaguguuaagaauggcaccuacgacuauccuaaauacuccgaagaggcaaaacuuaacagagaagagaucgauggggugaagcuggagagcacaaggauuuaucaaauauuggccgucuacucuaccguggcuucaagucucguccuggugguuagcuuaggagcgaucuccuucuggaugugcucuaaugguucgcugcagugccggauuuguaucuga

SEQ ID NO: 137310 - RNA, 1701 nt, Artificial Sequence
  derived and/or modified CDS sequence (opt3) from hemagglutinin__InfluenzaA__AFN18171
augaaggccauccuggugguccuccuuuacaccuucgcuacagcaaacgccgacacucugugcauuggcuaucacgcgaauaacagcacggauaccguugacacaguguuggagaagaauguaacugugacccauuccgucaacuuacuggaagauaagcacucugggaaacuauguaagcucagaggaguggcuccccugcaucuugguaaaugcaauauagccggcuggauccuggggaacccugagugugaaucauugaguacagcaagcuccuggucuuacauuguugagaccucgucaagcgacaauggaaagugcuauccaggcgauuuuaucgacuacgaggagcucagggagcagcugaguuccgugucuagcuucgaacgguuugagauuuucccgaagacuuccucauggcccaaccacgauaguaauaaaggugucacagccgcuuguccucaugcaggggccaagagcuuuuauaaaaaccugaucuggcucgugaagaaaggaaauucuuacccaaaguuauccaagucauauauaaacgacaaaggcaaggaaguacugguucuuuggggcauccaccaccccagcaccagugcugaucaacagucuuuguaccagaaugccgacgcguacguguucgucgggacguccaaauauagcaagaaauuuaagccugagauugcaauccgcccaaaagugcgagaucaggagggacguaugaacuacuauuggacucugguggaacccggugacaagauuaccuucgaggccacaggcaaucuagucguuccuagauacgcuuuugccauggaaaggaacgcagggucgggaaucauaauuucugauacuccagugaaggacugcaacaccacaugucaaaccccgaaaggcgcuaucaauacgucccuccccuuccagaacauucauccuaucacuaucgguaagugcccaaaauauguaaagucaacaaaacugcggcuugccaccgggcugcgcaaugugcccaguauucagagcagaggauuguuuggcgcgauagccggcuucaucgaagggggauggacugguauggucgacggcugguacggguaucaccaucagaacgaacaaggauccggcuacgcagcugaucucaagucuacacagaaugccauugacgagaucaccaacaaggugaauagcguuauagagaaaaugaacacgcaguuuaccgcuguggguaaggaauuuaaucaccuggagaaaaggauugaaaacuuaaauaagaaagucgaugacggguuccuggauaucuggacauacaacgccgagcuccuugugcuguuggaaaaugagcggacucuagacuaucacgauucaaacguaaagaaucuguacgagaagguucgcagucagcucaaaaacaacgcaaaggaaaucggcaauggauguuucgaguucuaucauaaaugcgacaacaccuguauggaauccgugaagaauggcacauacgauuauccuaaauacagcgaggaagccaagcugaaccgagaggagauugacggggucaaacuugaaucuacuagaaucuaucaaauucuggcuauauacucaaccguggcgaguagcuugguccucgugguuucccugggagcaaucucuuuuuggaugugcucgaaugguagcuuacagugcaggauuuguaucuga

SEQ ID NO: 137311 - RNA, 1701 nt, Artificial Sequence
  derived and/or modified CDS sequence (opt3) from hemagglutinin__InfluenzaA__AFN18176
augaaggccauccuggugguccuccuuuacaccuucgcuacagcaaacgccgacacucugugcauuggcuaucacgcgaauaacagcacggauaccguugacacaguguuggagaaaaauguaacugugacccauuccgucaacuuacuggaagauaagcacaaugggaaacuauguaagcucagaggaguggcuccccugcaucuugguaaaugcaacauagccggcuggauccuggggaauccugagugugaaucuuugucaacagcaaguagcugguccuacauuguugagaccucuucgucagacaacggaacuugcuauccaggcgauuuuaucgacuacgaggagcucagggagcagcugagcaguguguccucuuucgaacgguuugagauuuucccgaagacaagcuccuggcccaaucacgauucaaacaagggugucaccgccgcuuguccucaugcaggggccaaaaguuuuuauaagaaucugaucuggcucgugaaaaagggaaacagcuacccaaaauuaucuaaguccuauauaaaugacaagggcaaagaaguacugguucuuuggggcauccaccaccccucaacgagcgcugaucaacagaguuuguaccagaacgccgacgcguacguguucgucgggacuucucgcuauuccaagaaauuuaagccugagauugcaauccgaccaaaagugcgugaucaggagggaagaaugaauuacuauuggacccugguggaacccggugacaagauuacauucgaggccacuggcaaccuacucgucccuagguacgcuuuugccauggaacggaacgcagggagcggaaucauaauuucggauaccccaguucaugacugcaauacaaccugucaaacgccgaaaggcgcuaucaacacuucucugcccuuccagaauauucacccuaucacaaucgguaagugcccaaaguaugugaaauccaccaaacuucgccuggccacuggguugagaaacauucccucaauacagaguaggggacucuuuggcgcgaucgccggcuucauugaagggggauggacagguaugguagacggcugguacggguaucaucaccagaaugaacaaggaagcggcuacgcagcugaucugaaauccacccagaacgccaucgacgagauaacgaauaaggugaacucugucauugagaaaaugaauacccaguuuacagcuguggguaaggaguucaaccacuuagaaaagcggaucgaaaaucugaacaaaaagguugaugacggguuccucgauaucuggacuuacaaugccgagcuucugguguugcuagaaaacgagcgcacccuggacuaucaugauagcaaugucaaaaaccucuacgagaaggugcgaucacagcugaaaaacaaugcaaaggaaauuggcaacggauguuuugaguucuaucacaagugcgacaauacauguauggaaaguguaaagaacggcacuuacgauuauccuaaguacuccgaggaagccaaacuuaauagagaggagaucgacgggguuaagcuggaaagcaccaggauuuaucaaauauuggcuaucuacucuacaguggcgucaagucucguccugguggucagcuuaggagcaauuuccuuuuggaugugcucuaacgguucgcugcagugccggaucuguaucuga

SEQ ID NO: 137312 - RNA, 1701 nt, Artificial Sequence
  derived and/or modified CDS sequence (opt3) from hemagglutinin__InfluenzaA__AFN18183
augaaggccauccuggugguccuccuuuacaccuucgcuacagcaaacgccgacacucugugcauuggcuaucacgcgaauaacagcacggauaccguugacacaauauuggagaaaaaugugacuguaacccauuccgugaacuuacuggaagauaagcacaaugggaaacuauguaagcucagaggagucgcuccccugcaucuugguaaaugcaacaucgccggcuggauucuggggaauccugagugugaaucuuugucaacagcaaguagcugguccuacaucguggagaccucuucgucagacaacggaacuugcuauccaggcgauuuuauugacuacgaggagcucagggagcagcugagcaguguuuccucuuucgaacgguuugagaucuucccgaagacaagcuccuggcccaaucacgauucaaacaagggugugaccgccgcuuguccucaugcaggggccaaaaguuuuuauaagaaucugauauggcucgucaaaaagggaaacagcuacccaaaauuaucuaaguccuauaucaaugacaagggcaaagaagugcugguacuuuggggcauucaccaccccucaacgagcgcugaucaacagaguuuguaccagaacgccgacgcguacguuuucguggggacuucucgcuauuccaagaaauuuaagccugagaucgcaauucgaccaaaaguccgugaucaggagggaagaaugaauuacuauuggacccugguggaacccggugacaagaucacauucgaggccacuggcaaccuaauggugccuagguacgcuuuugccauggaacggaacgcagggagcggaauaauuaucucggauaccccaguccaugacugcaauacaaccugucaaacgccgaaaggcgcuauuaacacuucucuccccuuccagaauauccacccuaucacaauugguaagugcccaaaguauguuaaauccaccaagcugcgccuugccacugggcugagaaacgugcccucaauacagaguaggggauuguuuggcgcgaucgccggcuucauugaagggggauggacagguaugguagacggcugguacggguaucaucaccagaaugaacaaggaagcggcuacgcagcugaucucaaauccacccagaacgccaucgacgagauaacgaauaaggugaacucugucauugagaaaaugaauacccaguuuacagcuguggguaaggaguucaaccaccuggaaaagcggaucgaaaauuuaaacaaaaagguugaugacggguuccuggauaucuggacuuacaaugccgagcuccuugugcuguuggaaaacgagcgcacccuagacuaucaugauagcaaugucaaaaaccuguacgagaaggugcgaucacagcucaaaaacaaugcaaaggaaauuggcaacggauguuuugaguucuaucacaagugcgacaauacauguauggaaaguguaaagaacggcacuuacgauuauccuaaguacuccgaggaagccaaacugaauagagaggagaucgacgggguuaaacuugaaagcaccaggauuuaucaaauacuggcuaucuacucuacaguggcgucaaguuugguccucguggucagccugggagcaauuuccuuuuggaugugcucuaacgguucguuacagugccggaucuguaucuga

SEQ ID NO: 137313 - RNA, 1701 nt, Artificial Sequence; identical to SEQ ID NO: 132269
  derived and/or modified CDS sequence (opt3) from hemagglutinin__InfluenzaA__AFN18195

SEQ ID NO: 137314 - RNA, 1701 nt, Artificial Sequence; identical to SEQ ID NO: 130717
  derived and/or modified CDS sequence (opt3) from hemagglutinin__InfluenzaA__AFN18200

SEQ ID NO: 137315 - RNA, 1701 nt, Artificial Sequence
  derived and/or modified CDS sequence (opt3) from hemagglutinin__InfluenzaA__AFN18207
augaaggccauccuggugguccuccuuuacaccuucgcuacagcaaacgccgacacucugugcauuggcuaucacgcgaauaacagcacggauaccguugacacaguguuggagaaaaauguaacugugacccauuccgucaacuuacuggaagauaagcacaaugggaaacuauguaagcucagaggaguggcuccccugcaucuugguaaaugcaacauagccggcuggauccuggggaauccugagugugaaucuuugucaacagcaaguagcugguccuacauuguugagaccucuucgucagacaacggaacuugcuauccaggcgauuuuaucgacuacgaggagcucagggagcagcugagcaguguguccucuuucgaacgguuugagauuuucccgaagacaagcuccuggcccaaucacgauucaaacaagggugucaccgccgcuuguccucaugcaggggccaaaaguuuuuauaagagccugaucuggcucgugaaaaagggaaauucuuacccaaaauuauccaagucauauauaaacgacaagggccgcgaaguacugguucuuuggggcauccaccaccccagcacgagugcugaucaacagucuuuguaccagaaugccgacgcguacguguucgucgggacuucccgauauagcaaaaaguuuaaaccugagauugcaauccguccaaaggugagagaucaggagggaaggaugaacuacuauuggacccugguggaacccggugacaaaauuacauucgaggccacuggcaaucuagucguuccucgguacgcuuuugccauggaacgcaacgcagggucgggaaucauaauuucugauaccccagugcaugacugcaacacaaccugucaaacgccgaagggcgcuaucaauacuucccuccccuuccagaacauucacccuaucacaaucgguaaaugcccaaaguauguaaagucaaccaaacugagacuugccacugggcugaggaaugugcccaguauucagagccggggauuguuuggcgcgauagccggcuucaucgaagggggauggacagguauggucgacggcugguacggguaucaucaccagaacgaacaaggauccggcuacgcagcugaucucaagucuacccagaaugccauugacgagaucacgaacaaagugaauagcguuauagagaagaugaacacccaguuuacagcuguggguaaagaguucaaucaccuggaaaagcgcauugaaaacuuaaauaagaaagucgaugacggguuccuggauaucuggacuuacaacgccgagcuccuugugcuguuggaaaaugagcgaacccuagacuaucaugauucaaacguaaagaaucuguacgagaaaguuagaagucagcucaagaacaacgcaaaagaaaucggcaauggauguuuugaguucuaucacaagugcgacaacacauguauggaauccgugaagaauggcacuuacgauuauccuaaauacagcgaggaagccaagcugaacagggaggagauugacggggucaaacuugaaucuacccggaucuaucaaauucuggcuauauacucaacaguggcgaguagcuugguccucgugguuucccugggagcaaucucuuuuuggaugugcucgaaugguagcuuacagugccguauuuguaucuga

SEQ ID NO: 137316 - RNA, 1701 nt, Artificial Sequence
  derived and/or modified CDS sequence (opt3) from hemagglutinin__InfluenzaA__AFN18214
augaaggccauccuggugguccuccuuuacaccuucgcuacagcaaacgccgacacucugugcauuggcuaucacgcgaauaacagcacggauaccguugacacaguguuggagaaaaauguaacugugacccauuccgucaacauauuagaagauaagcacaaugggaaacuguguaagcuaagaggaguggcuccccuccaucuggguaaaugcaacaucgccggcuggauucuugggaauccugagugugaaucucugucaacagcaaguagcugguccuacaucguugagaccucuucgucagacaacggaacuugcuauccaggcgauuuuauuaauuacgaagaguugagggagcagcucagcaguguguccucuuucgaacgguuugagaucuucccgaagacaagcuccuggcccaaccacgacucaaauaagggugucaccgccgcuuguccucaugcaggggccaaaaguuuuuauaagaaccugauauggcuggugaaaaagggaaauagcuacccaaaacucucuaaguccuauaucaacgauaagggcaaagaaguauuaguucuguggggcauucaccaccccucaacgagcgcugaccaacagagucuuuaccagaaugccgaugcguacguguucgucgggucuucccgcuauagcaagaaauuuaagccugagaucgcaauucgaccaaaagugcgugaccaggagggaagaaugaacuacuauuggacuuugguggaacccggugauaagaucaccuucgaggccacaggcaaccuggucguuccuagguacgcuuuugccauggaacggaaugcagggucgggaauaauuaucucugacacuccagugcaugauugcaacaccacaugucaaaccccgaaaggcgcuauuaauacgucccuacccuuccagaacauccacccuaucacuauugguaagugcccaaaguauguaaaaucaacaaagcuccgccuggccaccgggcuuagaaaugugcccaguauacagagcaggggacuguuuggcgcgaucgccggcuucauugaagggggauggacugguauggucgacggcugguacggguaucaucaccagaacgaacaaggauccggcuacgcagcugacuugaaaucuacacagaaugccaucgaugagauaaccaacaaggugaauagcguuauugagaaaaugaacacgcaguuuaccgcuguggguaaggaguucaaucaccucgagaagcggaucgaaaaccugaauaaaaaggucgacgauggguucuuagacaucuggacauacaacgccgagcugcucgugcuucuggaaaaugagcgcacuuuggauuaucaugacucaaacguuaaaaaccuauacgagaagguacgaagucagcugaaaaauaacgcaaaggaagugggcaauggauguuuugaguucuaucacaagugcgauaacaccuguauggaauccgucaaaaauggcacauacgacuauccuaaguacagcgaggaagccaaacucaacagagaggagauugauggggugaagcuggaaucuacuaggaucuaucaaauucuugcuauauacucaaccgcggcaaguagccuggucuuggugguuucccucggagccaucucuuuuuggaugugcucgaaugguagccugcagugccggauuuguaucuga

SEQ ID NO: 137317 - RNA, 1701 nt, Artificial Sequence; identical to SEQ ID NO: 133272
  derived and/or modified CDS sequence (opt3) from hemagglutinin__InfluenzaA__AFN18224

SEQ ID NO: 137318 - RNA, 1701 nt, Artificial Sequence; identical to SEQ ID NO: 132269
  derived and/or modified CDS sequence (opt3) from hemagglutinin__InfluenzaA__AFN18231

SEQ ID NO: 137319 - RNA, 1701 nt, Artificial Sequence
  derived and/or modified CDS sequence (opt3) from hemagglutinin__InfluenzaA__AFN18233
augaaggccauccuggugguccuccuuuacaccuucgcuacagcaaacgccgacacucugugcauuggcuaucacgcgaauaacagcacggauaccguugacacaguguuggagaagaauguaacugugacccauuccgucaacuuacuggaagauaagcacaaugggaaacuauguaagcucagaggaguggcuccccugcaucuugguaaaugcaacauagccggcuggauccuggggaauccugagugugaaucuuugucaacagcaaguagcugguccuacauuguugagaccucuucgucagacaacggaacuugcuauccaggcgauuuuaucgacuacgaggagcucagggagcagcugagcaguguguccucuuucgaacgguuugagauuuucccgaagacaagcuccuggcccaaucacgauccuaacaagggugucaccgccgcuuguccacaugcaggggccaaaucauuuuauaagaaucugaucuggcucgugaaaaagggaaacaguuaccccaaauuaagcaagucuuauauaaaugacaagggcaaagaaguacugguucuuuggggcauccaccacccuuccacgucagcugaucaacagagcuuguaccagaacgccgacgcguacguguucgucgggaccagucgcuauucucgaaaguuuaaaccagagauugcaauccgucccaaggugagagaucaggagggaaggaugaauuacuauuggacucugguggaaccuggugacaaaauuacauucgaggccacuggcaaccuagucguuccacgguacgcuuuugccauggaacgcaacgcaggguccggaaucauaauuagcgauaccccggugcaugacugcaauacaaccugucaaacgcccaagggcgcuaucaacacuucgcucccuuuccagaauauucacccaaucacaaucgguaaaugccccaaguauguaaagucuaccaaacugagacuugccacugggcugaggaacgugccuuccauucagucacggggauuguuuggcgcgauagccggcuucaucgaagggggauggacagguauggucgacggcugguacggguaucaucaccagaaugaacaaggaaguggcuacgcagcugaucucaagagcacccagaacgccauugacgagaucacgaauaaagugaacuccguuauagagaagaugaauacccaguuuacagcuguggguaaagaguucaaccaccuggaaaagcgcauugaaaauuuaaacaagaaagucgaugacggguuccuggauaucuggacuuacaaugccgagcuccuugugcuguuggaaaacgagcgaacccuagacuaucaugauucuaauguaaagaaacuguacgagaagguuagaagccagcucaaaaacaacgcaaaggaaaucggcaauggauguuuugaguucuaucacaagugcgacaacacauguauggaaucagugaaaaauggcacuuacgauuauccaaaguacagugaggaagccaaacugaacagggaggagauugacggggucaaacuugaauccacccggaucuaucaaauucuggcuauauacagcacaguggcgucuucauugguccucgugguuagucugggagcaaucagcuuuuggaugugcuccaaugguucuuuacagugccguauuuguaucuga

SEQ ID NO: 137320 - RNA, 1701 nt, Artificial Sequence
  derived and/or modified CDS sequence (opt3) from hemagglutinin__InfluenzaA__AFN18243
augaaggccauccuggugguccuccuuuacaccuucgcuacagcaaacgccgacacucugugcauuggcuaucacgcgaauaacagcacggauaccguugacacaguguuggagaaaaauguaacugugacccauuccgucaacuuacuggaagauaagcacaaugggaaacuauguaagcucagaggaguggcuccccugcaucuugguaaaugcaacauagccggcuggauccuggggaauccugagugugaaucuuugucaacagcaaguagcugguccuacauuguugagaccucuucgucagacaacggaacuugcuauccaggcgauuuuaucgacuacgaggagcucagggagcagcugagcaguguguccucuuucgaacgguuugagauuuucccgaagacaagcuccuggcccaaucacgauucaaacaagggugucaccgccgcuuguccucaugcaggggccaaaaguuuuuauaagaaucugaucuggcucgugaaaaagggaaacagcuacccaaaauuaucuaaguccuauauaaaugacaagggcaaagaaguacugguucuuuggggcauccaccaccccucaacgagcgcugaucaacagaguuuguaccagaacgccgacacuuacguguucgucgggaccucucgcuauuccaagaaauuuaagccugagauugcgauccgaccaaaagugcgugaucaggagggaagaaugaauuacuauuggacacugguggaacccggugacaagauuacuuucgaggcaaccggcaaccuagucguuccuagguacgccuuugcuauggaacggaacgccgggagcggaaucauaauuucggauacaccagugcaugacugcaauaccacgugucaaacuccgaaaggcgcaaucaacacaucucuccccuuccagaauauucacccuaucaccaucgguaagugcccaaaguauguaaaauccacuaagcugcgccuugcuacagggcugagaaacgugcccucaauucagaguaggggauuguuuggcgccauagcgggcuucaucgaagggggauggaccgguauggucgacggcugguacggguaucaucaccagaaugaacaaggaagcggcuacgccgcagaucucaaauccacgcagaacgcuauugacgagaucaccaauaaggugaacucuguuauagagaaaaugaauacacaguuuacugccguggguaaggaguucaaccaccuggaaaagcggauugaaaauuuaaacaaaaaggucgaugacggguuccuggauaucuggaccuacaaugcugagcuccuugugcuguuggaaaacgagcgcacacuagacuaucaugauagcaauguaaagaaccuguacgagaagguucgaucacagcucaaaaacaaugccaaggaaaucggcaacggauguuuugaguucuaucacaagugcgacaauacuuguauggaaagugugaaaaacggcaccuacgauuauccuaaguacuccgaggaagcaaaacugaauagagaggagauugacggggucaaacuugaaagcacaaggaucuaucaaauucuggccauauacucuaccguggcuucaaguuugguccucgugguuagccugggagcgaucuccuuuuggaugugcucuaacgguucguuacagugccggauuuguaucuga

SEQ ID NO: 137321 - RNA, 1701 nt, Artificial Sequence; identical to SEQ ID NO: 136806
  derived and/or modified CDS sequence (opt3) from hemagglutinin__InfluenzaA__AFN18245

SEQ ID NO: 137322 - RNA, 1701 nt, Artificial Sequence; identical to SEQ ID NO: 133272
  derived and/or modified CDS sequence (opt3) from hemagglutinin__InfluenzaA__AFN18255

SEQ ID NO: 137323 - RNA, 1701 nt, Artificial Sequence; identical to SEQ ID NO: 137320
  derived and/or modified CDS sequence (opt3) from hemagglutinin__InfluenzaA__AFN18260

SEQ ID NO: 137324 - RNA, 1701 nt, Artificial Sequence; identical to SEQ ID NO: 137320
  derived and/or modified CDS sequence (opt3) from hemagglutinin__InfluenzaA__AFN18267

SEQ ID NO: 137325 - RNA, 1701 nt, Artificial Sequence
  derived and/or modified CDS sequence (opt3) from hemagglutinin__InfluenzaA__AFN18269
augaaggccauccuggugguccuccuuuacaccuucgcuacagcaaacgccgacacucugugcauuggcuaucacgcgaauaacagcacggauaccguugacacaguguuggagaaaaauguaacugugacccauuccgucaacuuacuggaagauaagcacaaugggaaacuauguaagcucagaggaguggcuccccugcaucuugguaaaugcaacauagccggcuggauccuggggaauccugagugugaaucuuugucaacagcaaguagcugguccuacauuguugagaccucuucgucagacaacggaacuugcuauccaggcgauuuuaucgacuacgaggagcucagggagcagcugagcaguguguccucuuucgaaaaguuugagauuuucccgaagacaagcuccuggcccaaucacgauucaaacaaaggugucaccgccgcuuguccucaugcaggggccaagaguuuuuauaaaaaucugaucuggcucgugaagaaaggaaacagcuacccaaaguuaucuaaguccuauauaaaugacaaaggcaaggaaguacugguucuuuggggcauccaccaccccucaacgagcgcugaucaacagaguuuguaccagaacgccgacgcguacguguucgucgggacuucucgguauuccaaaaaguuuaaaccugagauugcaauccgcccaaaggugcgagaucaggagggacguaugaauuacuauuggacccugguggaacccggugacaaaauuacauucgaggccacuggcaaccuagucguuccuagauacgcuuuugccauggaaaggaacgcagggagcggaaucauaauuucggauaccccagugcaugacugcaauacaaccugucaaacgccgaagggcgcuaucaacacuucucuccccuuccagaauauucacccuaucacaaucgguaagugcccaaaauauguaaaguccaccaaacugcggcuugccacugggcugcgcaacgugcccucaauucagaguagaggauuguuuggcgcgauagccggcuucaucgaagggggauggacagguauggucgacggcugguacggguaucaucaccagaaugaacaaggaagcggcuacgcagcugaucucaaguccacccagaacgccauugacgagaucacgaauaaagugaacucuguuauagagaagaugaauacccaguuuacagcuguggguaaggaauuuaaccaccuggagaaaaggauugaaaauuuaaacaagaaagucgaugacggguuccuggauaucuggacuuacaaugccgagcuccuugugcuguuggaaaacgagcggacccuagacuaucaugauagcaauguaaagaaccuguacgagaaaguucgcucacagcucaagaacaaugcaaaggaaaucggcaacggauguuucgaguucuaucacaaaugcgacaauacauguauggaaagugugaagaacggcacuuacgauuauccuaaauacuccgaggaagccaagcugaaucgagaggagauugacggggucaaacuugaaagcaccagaaucuaucaaauucuggcuauauacucuacaguggcgucaaguuugguccucgugguuagccugggagcaaucuccuuuuggaugugcucuaacgguucguuacagugcaggauuuguaucuga

SEQ ID NO: 137326 - RNA, 1701 nt, Artificial Sequence; identical to SEQ ID NO: 131881
  derived and/or modified CDS sequence (opt3) from hemagglutinin__InfluenzaA__AFN18271

SEQ ID NO: 137327 - RNA, 1701 nt, Artificial Sequence; identical to SEQ ID NO: 132269
  derived and/or modified CDS sequence (opt3) from hemagglutinin__InfluenzaA__AFN18273

SEQ ID NO: 137328 - RNA, 1701 nt, Artificial Sequence; identical to SEQ ID NO: 131881
  derived and/or modified CDS sequence (opt3) from hemagglutinin__InfluenzaA__AFN18280

SEQ ID NO: 137329 - RNA, 1701 nt, Artificial Sequence; identical to SEQ ID NO: 131515
  derived and/or modified CDS sequence (opt3) from hemagglutinin__InfluenzaA__AFN18303

SEQ ID NO: 137330 - RNA, 1701 nt, Artificial Sequence
  derived and/or modified CDS sequence (opt3) from hemagglutinin__InfluenzaA__AFN18305
augaaggccauccuggugguccuccuuuacaccuucgcuacagcaaacgccgacacucugugcauuggcuaucacgcgaauaacagcacggauaccguugacacaguguuggagaaaaauguaacugugacccauuccgcuaacuuacuggaagauaagcacaaugggaaacuauguaagcucagaggagucgcaccccugcaucuugguaaaugcaacauagccggcuggauccuggggaauccugagugugaaucuuugucaacagccaguagcugguccuacauuguggagaccucuucgucagacaacggaacuugcuauccaggcgauuuuaucgacuacgaggagcucagggagcagcugagcaguguuuccucuuucgaacgguuugagauuuucccgaagacaagcuccuggcccaaucacgauucaaacaagggugugaccgcugcauguccucaugccggggcuaaaaguuuuuauaagaaucugaucuggcucgucaaaaagggaaacagcuacccaaaauuaucuaaguccuauauaaaugacaagggcaaagaagugcugguacuuuggggcauccaccaccccucaacgagcgccgaucaacagaguuuguaccagaacgcggacgcauacguuuucguggggacuucucgcuauuccaagaaauuuaagccugagauugccauccgaccaaaaguccgugaucaggagggaagaaugaauuacuauuggacccugguggaacccggugacaagauuacauucgaggcuacuggcaaccuaguggucccuagguacgccuuugcaauggaacggaacgcugggagcggaaucauaauuucggauaccccaguucaugacugcaauacaaccugucaaacgccgaaaggcgccaucaacacuucucuccccuuccagaauauucacccuaucacaaucgguaagugcccaaaguaugugaaauccaccaagcugcgccuugcgacugggcugagaaacguacccucaauucagaguaggggauuguuuggcgccauagcaggcuucaucgaagggggauggacagguaugguggacggcugguacggguaucaucaccagaaugaacaaggaagcggcuacgcugccgaucucaaauccacccagaacgcuauugacaagaucacgaauaaagucaacucugugauagagaagaugaauacccaguuuacagccguugguaaggaguucaaccaccuggggaaacggauugaaaauuuaaacaagaaaguggaugacggcuuccuggauaucuggacuuacaaugcagagcuccuuguccuguuggaaaacgagcgcacccuagacuaucaugauagcaaugugaagaaccuguacgaaaaaguacgaucacagcucaagaacaaugccaaggagaucggaaacggcuguuuugaguucuaucacaaaugcgacaauacauguauggaaaguguuaagaacgggacuuacgauuauccuaaauacuccgaggaagcuaagcugaauagagaggaaauugacggagugaaacuugagagcaccaggaucuaucaaauucuggcgauauacucuacagucgcaucaaguuuggugcucgucgugagccugggugccaucuccuuuuggaugugcucuaacggcucguuacagugccggauuuguaucuga

SEQ ID NO: 137331 - RNA, 1701 nt, Artificial Sequence
  derived and/or modified CDS sequence (opt3) from hemagglutinin__InfluenzaA__AFN18307
augaaggccauccuggugguccuccuuuacaccuucgcugcagccaacgcggacacacugugcauuggcuaucacgcuaauaacagcacugauacgguugacaccguguuggagaaaaauguaacagugacucauuccgucaacuuacuggaagauaagcacaaugggaaacuauguaagcucagaggaguggcaccccugcaucuugguaaaugcaacauagccggcuggauccuggggaauccugagugugaaucuuugucaaccgccaguagcugguccuacauuguugagacaucuucgucagacaacggaaccugcuauccaggcgauuuuaucgacuacgaggagcucagggagcagcugagcaguguguccucuuucgaacgguuugagauuuucccgaagacuagcuccuggcccaaucacgauucaaacaagggugucacagcugcauguccucaugccggggcuaaaaguuuuuauaagaaucugaucuggcucgugaaaaagggaaacagcuacccaaaauuaucuaaguccuauauaaaugacaagggcaaagaaguacugguucuuuggggcauccaccaccccucaaccagcgccgaucaacagaguuuguaccagaacgcggacgcauacguguucgucgggacgucucgcuauuccaagaaauuuaagccugagauugccauccgaccaaaagugcgugaucaggagggaagaaugaauuacuauuggacucugguggaacccggugacaagauuaccuucgaggcuacaggcaaccuagucguuccuagguacgccuuugcaauggaacggaacacugggagcggaaucauaauuucggauaccccagugcaugacugcaauacaaccugucaaacgccgaaaggcgcuaucaacacuucucuccccuuccagaauauucacccuaucacaaucgguaagugcccaaaguauguaaaauccaccaagcugcgccuugccacugggcugagaaacgugcccucaauucagaguaggggauuguuuggcgcgauagccggcuucaucgaagggggauggacagguauggucgacggcugguacggguaucaucaccagaaugaacaaggaagcggcuacgcagcugaucucaaauccacccagaacgccauugacaagaucacgaauaaagugaacucuguuauagagaagaugaauacccaguuuacagcuguggguaaggaguucaaccaccuggaaaaacggauugagaauuuaaacaagaaagucgaugacggguuccuggauaucuggacuuacaaugccgaacuccuugugcuguuggagaacgaacgcacccuagacuaucaugauagcaauguaaagaaccuguacgagaaaguucgaucacagcucaagaacaaugcaaaggagaucggcaacggauguuuugaguucuaucacaaaugcgacaauacauguauggaaagugugaagaacggcacuuacgauuauccuaaauacuccgaagaggccaagcugaauagagaagagauugacggggucaaacuugagagcaccaggaucuaucaaauucuggcuauauacucuacaguggcgucaaguuugguccucgugguuagccugggagcaaucuccuuuuggaugugcucuaacgguucguuacagugccggauuuguaucuga

SEQ ID NO: 137332 - RNA, 1701 nt, Artificial Sequence
  derived and/or modified CDS sequence (opt3) from hemagglutinin__InfluenzaA__AFN18312
augaaggccauccuggugguccuccuuuacaccuucgcuacagcaaacgccgacacucugugcauuggcuaucacgcgaauaacagcacggauaccguugacacaguguuggagaaaaauguaacugugacccauuccgucaacuuacuggaagauaagcacaaugggaaacuauguaagcucagaggaguggcuccccugcaucuugguaaaugcaacauagccggcuggauccuggggaauccugagugugaaucuuugucaacagcaaguagcugguccuacauuguugagaccucuucgucagacaacggaacuugcuauccaggcgauuuuaucgacuacgaggagcucagggagcagcugagcaguguguccucuuucgaacgguuugagauuuucccgaagacaagcuccuggcccaaucacgauucaaacaaggguaucaccgccgcuuguccucaugcaggggccaaaaguuuuuauaagaaucugauauggcucgucaaaaagggaaacagcuacccaaaauuaucuaaguccuauaucaaugacaagggcaaagaagugcugguacuuuggggcauucaccaccccucaacgagcgcugaucaacagaguuuguaccagaacgccgacgcguacguuuucguggggacuucucgcuauuccaagaaauuuaagccugagaucgcaauucgaccaaaaguccgugaucaggagggaagaaugaauuacuauuggacccugguggaacccggugacaagaucacauucgaggccacuggcaaccuaguggucccuagguacgcuuuugccauggaacggaacgcagggagcggaauaauuaucucggauaccccaguucaugacugcaauacaaccugucaaacgccgaaaggcgcuauuaacacuucucuccccuuccagaauauccacccuaucacaauugguaagugcccaaaguaugugaaauccaccaagcugcgccuugccacugggcugagaaacguacccucaauacagaguaggggauuguuuggcgcgaucgccggcuucauugaagggggauggacagguaugguggacggcugguacggguaucaucaccagaaugaacaaggaagcggcuacgcagcugaucucaaauccacccagaacgccaucgacaagauaacgaauaaagucaacucugugauugagaagaugaauacccaguuuacagcuguugguaaggaguucaaccaccuggaaaaacggaucgagaauuuaaacaagaaaguggaugacggguuccuggauaucuggacuuacaaugccgaacuccuuguccuguuggagaacgaacgcacccuagacuaucaugauagcaaugugaagaaccuguacgagaaaguacgaucacagcucaagaacaaugcaaaggagauuggcaacggauguuuugaguucuaucacaaaugcgacaauacauguauggaaaguguuaagaacggcacuuacgauuauccuaaauacuccgaagaggccaagcugaauagagaagagaucgacggggugaaacuugagagcaccaggauuuaucaaauacuggcuaucuacucuacagucgcgucaaguuuggugcucgucauuagccugggagcaaucuccuuuuggaugugcucuaacgguucguuacagugccggaucuguauuuga

SEQ ID NO: 137333 - RNA, 1701 nt, Artificial Sequence; identical to SEQ ID NO: 133082
  derived and/or modified CDS sequence (opt3) from hemagglutinin__InfluenzaA__AFN18319

SEQ ID NO: 137334 - RNA, 1701 nt, Artificial Sequence; identical to SEQ ID NO: 135179
  derived and/or modified CDS sequence (opt3) from hemagglutinin__InfluenzaA__AFN18324

SEQ ID NO: 137335 - RNA, 1701 nt, Artificial Sequence; identical to SEQ ID NO: 131070
  derived and/or modified CDS sequence (opt3) from hemagglutinin__InfluenzaA__AFN18334

SEQ ID NO: 137336 - RNA, 1701 nt, Artificial Sequence; identical to SEQ ID NO: 132833
  derived and/or modified CDS sequence (opt3) from hemagglutinin__InfluenzaA__AFN18344

SEQ ID NO: 137337 - RNA, 1701 nt, Artificial Sequence; identical to SEQ ID NO: 130717
  derived and/or modified CDS sequence (opt3) from hemagglutinin__InfluenzaA__AFN18354

SEQ ID NO: 137338 - RNA, 1701 nt, Artificial Sequence
  derived and/or modified CDS sequence (opt3) from hemagglutinin__InfluenzaA__AFN18364
augaaggccauccuggugguccuccuuuacaccuucgcuacagcaaacgccgacacucugugcauuggcuaucacgcgaauaacagcacggauaccguugacacaguguuggagaaaaauguaacugugacccauuccgucaacuuacuggaagauaagcacaaugggaaacuauguaagcucagaggaguggcuccccugcaucuugguaaaugcaacauagccggcuggauccuggggaauccugagugugaaucuuugucaacagcaaguagcugguccuacauuguugagaccucuucgucagacaacggaacuugcuauccaggcgauuuuaucgacuacgaggagcucagggagcagcugagcaguguguccucuuucgaacgguuugagauuuucccgaagacaagcuccuggcccaaucacgaucugaacaagggugucaccgccgcuuguccucaugcaggggccaaaucauuuuauaagaaucucaucugguuagugaaaaagggaaacaguuacccaaaacugagcaagucuuauauaaaugacaagggcaaagaaguacuuguuuuguggggcauccaccaccccuccacgucagcugaucaacagagccuguaccagaacgccgacgcguacguguucgucgggaccagucgcuauucuaagaaauuuaagccugagauugcaauccgaccaaaagugcgugaucaggagggaagaaugaauuacuauuggacucuaguggaacccggugacaagauuacauucgaggccacuggcaaccucgucguuccuagguacgcuuuugccauggaacggaacgcaggguccggaaucauaauuagcgauaccccagugcaugacugcaauacaaccugucaaacgccgaaaggcgcuaucaacacuucgcugcccuuccagaauauucacccuaucacaaucgguaagugcccaaaguauguaaaaucuaccaagcugcgccuugccacuggguugagaaacgugcccuccauucagucaaggggacucuuuggcgcgauagccggcuucaucgaagggggauggacagguauggucgacggcugguacggguaucaucaccagaaugaacaaggaaguggcuacgcagcugaucugaaaagcacccagaacgccauugacgagaucacgaauaaggugaacuccguuauagagaaaaugaauacccaguuuacagcuguggguaaggaguucaaccacuuagaaaagcggauugaaaaucugaacaaaaagaucgaugacggguuccucgauaucuggacuuacaaugccgagcuucuggucuugcuagaaaacgagcgcacccuggacuaucaugauucuaaugugaaaaaccucuacgagaagguacgaagccagcugaaaaacaaugcaaaggaaauuggcaacggauguuuugaguucuaucacaagugcgacaauacauguauggaaucaguuaaaaacggcacuuacgauuauccuaaguacagugaggaagccaaacuuaauagagaggagaucgacggggugaagcuggaauccaccaggauuuaucaaauauuggcuaucuacagcacagucgcgucuucacucgugcuggucgugaguuuaggagcaauuagcuuuuggaugugcuccaacgguucucugcagugccggaucuguaucuga

SEQ ID NO: 137339 - RNA, 1701 nt, Artificial Sequence; identical to SEQ ID NO: 130717
  derived and/or modified CDS sequence (opt3) from hemagglutinin__InfluenzaA__AFN18374

SEQ ID NO: 137340 - RNA, 1701 nt, Artificial Sequence
  derived and/or modified CDS sequence (opt3) from hemagglutinin__InfluenzaA__AFN18381
augaaggccauccuggugguccuccuuuacaccuucgcuacagcaaacgccgacacucugugcauuggcuaucacgcgaauaacagcacggauaccguugacacaguguuggagaaaaauguaacugugacccauuccgucaacuuacuggaagauaagcacaaugggaaacuauguaagcucagaggaguggcuccccugcaucuugguaaaugcaacauagccggcuggauccuggggaauccugagugugaaucuuugucaacagcaaguagcugguccuacauuguugagaccucuucgucagacaacggaacuugcuauccaggcgauuuuaucgacuacgaagaacucagggagcagcugagcaguguguccucuuucgaacgguuugagauuuucccgaagacaagcuccuggcccaaucacgauucaaacaagggugucaccgccgcuuguccucaugcaggggccaaaaguuuuuauaagaaucugaucuggcucgugaaaaagggaaacagcuacccaaaauuaucuaaguccuauauaaaugacaagggcaaagaaguacugguucuuuggggcauccaccaccccucaacgagcgcugaucaacagaguuuguaccagaacgccgacgcguacguguucgucgggacuucuaaguauuccaaaaaguuuaaaccugagauugcaauccgcccaaaggugcgagaucaggagggacguaugaauuacuauuggacccuggugaaacccggugacaagauuacauucgaagccacuggcaaccuagucguuccuagauacgcuuuugccauggagaggaacgcagggagcggaaucauaauuucggauaccccagugcaagacugcaauacaaccugucagacgccgaagggcgcuaucaacacuucucuccccuuccagaauauucauccuaucacaaucgguaaaugcccaaaguauguaaaauccaccaagcugcggcuugccacugggcugcgcaacgugcccucaauucagaguagaggauuguuuggcgcgauagccggcuucaucgaagggggauggacagguauggucgacggcugguacggguaucaccaucaaaaugagcagggaagcggcuacgcagcugaucucaaauccacccagaacgccauugacgaaaucacgaauaaggugaacucuguuauagagaagaugaauacccaguuuacagcuguggguaaagaguucaaccaccuggaaaagaggauugagaauuuaaacaaaaaggucgaugacggguuccuggauaucuggacuuacaaugccgaacuccuugugcuguuggagaacgaacggacccuagacuaucacgauagcaauguaaagaaccuguacgagaagguucgcucacaacucaagaacaaugcaaaagagaucggcaacggauguuuugaguucuaucauaagugcgacaauacauguauggagagugugaaaaacggcacuuacgauuauccuaaguacuccgaagaggccaaacugaaucgagaagagauugacggggucaaacuugagagcaccagaaucuaucagauucuggcuauauacucuacaguggcgucaaguuugguccucgugguuagccugggagcaaucuccuuuuggaugugcucuaacgguucguuacagugcaggauuuguaucuga

SEQ ID NO: 137341 - RNA, 1701 nt, Artificial Sequence
  derived and/or modified CDS sequence (opt3) from hemagglutinin__InfluenzaA__AFN18390
augaaggccauccuggugguccuccuuuacaccuucgcuacagcaaacgccgacacucugugcauuggcuaucacgcgaauaacagcacggauaccguugacacaguguuggagaaaaauguaacugugacccauuccgucaacuuacuggaagauaagcacaaugggaaacuauguaagcucagaggaguggcuccccugcaucuugguaaaugcaacauagccggcuggauccuggggaauccugagugugaaucuuugucaacagcaaguagcugguccuacauuguugagaccucuucgucagacaacggaacuugcuauccaggcgauuuuaucgacuacgaggagcucagggagcagcugagcaguguguccucuuucgaacgguuugagauuuucccgaagacaagcuccuggcccaaucacgauucaaacaagggugucaccgccgcuuguccucaugcaggggccaaaaguuuuuauaagaaucugaucuggcucgugaaaaagggaaacagcuacccaaaauuaucuaaguccuauauaaaugacaagggcaaagaaguacugguucuuuggggcauccaccaccccucaacgagcgcugaucaacagaguuuguaccagaacgccgacgcguacguguucgucgggacuucucgcuauuccaagaaauuuaagccugagauugcaauccgaccaaaagugcgugaucaggagggaagaaugaauuacuauuggacccugguggaacccggugacaagauuacauucgaggccacuggcaaccuagucguuccuagguacgcuuuugccauggaacggaacgcagggagcggaaucauaauuucggauaccccagugcaugacugcaauacaaccugucaaacgccgaaaggcgcuaucaacacuucucuccccuuccagaauauucacccuaucacaaucgguaagugcccaaaguauguaaaauccaccaagcugcgccuugccacugggcugagaaacgugcccucaauucagaguaggggauuguuuggcgcgauagccggcuucaucgaagggggauggacagguauggucgacggcugguacggguaucaucaccagaaugaacaaggaagcggcuacgcagcugaucucaaauccacccagaacgccauugacgagaucacgaauaaggugaacucuguuauagagaaaaugaauacccaguuuacagcuguggguaaggaguucaaccaccuggaaaagcggauugaaaauuuaaacaaaaaggucgaugacggguuccuggauaucuggacuuacaaugccgagcuccuugugcuguuggaaaacgagcgcacccuagacuaucaugauagcaauguaaagaaccuguacgagaagauccgaucacagcucaaaaacaaugcaaaggaaauuggcaacggauguuuugaguucuaucacaagugcgacaauacauguauggaaaguguuaaaaacggcacuuacgauuauccuaaguacuccgaggaagccaaacugaauagagaggagaucgacggggugaaacuugaaagcaccaggauuuaucaaauacuggcuaucuacucuacagucgcgucaaguuuggugcucgucgugagccugggagcaauuuccuuuuggaugugcucuaacgguucguuacagugccggaucuguaucuga

SEQ ID NO: 137342 - RNA, 1701 nt, Artificial Sequence
  derived and/or modified CDS sequence (opt3) from hemagglutinin__InfluenzaA__AFN18400
augaaggccauccuggugguccuccuuuacaccuucgcuacagcaaacgccgacacucugugcauuggcuaucacgcgaauaacagcacggauaccguugacacaguguuggagaaaaauguaacugugacccauuccgucaacuuacuggaagauaagcacaaugggaaacuauguaagcucagaggagugacaccccugcaucuugguaaaugcaacauagcuggcuggauccuggggaauccugagugugaaucuuugucaaaggccaguagcugguccuacauuguugagaccucuucgucagacaacggaacuugcuauccaggcgauuuuaucgacuacgaggagcucagggagcagcugagcaguguguccucuuucgaacgguuugagauuuucccgaagacaagcuccuggcccaaucacgauucaaacaaaggugucaccgcagccuguccucaugcuggggcaaagaguuuuuauaaaaaucugaucuggcucgugaagaaaggaaacagcuacccaaaguuaucuaaguccuauauaaaugacaaaggcaaggaaguacugguucuuuggggcauccaccaccccucaacgagcgccgaucaacagaguuuguaccagaacgcugacgccuacguguucgucgggacuucucgcuauuccaaaaaguuuaaaccugagauugcgauccgaccaaaggugcgugaucaggagggaagaaugaauuacuauuggacccugguggaacccggugacaaaauuacauucgaggcaacuggcaaccuagucguuccuagguacgccuuugcuauggaacggaacguggggagcggaaucauaauuucggauaccccaguacaugacugcaauacaaccugucaaacgccgaagggcgccaucaacacuucucuccccuuccagaauauucacccuaucacaaucgguaagugcccaaaauaugugaaguccaccaaacugcgccuugcaacugggcugagaaacguccccucaauucagaguaggggauuguuuggcgcuauagccggcuucaucgaagggggauggacagguaugguggacggcugguacggguaucaucaccagaaugaacaaggaagcggcuacgcggccgaucucaaguccacccagaacgcaauugacgagaucacgaauaaaguuaacucugugauagagaagaugaauacccaguuuacagcugucgguaaggaguucaaccaccuggaaaaacggauugaaaauuuaaacaagaaaguggaugacggguuccuggauaucuggacuuacaaugccgagcuccuuguacuguuggaaaacgagcgcacccuagacuaucaugauagcaauguuaagaaccuguacgagaaagugcgaucacagcucaagaacaaugcuaaggaaaucggcaacggauguuuugaguucuaucacaaaugcgacaauacauguauggaaagugucaagaacggcacuuacgauuauccuaaauacuccgaggaagccaagcugaauagagaggagauugacggggugaaacuugaaagcaccaggaucuaucaaauucuggcaauauacucuacagucgccucaaguuuggugcucguugugagccugggagcuaucuccuuuuggaugugcucuaacgguucguuacagugccggauuuguaucuga

SEQ ID NO: 137343 - RNA, 1701 nt, Artificial Sequence; identical to SEQ ID NO: 130808
  derived and/or modified CDS sequence (opt3) from hemagglutinin__InfluenzaA__AFN18410

SEQ ID NO: 137344 - RNA, 1701 nt, Artificial Sequence; identical to SEQ ID NO: 130717
  derived and/or modified CDS sequence (opt3) from hemagglutinin__InfluenzaA__AFN18420

SEQ ID NO: 137345 - RNA, 1701 nt, Artificial Sequence
  derived and/or modified CDS sequence (opt3) from hemagglutinin__InfluenzaA__AFN18430
augaaggccauccuggugguccuccuuuacaccuucgcuacagcaaacgccgacacucugugcauuggcuaucacgcgaauaacagcacggauaccguugacacaguguuggagaagaauguaacugugacccauuccgucaacuuacuggaaaauaagcacaacgggaaacuauguaagcucagaggaguggcuccccugcaucuugguaaaugcaauauagccggcuggauccuggggaacccugagugugaaucuuugucaacagcaaguagcugguccuacauuguugagaccucuucgucagauaauggaacuugcuauccaggcgacuuuaucgauuacgaagaacucagggagcagcugagcaguguguccucuuucgaacgguuugagauuuucccgaagacaagcuccuggcccaaccacgacucaaauaagggugucaccgccgcuuguccucaugcaggggccaaaaguuuuuauaagaaccugaucuggcucgugaaaaagggaaauagcuacccaaaauuaucuaaguccuauauaaacgauaagggcaaagaaguacugguucuuuggggcauccaccaccccucaacgagcgcugaccaacagaguuuguaccagaaugccgaugcguacguguucgucgggacuucucgcuauuccaagaaauuuaagccugagauugcaauccgaccaaaagugcgugaccaggagggaagaaugaacuacuauuggacccugguggaacccggugauaagauuacauucgaggccacuggcaaccuagucguuccuagguacgcuuuugccauggugcggaaugcagggagcggaaucauaauuucggacaccccaguacaugauugcaacacaaccugucaaacgccgaaaggcgcuaucaauacuucucuccccuuccagaacauucacccuaucacaaucgguaagugcccaaaguaugugaaauccaccaagcugcgccuugccacugggcugagaaauguccccucaauucagaguaggggauuguuuggcgcgauagccggcuucaucgaagggggauggacagguaugguggacggcugguacggguaucaucaccagaacgagcaaggaagcggcuacgcagcugaccucaaauccacccagaaugccauugaugaaaucacgaacaagguuaauucugugauagagaaaaugaacacccaguuuacagcugucgguaaggaguucaaucaccuggaaaagcggauugagaacuuaaauaaaaagguggacgauggguuccuggacaucuggacuuacaacgccgaacuccuuguacuguuggagaaugaacgcacccuagauuaucaugacagcaacguuaaaaaccuguacgagaaggugcgaucacagcucaaaaauaacgcaaaggagaucggcaauggauguuuugaguucuaucacaagugcgauaacacauguauggagagugucaaaaauggcacuuacgacuauccuaaguacuccgaagaggccaaacugaacagagaagagauugauggggugaaacuugagagcaccaggaucuaucaaauucuggcuauauacucuacagucgcgucaaguuuggugcucguugugagccugggagcaaucuccuuuuggaugugcucuaaugguucguuacagugccggauuuguaucuga

SEQ ID NO: 137346 - RNA, 1701 nt, Artificial Sequence; identical to SEQ ID NO: 130717
  derived and/or modified CDS sequence (opt3) from hemagglutinin__InfluenzaA__AFN18440

SEQ ID NO: 137347 - RNA, 1701 nt, Artificial Sequence; identical to SEQ ID NO: 130717
  derived and/or modified CDS sequence (opt3) from hemagglutinin__InfluenzaA__AFN18450

SEQ ID NO: 137348 - RNA, 1701 nt, Artificial Sequence; identical to SEQ ID NO: 133272
  derived and/or modified CDS sequence (opt3) from hemagglutinin__InfluenzaA__AFN18460

SEQ ID NO: 137349 - RNA, 1701 nt, Artificial Sequence; identical to SEQ ID NO: 131578
  derived and/or modified CDS sequence (opt3) from hemagglutinin__InfluenzaA__AFN18470

SEQ ID NO: 137350 - RNA, 1701 nt, Artificial Sequence; identical to SEQ ID NO: 130808
  derived and/or modified CDS sequence (opt3) from hemagglutinin__InfluenzaA__AFN18480

SEQ ID NO: 137351 - RNA, 1701 nt, Artificial Sequence; identical to SEQ ID NO: 131578
  derived and/or modified CDS sequence (opt3) from hemagglutinin__InfluenzaA__AFN18490

SEQ ID NO: 137352 - RNA, 1701 nt, Artificial Sequence; identical to SEQ ID NO: 130717
  derived and/or modified CDS sequence (opt3) from hemagglutinin__InfluenzaA__AFN18497

SEQ ID NO: 137353 - RNA, 1701 nt, Artificial Sequence; identical to SEQ ID NO: 130717
  derived and/or modified CDS sequence (opt3) from hemagglutinin__InfluenzaA__AFN18512

SEQ ID NO: 137354 - RNA, 1701 nt, Artificial Sequence
  derived and/or modified CDS sequence (opt3) from hemagglutinin__InfluenzaA__AFN18519
augaaggccauccuggugguccuccuuuacaccuucgcuacagcaaacgccgacacucugugcauuggcuaucacgcgaauaacagcacggauaccguugacacaguguuggagaaaaauguaacugugacccauuccgucaacuuacuggaagauaagcacaaugggaaacuauguaagcucagaggaguggcuccccugcaucuugguaaaugcaacauagccggcuggauccuggggaauccugagugugaaucuuugucaacagcaaguagcugguccuacauuguugagaccucuucgucagacaacggaacuugcuauccaggcgauuuuaucgacuacgaagaacucagggagcagcugagcaguguguccucuuucgaacgguuugagauuuucccgaagacaagcuccuggcccaaucacgauucaaacaagggugucaccgccgcuuguccucaugcaggggccaaaaguuuuuauaagaaucugaucuggcucgugaaaaaggaaaacagcuacccaaaauuaucuaaguccuauauaaaugacaagggaaaagagguacugguucuuuggggcauccaccaccccucaacgagcgcugaucaacagaguuuguaccagaacgccgacgcguacguguucgucggcacuucucgcuauuccaagaaauuuaagccugagauugcaauccgaccaaaagugcgugaucaggaagggagaaugaauuacuauuggacccugguggagcccggagacaagauuacauucgaagccacugguaaccuagucguuccuagguacgcuuuugccauggagcggaacgcaggcagcgggaucauaauuucggauaccccagugcaugacugcaauacaaccugucaaacgccgaaaggagcuaucaacacuucucuccccuuccagaauauucacccuaucacaaucggcaagugcccaaaguauguaaaauccaccaagcugcgccuugccacuggucugagaaacgugcccucaauucagaguaggggguuguuuggagcgauagccggcuucaucgaaggcggguggacaggaauggucgacgguugguacggcuaucaucaccagaaugagcaagggagcggauacgcagcugaucucaaauccacccagaacgccauugacgagaucacgaauaaggugaacucuguuauagaaaagaugaauacccaguuuacagcugugggcaaggaguucaaccaccuggaaaagcggauugagaauuuaaacaaaaaggucgaugacgguuuccuggauaucuggacuuacaaugccgaacuccuugugcuguuggagaacgagcgcacccuagacuaucaugauagcaauguuaaaaaccuguacgaaaagguacgaucacagcucaaaaacaaugcaaaggagaucgggaacggcuguuuugaguucuaucacaagugcgacaauacauguauggagagugugaaaaacggaacuuacgauuauccuaaguacuccgaagaggccaaacugaauagagaggaaauugacggcgucaaacuugagagcaccaggaucuaucaaauucuggcuauauacucuacaguggcgucaaguuugguccucgugguuagccugggggcaaucuccuuuuggaugugcucuaacggaucguuacagugccggauuuguaucuga

SEQ ID NO: 137355 - RNA, 1701 nt, Artificial Sequence
  derived and/or modified CDS sequence (opt3) from hemagglutinin__InfluenzaA__AFN18521
augaaggccauccuggugguccuccuuuacaccuucgcuacagcaaacgccgacacucugugcauuggcuaucacgcgaauaacagcacggauaccguugacacaguguuggagaagaauguaacugugacccauuccgucaacuuacuggaagauaagcacaaugggaaacuauguaagcucagaggaguggcuccccugcaucuugguaaaugcaacauagccggcuggauccuggggaauccugagugugaaucuuugucaacagcaaguagcugguccuacauuguugagaccucuucgucagacaacggaacuugcuauccaggcgauuuuaucgacuacgaagaacucagggagcagcugagcaguguguccucuuucgaacgguuugagauuuucccgaagacaagcuccuggcccaaucacgauucaaacaagggugucaccgccgcuuguccucaugcaggggccaaaaguuuuuauaagaaucugaucuggcucgugaaaaagggaaacagcuacccaaaauuaucuaaguccuauauaaaugacaagggcaaagaaguacugguucuuuggggcauccaccaccccucaacgagcgcugaucaacagaguuuguaccagaacgccgacgcguacguguucgucgggacuucucgcuauuccaagaaauuuaagccugagauugcaauccgaccaaaagugcgugaucaggagggaagaaugaauuacuauuggacccugguggaacccggugacaagauuacauucgaggccacuggcaaccuagucguuccuagguacgcuuuugccauggugcggaacgcagggagcggaaucauaauuucggauaccccaguacaugacugcaauacaaccugucaaacgccgaaaggcgcuaucaacacuucucuccccuuccagaauauucacccuaucacaaucgguaagugcccaaaguaugugaaauccaccaagcugcgccuugccacugggcugagaaacguccccucaauucagaguaggggauuguuuggcgcgauagccggcuucaucgaagggggauggacagguaugguggacggcugguacggguaucaucaccagaaugagcaaggaagcggcuacgcagcugaucucaaauccacccagaacgccauugacgaaaucacgaauaagguuaacucugugauagagaaaaugaauacccaguuuacagcugucgguaaggaguucaaccaccuggaaaagcggauugagaauuuaaacaaaaagguggaugacggguuccuggauaucuggacuuacaaugccgaacuccuuguacuguuggagaacgaacgcacccuagacuaucaugauagcaauguuaaaaaccuguacgagaaggugcgaucacagcucaaaaacaaugcaaaggagaucggcaacggauguuuugaguucuaucacaagugcgacaauacauguauggagagugucaaaaacggcacuuacgauuauccuaaguacuccggggaagccaaacugaauagagaggaaauugacggagugaaacuugagagcaccaggaucuaucaaauucuggcuauauacucuacagucgcgucaaguuuggugcucguugugagccugggugcaaucuccuuuuggaugugcucuaacggcucguuacagugccggauuuguaucuga

SEQ ID NO: 137356 - RNA, 1701 nt, Artificial Sequence; identical to SEQ ID NO: 130717
  derived and/or modified CDS sequence (opt3) from hemagglutinin__InfluenzaA__AFN18528

SEQ ID NO: 137357 - RNA, 1701 nt, Artificial Sequence; identical to SEQ ID NO: 130717
  derived and/or modified CDS sequence (opt3) from hemagglutinin__InfluenzaA__AFN18531

SEQ ID NO: 137358 - RNA, 1701 nt, Artificial Sequence; identical to SEQ ID NO: 133314
  derived and/or modified CDS sequence (opt3) from hemagglutinin__InfluenzaA__AFN18543

SEQ ID NO: 137359 - RNA, 1701 nt, Artificial Sequence; identical to SEQ ID NO: 135599
  derived and/or modified CDS sequence (opt3) from hemagglutinin__InfluenzaA__AFN18545

SEQ ID NO: 137360 - RNA, 1701 nt, Artificial Sequence; identical to SEQ ID NO: 131578
  derived and/or modified CDS sequence (opt3) from hemagglutinin__InfluenzaA__AFN18550

SEQ ID NO: 137361 - RNA, 1701 nt, Artificial Sequence
  derived and/or modified CDS sequence (opt3) from hemagglutinin__InfluenzaA__AFN18557
augaaggccauccuggugguccuccuuuacaccuucgcuacagcaaacgccgacacucugugcauuggcuaucacgcgaauaacagcacggauaccguugacacaguguuggagaagaauguaacugugacccauuccgucaacuuacuggaagauaagcacaaugggaaacuauguaagcucagaggaguggcuccccugcaucuugguaaaugcaacauagccggcuggauccuggggaauccugagugugaaucuuugucaacagcaaguagcugguccuacauuguugagaccucuucgucagacaacggaacuugcuauccaggcgauuuuaucgacuacgaggagcucagggagcagcugagcaguguguccucuuucgaacgguuugagauuuucccgaagacaagcuccuggcccaaucacgauucaaacaagggugucaccgccgcuuguccucaugcaggggccaaaaguuuuuauaagaaucugaucuggcucgugaaaaagggaaacagcuacccaaaauuaucuaaguccuauauaaaugacaagggcaaagaaguacugguucuuuggggcauccaccaccccucaacgagcgcugaucaacagaguuuguaccagaacgccgacgcguacguguucgucgggacuucucgcuauuccaagaaauuuaagccugagauugcaauccgaccaaaagugcgugaucaggagggaagaaugaauuacuauuggacccugguggaacccggugacaagauuacauucgaggccacuggcaaccuagucguuccuagguacgcuuuugccauggaacggaacgcagggagcggaaucauaauuucggauaccccagcucaugacugcaauacaaccugucaaacgccgaaaggcgccaucaacacuucucuccccuuccagaauauucacccuaucacaaucgguaagugcccaaaguaugugaaauccaccaagcugcgccuugcgacugggcugagaaacguacccucaauucagaguaggggauuguuuggcgccauagcaggcuucaucgaagggggauggacagguaugguggacggcugguacggguaucaucaccagaaugaacaaggaagcggcuacgcugccgaucucaaauccacccagaacgcuauugacgagaucacgaauaaggucaacucugugauagagaaaaugaauacccaguuuacagccguugguaaggaguucaaccaccuggaaaagcggauugaaaauuuaaacaaaaagguggaugacggguuccuggauaucuggacuuacaaugcagagcuccuuguccuguuggaaaacgagcgcacccuagacuaucaugauagcaaugugaaaaaccuguacgagaagguacgaucacagcucaaaaacaaugccaaggaaaucggcaacggauguuuugaguucuaucacaagugcgacaauacauguauggaaaguguuaaaaacggcacuuacgauuauccuaaguacuccgaggaagcuaaacugaauagagaggagauugacggggugaaacuugaaagcaccaggaucuaucaaauucuggcgauauacucuacagucgcaucaaguuuggugcucgucgugagccugggagccaucuccuuuuggaugugcucuaacgguucguuacagugccggauuuguaucuga

SEQ ID NO: 137362 - RNA, 1701 nt, Artificial Sequence
  derived and/or modified CDS sequence (opt3) from hemagglutinin__InfluenzaA__AFN18559
augaaggccauccuggugguccuccuuuacaccuucgcuacagcaaacgccgacacucugugcauuggcuaucacgcgaauaacagcacggauaccguugacacaguguuggagaaaaauguaacugugacccauuccgucaacuuacuggaagauaagcacaaugggaaacuauguaagcucagaggaguggcuccccugcaucuugguaaaugcaacauagccggcuggauccuggggaauccugagugugaaucuuugucaacagcaaguagcugguccuacauuguugagaccucuucgucagacaacggaacuugcuauccaggcgauuuuaucgacuacgaggagcucagggagcagcugagcaguguguccucuuucgaacgguuugagauuuucccgaagacaagcuccuggcccaaucacgauucaaacaagggugucaccgccgcuuguccucaugcaggggccaaaaguuuuuauaagaaucugaucuggcucgugaaaaagggaaacagcuacccaaaauuaucuaaguccuauauaaaugacaagggcaaagaaguacugguucuuuggggcauccaccaccccucaacgagcgcugaucaacagaacuuguaccagaaugccgacgcguacguguucgucgggacuucccgcuauucuaagaaauuuaagccugagauugcaauccgaccaaaagugcgugaucaggagggaagaaugaacuacuauuggacccugguggaacccggugacaagauuacauucgaggccacuggcaaccuagucguuccuagguacgcuuuugccauggaacggaaugcaggguccggaaucauaauuagcgauaccccagugcaugacugcaacacaaccugucaaacgccgaaaggcgcuaucaauacuucgcuccccuuccagaacauucacccuaucacaaucgguaagugcccaaaguauguaaaaucuaccaagcugcgccuugccacugggcugagaaaugugcccuccauucagucaaggggauuguuuggcgcgauagccggcuucaucgaagggggauggacagguauggucgacggcugguacggguaucaucaccagaacgaacaaggaaguggcuacgcagcugaucucaaaagcacccagaaugccauugacgagaucacgaacaaggugaauaguguuauagagaaaaugaacacccaguuuacagcuguggguaaggaguucaaucaccuggaaaagcggauugaaaacuuaaauaaaaaggucgaugacggguuccuggauaucuggacuuacaacgccgagcuccuugugcuguuggaaaaugagcgcacccuagacuaucaugauucuaacguaaagaaccuguacgagaagguucgaagccagcucaaaaauaacgcaaaggaaaucggcaauggauguuuugaguucuaucacaagugcgacaacacauguauggaaucagugaaaaauggcacuuacgauuauccuaaguacagugaggaagccaaacugaacagagaggagauugacggggucaaacuugaauccaccaggaucuaucaaauucuggcuauauacagcacaguggcgucuucauugguccucgugguuagucugggagcaaucagcuuuuggaugugcuccaaugguucuuuacagugccggauuuguaucuga

SEQ ID NO: 137363 - RNA, 1701 nt, Artificial Sequence; identical to SEQ ID NO: 131583
  derived and/or modified CDS sequence (opt3) from hemagglutinin__InfluenzaA__AFN18561

SEQ ID NO: 137364 - RNA, 1701 nt, Artificial Sequence; identical to SEQ ID NO: 131819
  derived and/or modified CDS sequence (opt3) from hemagglutinin__InfluenzaA__AFN18563

SEQ ID NO: 137365 - RNA, 1701 nt, Artificial Sequence
  derived and/or modified CDS sequence (opt3) from hemagglutinin__InfluenzaA__AFN18565
augaaggccauccuggugguccuccuuuacaccuucgcuacagcaaacgccgacacucugugcauuggcuaucacgcgaauaacagcacggauaccguugacacaguguuggagaagaauguaacugugacccauuccgucaacuuacuggaagauaagcacaaugggaaacuauguaagcucagaggaguggcuccccugcaucuugguaaaugcaacauagccggcuggauccuggggaauccugagugugaaucuuugucaacagcaaguagcugguccuacauuguugagaccucuucgucagacaacggaacuugcuauccaggcgauuuuaucgacuacgaagaacucagggagcagcugagcaguguguccucuuucgaacgguuugagauuuucccgaagacaagcuccuggcccaaucacgauucaaacaagggugucaccgccgcuuguccucaugcaggggccaaaaguuuuuauaagaaucugaucuggcucgugaaaaagggaaacagcuacccaaaauuaucuaaguccuauauaaaugacaagggcaaagaaguacugguucuuuggggcauccaccaccccucaacgagcgcugaucaacagaguuuguaccagaacgccgacgcguacguguucgucgggacuucucgcuauuccaagaaauuuaagccugagauugcaauccgaccaaaagugcgugaucaggagggaagaaugaauuacuauuggacccugguggaacccggugacaagauuacauucgaggccacuggcaaccuagucguuccuagguacgcuuuugccauggugcggaacgcagggagcggaaucauaauuucggauaccccaguacaugacugcaauacaaccugucaaacgccgaaaggcgcuaucaacacuucucuccccuuccagaauauucacccuaucacaaucgguaagugcccaaaguaugugaaauccaccaagcugcgccuugccacugggcugagaaacguccccucaauucagaguaggggauuguuuggcgcgauagccggcuucaucgaagggggauggacagguaugguggacggcugguacggguaucaucaccagaaugagcaaggaagcggcuacgcagcugaucucaaauccacccagaacgccauugacgaaaucacgaauaagguuaacucugugauagagaaaaugaauacccaguuuacagcugucgguaaggaguucaaccaccuggaaaagcggauggagaauuuaaacaaaaagguggaugacggguuccuggauauuuggacuuacaaugccgaacuccuuguacuguuggagaacgaacgcacccuagacuaucaugauagcaauguuaaaaaccuguacgagaaggugcgaucacagcucaaaaacaaugcaaaggagaucggcaacggauguuuugaguucuaucacaagugcgacaauacauguauggagagugucaaaaacggcacuuacgauuauccuaaguacuccgaagaggccaaacugaauagagaagagaucgacggggugaaacuugagagcaccaggauuuaucaaauccuggcuauuuacucuacagucgcgucaaguuuggugcucguugugagccugggagcaauauccuuuuggaugugcucuaacgguucguuacagugccggaucuguauuuga

SEQ ID NO: 137366 - RNA, 1701 nt, Artificial Sequence
  derived and/or modified CDS sequence (opt3) from hemagglutinin__InfluenzaA__AFN18570
augaaggccauccuggugguccuccuuuacaccuucgcuacagcaaacgccgacacucugugcauuggcuaucacgcgaauaacagcacggauaccguugacacaguguuggagaaaaauguaacugugacccauuccgucaacuuacuggaagauaagcacaaugggaaacuauguaagcucagaggaguggcuccccugcaucuugguaaaugcaacauagccggcuggauccuggggaauccugagugugaaucuuugucaacaguuaguagcugguccuacauuguggagaccucuucgucagacaacggaacuugcuauccaggcgauuuuaucgacuacgaggagcucagggagcagcugagcagugucuccucuuucgaacgguuugagauuuucccgaagacaagcuccuggcccaaucacgauucaaacaagggugugaccgcagccuguccucaugcuggggcaaaaaguuuuuauaagaaucugaucuggcucguaaagaagggaaacagcuacccaaaauuaucuaaguccuauauaaaugacaagggcaaagaaguucuggugcuuuggggcauccaccaccccucaacgagcgccgaucaacagaguuuguaccagaacgcugacgccuacgucuucguggggacuucucgcuauuccaagaaauuuaagccugagauugcgauccgaccaaaagugcgugaucaggagggaagaaugaauuacuauuggacccuggucgaacccggugacaagauuacauucgaggcaacuggcaaccuaguugugccuagguacgccuuugcuauggaacggaacgccgggagcggaaucauaauuucggauaccccaguacaugacugcaauacaaccugucaaacgccgaaaggcgcaaucaacacuucucuccccuuccagaauauucacccuaucacaaucgguaagugcccaaaguaugugaaauccaccaagcugcgccuugcuacugggcugagaaacguccccucaauucagaguaggggauuguuuggcgccauagcgggcuucaucgaagggggauggacagguaugguggacggcugguacggguaucaucaccagaaugaacaaggaagcggcuacgccgcagaucucaaauccacccagaacgcuauugacgagaucacgaauaagguuaacucugugauagagaaaaugaauacccaguuuacagccgucgguaaggaguucaaccaccuggaaaagcggauugaaaauuuaaacaaaaagguggaugacggguuccuggauaucuggacuuacaaugcugagcuccuuguacuguuggaaaacgagcgcacccuagacuaucaugauagcaauguuaaaaaccuguacgagaaggugcgaucacagcucaaaaacaaugccaaggaaaucggcaacggauguuuugaguucuaucacaagugcgacaauacauguauggaaagugucaaaaacggcacuuacgauuauccuaaguacuccgaggaagcaaaacugaauagagaggagauugacggggugaaacuugaaagcaccaggaucuaucaaauucuggccauauacucuacagucgcuucaaguuuggugcucguugugagccugggagcgaucuccuuuuggaugugcucuaacgguucguuacagugccggauuuguaucuga

SEQ ID NO: 137367 - RNA, 1701 nt, Artificial Sequence; identical to SEQ ID NO: 130717
  derived and/or modified CDS sequence (opt3) from hemagglutinin__InfluenzaA__AFN18580

SEQ ID NO: 137368 - RNA, 1701 nt, Artificial Sequence; identical to SEQ ID NO: 130959
  derived and/or modified CDS sequence (opt3) from hemagglutinin__InfluenzaA__AFN18590

SEQ ID NO: 137369 - RNA, 1701 nt, Artificial Sequence
  derived and/or modified CDS sequence (opt3) from hemagglutinin__InfluenzaA__AFN18600
augaaggccauccuggugguccuccuuuacaccuucgcuacagcaaacgccgacacucugugcauuggcuaucacgcgaauaacagcacggauaccguugacacaguguuggagaaaaauguaacugugacccauuccgucaacuuacuggaagauaagcacaaugggaaacuauguaagcucagaggaguggcuccccugcaucuugguaaaugcaacauagccggcuggauccuggggaauccugagugugaaucuuugucaacagcaaguagcugguccuacauuguugagaccucuucgucagacaacggaacuugcuauccaggcgauuuuaucgacuacgaggagcucagggagcagcugagcaguguguccucuuucgaacgguuugagauuuucccgaagacaagcuccuggcccaaucacgauucaaacaagggugucaccgccgcuuguccucaugcaggggccaaaaguuuuuauaagaaucugaucuggcucgugaaaaagggaaacagcuacccaaaauuaucuaaguccuauauaaaugacaagggcaaagaaguacugguucuuuggggcauccaccaccccucaacgagcgcugaucaacagaacuuguaccagaaugccgacgcguacguguucgucgggacuucccgcuauucuaagaaauuuaagccugagauugcaauccgaccaaaagugcgugaucaggagggaagaaugaacuacuauuggacccugguggaacccggugacaagauuacauucgaggccacuggcaaccuagucguuccuagguacgcuuuugccauggaacggaaugcaggguccggaaucauaauuagcgauaccccagugcaugacugcaacacaaccugucaaacgccgaaaggcgcuaucaauacuucgcuccccuuccagaacauucacccuaucacaaucgguaagugcccaaaguauguaaaaucuaccaagcugcgccuugccacugggcugagaaaugugcccuccauucagucaaggggauuguuuggcgcgauagccggcuucaucgaagggggauggacagguauggucgacggcugguacggguaucaucaccagaacgaacaaggaaguggcuacgcagcugaucucaaaagcacccagaaugccauugacgagaucacgaacaaggugaauaguguuauagagaaaaugaacacccaguuuacagcuguggguaaggaguucaaucaccuggaaaagcggauugaaaacuuaaauaaaaaggucgaugacggguuccuggauaucuggacuuacaacgccgagcuccuugugcuguuggaaaaugagcgcacccuagacuaucaugauucuaacguaaagaaccuguacgagaagguucgaagccagcucaaaaauaacgcaaaggaaaucggcaauggauguuuugaguucuaucacaagugcgacaacgccuguauggaaucagugaaaaauggcacauacgauuauccuaaguacagugaggaagcuaaacugaacagagaggagauugacggggucaaacuugaauccacuaggaucuaucaaauucuggcgauauacagcaccguggcaucuucauugguccucgugguuagucugggagccaucagcuuuuggaugugcuccaaugguucuuuacagugccggauuuguaucuga

SEQ ID NO: 137370 - RNA, 1701 nt, Artificial Sequence; identical to SEQ ID NO: 130717
  derived and/or modified CDS sequence (opt3) from hemagglutinin__InfluenzaA__AFN18610

SEQ ID NO: 137371 - RNA, 1701 nt, Artificial Sequence
  derived and/or modified CDS sequence (opt3) from hemagglutinin__InfluenzaA__AFN18617
augaaggccauccuggugguccuccuuuacaccuucgcuacagcaaacgccgacacucugugcauuggcuaucacgcgaauaacagcacggauaccguugacacaguguuggagaaaaauguaacugugacccauuccgucaacuuacuggaagauaagcacaaugggaaacuauguaagcucagaggaguggcuccccugcaucuugguaaaugcaacauagccggcuggauccuggggaauccugagugugaaucuuugucaacagcaaguagcugguccuacauuguugagaccucuucgucagacaacggaacuugcuauccaggcgauuuuaucgacuacgaagaacucagggagcagcugagcaguguguccucuuucgaacgguuugagauuuucccgaagacaagcuccuggcccaaucacgauucaaacaagggugucaccgccgcuuguccucaugcaggggccaaaaguuuuuauaagaaucugaucuggcucgugaaaaagggaaacagcuacccaaaauuaucuaaguccuauauaaaugacaagggcaaagaaguacugguucuuuggggcauccaccaccccucaacgagcgcugaucaacagaguuuguaccagaacgccgacgcguacguguucgucgggacuucucgcuauuccaagaaauuuaagccugagauugcaauccgaccaaaagugcgugaucaggagggaagaaugaauuacuauuggacccugguggaacccggugacaagauuacauucgaggccacuggcaaccuagucguuccuagguacgcuuuugccauggugcggaacgcagggagcggaaucauaauuucggauaccccaguacaugacugcaauacaaccugucaaacgccgaaaggcgcuaucaacacuucucuccccuuccagaauauucacccuaucacaaucgguaagugcccaaaguaugugaaauccaccaagcugcgccuugccacugggcugagaaacguccccucaauucagaguaggggauuguuuggcgcgauagccggcuucaucgaagggggauggacagguaugguggacggcugguacggguaucaucaccagaaugagcaaggaagcggcuacgcagcugaucucaaauccacccagucugccauugacgaaaucacgaacaagguuaauagcgugauagagaaaaugaacacccaguuuacagcugucgguaaggaguucaaucaccuggaaaagcggauugagaacuuaaauaaaaagguggaugacggguuccuggauaucuggacuuacaacgccgaacuccuuguacuguuggagaaugaacgcacccuagacuaucaugauucaaacguuaaaaaucuguacgagaaggugcgaagucagcucaaaaacaacgcaaaggagaucggcaauggauguuuugaguucuaucacaagugcgacaacacauguauggaguccgucaaaaauggcacuuacgauuauccuaaguacagcgaagaggccaaacugaagagagaagagauugacggggugaaacuugagucuaccaggaucuaucaaauucuggcuauauacucaacagucgcgaguagcuuggugcucguugugucccugggagcaaucucuuuuuggaugugcucgaacgguagcuuacagugccggauuuguaucuga

SEQ ID NO: 137372 - RNA, 1701 nt, Artificial Sequence; identical to SEQ ID NO: 131578
  derived and/or modified CDS sequence (opt3) from hemagglutinin__InfluenzaA__AFN18622

SEQ ID NO: 137373 - RNA, 1701 nt, Artificial Sequence; identical to SEQ ID NO: 130717
  derived and/or modified CDS sequence (opt3) from hemagglutinin__InfluenzaA__AFN18629

SEQ ID NO: 137374 - RNA, 1701 nt, Artificial Sequence; identical to SEQ ID NO: 130959
  derived and/or modified CDS sequence (opt3) from hemagglutinin__InfluenzaA__AFN18634

SEQ ID NO: 137375 - RNA, 1701 nt, Artificial Sequence
  derived and/or modified CDS sequence (opt3) from hemagglutinin__InfluenzaA__AFN18644
augaaggccauccuggugguccuccuuuacaccuucgcuacagcaaacgccgacacucugugcauuggcuaucacgcgaauaacagcacggauaccguugacacaguguuggagaagaauguaacugugacccauuccgucaacuuacuggaagauaagcacaaugggaaacuauguaagcucagaggaguggcuccccugcaucuugguaaaugcaacauagccggcuggauccuggggaauccugagugugaaucuuugucaacagcaaguagcugguccuacauuguugagaccucuucgucagacaacggaacuugcuauccaggcgauuuuaucgacuacgaagaacucagggagcagcugagcaguguguccucuuucgaacgguuugagauuuucccgaagacaagcuccuggcccaaucacgauucaaacaagggugucaccgccgcuuguccucaugcaggggccaaaaguuuuuauaagaaucugaucuggcucgugaaaaagggaaacagcuacccaaaauuaucuaaguccuauauaaaugacaagggcaaagaaguacugguucuuuggggcauccaccaccccucaacgagcgcugaucaacagaguuuguaccagaacgccgacgcguacguguucgucgggacuucucgcuauuccaagaaauuuaagccugagauugcaauccgaccaaaagugcgugaucaggagggaagaaugaauuacuauuggacccugguggaacccggugacaagauuacauucgaggccacuggcaaccuagucguuccuagguacgcuuuugccauggugcggaacgcagggagcggaaucauaauuucggauaccccaguacaugacugcaauacaaccugucaaacgccgaaaggcgcuaucaacacuucucuccccuuccagaauauucacccuaucacaaucgguaagugcccaaaguaugugaaauccaccaagcugcgccuugccacugggcugagaaacguccccucaauucagaguaggggauuguuuggcgcgauagccggcuucaucgaagggggauggacagguaugguggacggcugguacggguaucaucaccagaaugagcaaggaagcggcuacgcagcugaucucaaauccacccagucugccauugacgaaaucacgaacaagguuaauagcgugauagagaaagucaacacccaguuuacagcuguggguaaggaguucaaucaccuggaaaagcggauugagaacuuaaauaaaaagguagaugacggguuccuggauaucuggacuuacaacgccgaacuccuuguucuguuggagaaugaacgcacccuagacuaucaugauucaaacgugaaaaaucuguacgagaagguccgaagucagcucaaaaacaacgcaaaggagaucggcaauggauguuuugaguucuaucacaagugcgacaacacauguauggaguccgugaaaaauggcacuuacgauuauccuaaguacagcgaagaggccaaacugaacagagaagagauugacggggucaaacuugagucuaccaggaucuaucaaauucuggcuauauacucaacaguggcgaguagcuugguucucgugguaucccugggagcaaucucuuuuuggaugugcucgaaugguagcuuacagugccggauuuguaucuga

SEQ ID NO: 137376 - RNA, 1701 nt, Artificial Sequence; identical to SEQ ID NO: 131578
  derived and/or modified CDS sequence (opt3) from hemagglutinin__InfluenzaA__AFN18654

SEQ ID NO: 137377 - RNA, 1701 nt, Artificial Sequence; identical to SEQ ID NO: 130717
  derived and/or modified CDS sequence (opt3) from hemagglutinin__InfluenzaA__AFN18664

SEQ ID NO: 137378 - RNA, 1701 nt, Artificial Sequence; identical to SEQ ID NO: 130959
  derived and/or modified CDS sequence (opt3) from hemagglutinin__InfluenzaA__AFN18674

SEQ ID NO: 137379 - RNA, 1701 nt, Artificial Sequence; identical to SEQ ID NO: 130717
  derived and/or modified CDS sequence (opt3) from hemagglutinin__InfluenzaA__AFN18684

SEQ ID NO: 137380 - RNA, 1701 nt, Artificial Sequence; identical to SEQ ID NO: 131578
  derived and/or modified CDS sequence (opt3) from hemagglutinin__InfluenzaA__AFN18694

SEQ ID NO: 137381 - RNA, 1701 nt, Artificial Sequence
  derived and/or modified CDS sequence (opt3) from hemagglutinin__InfluenzaA__AFN18704
augaaggccauccuggugguccuccuuuacaccuucgcuacagcaaacgccgacacucugugcauuggcuaucacgcgaauaacagcacggauaccguugacacaguguuggagaagaauguaacugugacccauuccgucaacuuacuggaagauaagcacaaugggaaacuauguaagcucagaggaguggcuccccugcaucuugguaaaugcaacauagccggcuggauccuggggaauccugagugugaaucuuugucaacagcaaguagcugguccuacauuguugagaccucuucgucagacaacggaacuugcuauccaggcgauuuuaucgacuacgaagaacucagggagcagcugagcaguguguccucuuucgaacgguuugagauuuucccgaagacaagcuccuggcccaaucacgauucaaacaagggugucaccgccgcuuguccucaugcaggggccaaaaguuuuuauaagaaucugaucuggcucgugaaaaagggaaacagcuacccaaaauuaucuaaguccuauauaaaugacaagggcaaagaaguacugguucuuuggggcauccaccaccccucaacgagcgcugaucaacagaguuuguaccagaacgccgacgcguacguguucgucgggacuucucgcuauuccaagaaauuuaagccugagauugcaauccgaccaaaagugcgugaucaggagggaagaaugaauuacuauuggacccugguggaacccggugacaagauuacauucgaggccacuggcaaccuagucguuccuagguacgcuuuugccauggugcggaacgcagggagcggaaucauaauuucggauaccccaguacaugacugcaauacaaccugucaaacgccgaaaggcgcuaucaacacuucucuccccuuccagaauauucacccuaucacaaucgguaagugcccaaaguaugugaaauccaccaagcugcgccuugccacugggcugagaaacguccccucaauucagaguaggggauuguuuggcgcgauagccggcuucaucgaagggggauggacagguaugguggacggcugguacggguaucaucaccagaaugagcaaggaagcggcuacgcagcugaucucaaauccacccagucugccauugacgaaaucacgaacaagguuaauagcgugauagagaaaaugaacacccaguuuacagcugucgguaaggaguucaaucaccuggaaaagcggauugagaacuuaaauaaaaagguggaugacggguuccuggauaucuggacuuacaacgccgaacuccuuguacuguuggagaaugaacgcacccuagacuaucaugauucaaacguuaaaaaucuguacgagaaggugcgaagucagcucaaaaacaacgcaaaggagaucggcaauggauguuuugaguucuaucacaagugcgacaacacauguauggaguccgucaaaaauggcacuuacgauuauccuaaguacagcgaagaggccaaacugaacagagaagagauugacggggugaaacuugagucuaccaggaucuaucaaauucuggcuauauacucaacagucgcgaguagcuuggugcucguugugucccugggagcaaucucuuuuuggaugugcucgaaugguagcuuacagugccggauuuguaucuga

SEQ ID NO: 137382 - RNA, 1701 nt, Artificial Sequence; identical to SEQ ID NO: 132951
  derived and/or modified CDS sequence (opt3) from hemagglutinin__InfluenzaA__AFN18714

SEQ ID NO: 137383 - RNA, 1701 nt, Artificial Sequence; identical to SEQ ID NO: 130717
  derived and/or modified CDS sequence (opt3) from hemagglutinin__InfluenzaA__AFN18721

SEQ ID NO: 137384 - RNA, 1701 nt, Artificial Sequence; identical to SEQ ID NO: 133383
  derived and/or modified CDS sequence (opt3) from hemagglutinin__InfluenzaA__AFN18725

SEQ ID NO: 137385 - RNA, 1701 nt, Artificial Sequence
  derived and/or modified CDS sequence (opt3) from hemagglutinin__InfluenzaA__AFN18735
augaaggccauccuggugguccuccuuuacaccuucgcuacagcaaacgccgacacucugugcauuggcuaucacgcgaauaacagcacggauaccguugacacaguguuggagaagaauguaacugugacccauuccgucaacuuacuggaagauaagcacaaugggaaacuauguaagcucagaggaguggcuccccugcaucuugguaaaugcaacauagccggcuggauccuggggaauccugagugugaaucuuugucaacagcaaguagcugguccuacauuguugagaccucuucgucagacaacggaacuugcuauccaggcgauuuuaucgacuacgaggagcucagggagcagcugagcaguguguccucuuucgaacgguuugagauuuucccgaagacaagcuccuggcccaaucacgauucaaacaagggugucaccgccgcuuguccucaugcaggggccaaaaguuuuuauaagacgcugaucuggcucgugaaaaagggaaauagcuacccaaaauuaucuaaguccuauauaaacgacaagggcaaagaaguacugguucuuuggggcauccaccaccccucaacuagcgcugaucaacagaguuuguaccagaaugccgacgcguacguguucgucgggaccucucgcuauuccaagaaauuuaagccugagauugcaauccgaccaaaagugcgugaucaggagggaagaaugaacuacuauuggacacugguggaacccggugacaagauuacuuucgaggccaccggcaaucuagucguuccuagguacgcuuuugccauggaacggaacgcagggagcggaaucauaauuucggauacaccagugcaugacugcaacaccacgugucaaacuccgaaaggcgcuaucaauacaucucuccccuuccagaacauucacccuaucaccaucgguaagugcccaaaguauguaaaauccacuaagcugcgccuugccacagggcugagaaaugugcccucaauucagaguaggggauuguuuggcgcgauagccggcuucaucgaagggggauggaccgguauggucgacggcugguacggguaucaucaccagaacgaacaaggaagcggcuacgcagcugaucucaaauccacgcagaaugccauugacgagaucaccaacaagguaaauucuguuauagagaaaaugaacacacaguuuacugcuguggguaaggaguucaaucaccuggaaaagcggauugaaaacuuaaauaaaaaggucgaugacggguuccuggauaucuggaccuacaacgccgagcuccuugugcuguuggaaaaugagcgcacacuagacuaucaugauagcaacgugaaaaaucuguacgagaagguucgaucacagcucaaaaacaacgcaaaggaaaucggcaauggauguuuugaguucuaucacaagugcgacaacacuuguauggaaagugugaaaaauggcaccuacgauuauccuaaguacuccgaggaagccaaacugaacagagaggagauugacggggucaaacuugaaagcacaaggaucuaucaaauucuggcuauauacucuaccguggcgucaaguuugguccucgugguuagccugggagcaaucuccuuuuggaugugcucuaaugguucguuacagugccggauuuguaucuga

SEQ ID NO: 137386 - RNA, 1701 nt, Artificial Sequence; identical to SEQ ID NO: 130717
  derived and/or modified CDS sequence (opt3) from hemagglutinin__InfluenzaA__AFN18742

SEQ ID NO: 137387 - RNA, 1701 nt, Artificial Sequence; identical to SEQ ID NO: 131819
  derived and/or modified CDS sequence (opt3) from hemagglutinin__InfluenzaA__AFN18747

SEQ ID NO: 137388 - RNA, 1701 nt, Artificial Sequence
  derived and/or modified CDS sequence (opt3) from hemagglutinin__InfluenzaA__AFN18757
augaaggccauccuggugguccuccuuuacaccuucgcuacagcaaacgccgacacucugugcauuggcuaucacgcgaauaacagcacggauaccguugacacaguguuggagaagaauguaacugugacccauuccgucaacuuacuggaagauaagcacaaugggaaacuauguaagcucagaggaguggcuccccugcaucuugguaaaugcaacauagccggcuggauccuggggaauccugagugugaaucuuugucaacagcaaguagcugguccuacauuguugagaccucuucgucagacaacggaacuugcuauccaggcgauuuuaucgacuacgaggagcucagggagcagcugagcaguguguccucuuucgaacgguuugagauuuucccgaagacaagcuccuggcccaaucacgauucaaacaagggugucaccgccgcuuguccucaugcaggggccaaaaguuuuuauaagaaucugaucuggcucgugaaaaagggaaacagcuacccaaaauuaucuaaguccuauauaaaugacaagggcaaagaaguacugguucuuuggggcauccaccaccccucaacgagcgcugaucaacagaguuuguaccagaacgccgacgcguacguguucgucgggacuucucgcuauuccaagaaauuuaagccugagauugcaauccgaccaaaagugcgugaucaggagggaagaaugaauuacuauuggacccugguggaacccggugacaagauuacauucgaggccacuggcaaccuagcugucccuagguacgccuuugcaauggaacggaacgcugggagcggaaucauaauuucggauaccccaguucaugacugcaauacaaccugucaaacgccgaaaggcgccaucaacacuucucuccccuuccagaauauucacccuaucacaaucgguaagugcccaaaguaugugaaauccaccaagcugcgccuugcgacugggcugagaaacguacccucaauucagaguaggggauuguuuggcgccauagcaggcuucaucgaagggggauggacagguaugguggacggcugguacggguaucaucaccagaaugaacaaggaagcggcuacgcugccgaucucaaauccacccagaacgcuauugacgagaucacgaauaaggucaacucugugauagagaaaaugaauacccaguuuacagccguugguaaggaguucaaccaccuggaaaagcggauugaaaauuuaaacaaaaagguggaugacggguuccuggauaucuggacuuacaaugcagagcuccuuguccuguuggaaaacgagcgcacccuagacuaucaugauagcaaugugaaaaaccuguacgagaagguacgaucacagcucaaaaacaaugccaaggaaaucggcaacggauguuuugaguucuaucacaagugcgacaauacauguauggaaaguguuaaaaacggcacuuacgauuauccuaaguacuccgaggaagcuaaacugaauagagaggagauugacggggugaaacuugaaagcaccaggaucuaucaaauucuggcgauauacucuacagucgcaucaaguuuggugcucgucgugagccugggagccaucuccuuuuggaugugcucuaacgguucguuacagugccggauuuguaucuga

SEQ ID NO: 137389 - RNA, 1701 nt, Artificial Sequence; identical to SEQ ID NO: 130717
  derived and/or modified CDS sequence (opt3) from hemagglutinin__InfluenzaA__AFN18767

SEQ ID NO: 137390 - RNA, 1701 nt, Artificial Sequence; identical to SEQ ID NO: 137381
  derived and/or modified CDS sequence (opt3) from hemagglutinin__InfluenzaA__AFN18774

SEQ ID NO: 137391 - RNA, 1701 nt, Artificial Sequence; identical to SEQ ID NO: 130717
  derived and/or modified CDS sequence (opt3) from hemagglutinin__InfluenzaA__AFN18776

SEQ ID NO: 137392 - RNA, 1701 nt, Artificial Sequence; identical to SEQ ID NO: 131583
  derived and/or modified CDS sequence (opt3) from hemagglutinin__InfluenzaA__AFN18778

SEQ ID NO: 137393 - RNA, 1701 nt, Artificial Sequence; identical to SEQ ID NO: 130717
  derived and/or modified CDS sequence (opt3) from hemagglutinin__InfluenzaA__AFN18784

SEQ ID NO: 137394 - RNA, 1701 nt, Artificial Sequence; identical to SEQ ID NO: 131583
  derived and/or modified CDS sequence (opt3) from hemagglutinin__InfluenzaA__AFN18789

SEQ ID NO: 137395 - RNA, 1701 nt, Artificial Sequence; identical to SEQ ID NO: 130717
  derived and/or modified CDS sequence (opt3) from hemagglutinin__InfluenzaA__AFN18799

SEQ ID NO: 137396 - RNA, 1701 nt, Artificial Sequence; identical to SEQ ID NO: 130717
  derived and/or modified CDS sequence (opt3) from hemagglutinin__InfluenzaA__AFN18809

SEQ ID NO: 137397 - RNA, 1701 nt, Artificial Sequence; identical to SEQ ID NO: 131819
  derived and/or modified CDS sequence (opt3) from hemagglutinin__InfluenzaA__AFN18816

SEQ ID NO: 137398 - RNA, 1701 nt, Artificial Sequence; identical to SEQ ID NO: 130717
  derived and/or modified CDS sequence (opt3) from hemagglutinin__InfluenzaA__AFN18818

SEQ ID NO: 137399 - RNA, 1701 nt, Artificial Sequence
  derived and/or modified CDS sequence (opt3) from hemagglutinin__InfluenzaA__AFN18820
augaaggccauccuggugguccuccuuuacaccuucgcuacagcaaacgccgacacucugugcauuggcuaucacgcgaauaacagcacggauaccguugacacaguguuggagaaaaauguaacugugacccauuccgucaacuuacuggaagauaagcacaaugggaaacuauguaagcucagaggaguggcuccccugcaucuugguaacugcaauauagccggcuggauccuggggaacccugagugugaaucuuugucaacagcaaguagcugguccuacauuguugagaccucuucgucagacaauggaacuugcuauccaggcgauuuuaucgacuacgaggagcucagggagcagcugagcaguguguccucuuucgaacgguuugagauuuucccgaaaacaagcuccuggcccaaccacgauucaaauaagggugucaccgccgcuuguccucaugcaggggccaagaguuuuuauaaaaaccugaucuggcucgugaagaaaggaaauagcuacccaaaguuaucuaaauccuauauaaacgacaagggcaaggaaguacugguucuuuggggcauccaccaccccucaacgagcgcugaucaacagaguuuguaccagaaugccgacgcguacguguucgucgggacuucucgcuauuccaaaaaguuuaaaccugagauugcaauccgaccaaaggugcgugaucaggagggaagaaugaacuacuauuggacccugguggaacccggugacaaaauuacauucgaggccacuggcaaccuagucguuccuagguacgcuuuugccauggaacggaaugcagggagcggaaucauaauuucggauaccccagugcaugacugcaacacaaccugucaaacgccgaagggcgcuaucaauacuucucuccccuuccagaacauucacccuaucacaaucgguaaaugcccaaaguauguaaaguccaccaaacugcgccuugccacugggcugagaaaugugcccucaauucagaguaggggauuguuuggcgcgauagccggcuucaucgaagggggauggacagguauggucgacggcugguacggguaucaucaccagaacgaacaaggaagcggcuacgcagcugaucucaaguccacccagaaugccauugacgagaucacgaacaaaguuaauucugugauagagaagaugaacacccaguuuacagcuguggguaaagaguucaaucaccuggaaaagcggauugaaaacuuaaauaagaaagucgaugacggguuccuggauaucuggacuuacaacgccgagcuccuugugcuguuggaaaaugagcgcacccuagacuaucaugauagcaacguaaagaaccuguacgagaaaguucgaucacagcucaagaauaacgcaaaagaaaucggcaauggauguuuugaguucuaucacaagugcgacaacacauguauggaaagugugaagaauggcacuuacgauuauccuaaauacuccgaggaagccaagcugaacagagaggagauugacggggucaaacuugaaagcaccaggaucuaucaaauucuggcuauauacucuacaguggcgucaaguuugguccucgugguuagccugggagcaaucuccuuuuggaugugcucuaaugguucguuacagugccggauuuguaucuga

SEQ ID NO: 137400 - RNA, 1701 nt, Artificial Sequence; identical to SEQ ID NO: 130717
  derived and/or modified CDS sequence (opt3) from hemagglutinin__InfluenzaA__AFN18822

SEQ ID NO: 137401 - RNA, 1701 nt, Artificial Sequence
  derived and/or modified CDS sequence (opt3) from hemagglutinin__InfluenzaA__AFN18824
augaaggccauccuggugguccuccuuuacaccuucgcuacagcaaacgccgacacucugugcauuggcuaucacgcgaauaacagcacggauaccguugacacaguguuggagaaaaauguaacugugacccauuccgucaacuuacuggaagauaagcacaaugggaaacuauguaagcucagaggaguggcuccccugcaucuugguaaaugcaacauagccggcuggauccuggggaauccugagugugaaucuuugucaacagcaaguagcugguccuacauuguugagaccucuucgucagacaacggaacuugcuauccaggcgauuuuaucgacuacgaggagcucagggagcagcugagcaguguguccucuuucgaacgguuugagauuuucccgaagacaagcuccuggcccaaucacgauucaaacaagggugucaccgccgcuuguccucaugcaggggccaaaaguuuuuauaagaaucugaucuggcucgugaaaaagggaaacagcuacccaaaauuaucuaaguccuauauaaaugacaagggcaaagaaguacugguucuuuggggcauccaccaccccucaacgagcgcugaucaacagaguuuguaccagaacgccgacgcguacguguucgucgggacuucucgcuauuccaagaaauuuaagccugagauugcaauccgaccaaaagugcgugaucaggagggaagaaugaauuacuauuggacccugguggaacccggugacaagauuacauucgaggccacuggcaaccuagucguuccuagguacgcuuuugccauggaacggaacgcagggagcggaaucauaauuucggauaccccagugcaugacugcaauacaaccugucaaacgccgaaaggcgcuaucaacacuucucuccccuuccagaauauucacccuaucacaaucgguaagugcccaaaguauguaaaauccaccaagcugcgccuugccacugggcugagaaacgugcccucaauucagaguaggggauuguuuggcgcgauagccggcuucaucgaagggggauggacagguauggucgacggcugguacggguaucaucaccagaaugaacaaggaagcggcuacgcagcugaucucaaauccacccagaacgccauugacgagaucacgaauaaggugaacucuguuauagagaaaaugaauacccaguuuacagcuguggguaaggaguucaaccaccuggaaaagcggauugaaaauuuaaacaaaaaggucgaugacggguuccuggauaucuggacuuacaaugccgagcuccuugugcuguuggaaaacgagcgcacccuagacuaucaugauagcaauguuaaaaaccuguacgagaagguacgaucacagcucaaaaacaaugcaaaggaaaucggcaacggauguuuugaguucuaucacaagugcgacaauacauguauggaaagugugaaaaacggcacuuacgauuauccuaaguacuccgaggaagccaaacugaauagagaggagauugacggggucaggcuugaaagcacccggaucuaucaaauucuggcuauauacucuacaguggcgucaaguuugguccucgugguuagccugggagcaaucuccuuuuggaugugcucuaacgguucguuacagugccguauuuguaucuga

SEQ ID NO: 137402 - RNA, 1701 nt, Artificial Sequence; identical to SEQ ID NO: 137325
  derived and/or modified CDS sequence (opt3) from hemagglutinin__InfluenzaA__AFN18826

SEQ ID NO: 137403 - RNA, 1701 nt, Artificial Sequence
  derived and/or modified CDS sequence (opt3) from hemagglutinin__InfluenzaA__AFN18828
augaaggccauccuggugguccuccuuuacaccuucgcuacagcaaacgccgacacucugugcauuggcuaucacgcgaauaacagcacggauaccguugacacaguguuggagaaaaauguaacugugacccauuccgucaacuuacuggaagauaagcacaaugggaaacuauguaagcucagaggaguggcuccccugcaucuugguaaaugcaacauagccggcuggauccuggggaauccugagugugaaucuuugucaacagcaaguagcugguccuacauuguugagaccucuucgucagacaacggaacuugcuauccaggcgauuuuaucgacuacgaggagcucagggagcagcugagcaguguguccucuuucgaacgguuugagauuuucccgaagacaagcuccuggcccaaucacgauucaaacaagggugucaccgccgcuuguccucaugcaggggccaaaaguuuuuauaagaaucugaucuggcucgugaaaaagggaaacagcuacccaaaauuaucuaaguccuauauaaaugacaagggcaaagaaguacugguucuuuggggcauccaccaccccucaacgagcgcugaucaacagaguuuguaccagaacgccgacgcguacguguucgucgggacuucucgcuauuccaagaaauuuaagccugagauugcaauccgaccaaaagugcgugaucaggagggaagaaugaauuacuauuggacccugguggaacccggugacaagauuacauucgaggccacuggcaaccuagucguuccuagguacgcuuuugccauggaacggaacgcagggagcggaaucauaauuucggauaccccagugcaugacugcaauacaaccugucaaacgccgaaaggcgcuaucaacacuucucuccccuuccagaauauucacccuaucacaaucgguaagugcccaaaguauguaaaauccauuaagcugcgccuugccaccgggcugagaaacgugcccucaauacagaguaggggauuguuuggcgcgaucgccggcuucauugaagggggauggacugguauggucgacggcugguacggguaucaucaccagaaugaacaaggaagcggcuacgcagcugaucucaaauccacacagaacgccaucgacgagauaaccaauaaggugaacucuguuauugagaaaaugaauacgcaguuuaccgcuguggguaaggaguucaaccaccuggaaaagcggaucgaaaauuuaaacaaaaaggucgaugacggguuccuggauaucuggacauacaaugccgagcuccuugugcuguuggaaaacgagcgcacucuagacuaucaugauagcaauguaaagaaccuguacgagaagguucgaucacagcucaaaaacaaugcaaaggaaauuggcaacggauguuuugaguucuaucacaagugcgacaauaccuguauggaaagugugaaaaacggcacauacgauuauccuaaguacuccgaggaagccaaacugaauagagaggagaucgacggggucaaacuugaaagcacuaggauuuaucaaauacuggcuaucuacucuaccguggcgucaaguuugguccucgugguuagccugggagcaauuuccuuuuggaugugcucuaacgguucguuacagugccggaucuguaucuga

SEQ ID NO: 137404 - RNA, 1701 nt, Artificial Sequence; identical to SEQ ID NO: 137388
  derived and/or modified CDS sequence (opt3) from hemagglutinin__InfluenzaA__AFN18830

SEQ ID NO: 137405 - RNA, 1701 nt, Artificial Sequence; identical to SEQ ID NO: 130717
  derived and/or modified CDS sequence (opt3) from hemagglutinin__InfluenzaA__AFN18832

SEQ ID NO: 137406 - RNA, 1701 nt, Artificial Sequence; identical to SEQ ID NO: 131583
  derived and/or modified CDS sequence (opt3) from hemagglutinin__InfluenzaA__AFN18834

SEQ ID NO: 137407 - RNA, 1701 nt, Artificial Sequence
  derived and/or modified CDS sequence (opt3) from hemagglutinin__InfluenzaA__AFN18849
augaaggccauccuggugguccuccuuuacaccuucgcuacagcaaacgccgacacucugugcauuggcuaucacgcgaauaacagcacggauaccguugacacaguguuggagaagaauguaacugugacccauuccgucaacuuacuggaagauaagcacaaugggaaacuauguaagcucagaggaguggcuccccugcaucuugguaaaugcaacauagccggcuggauccuggggaauccugagugugaaucuuugucaacagcaaguagcugguccuacauuguugagaccucuucgucagacaacggaacuugcuauccaggcgauuuuaucgacuacgaggagcucagggagcagcugagcaguguguccucuuucgaacgguuugagauuuucccgaagacaagcuccuggcccaaucacgauucaaacaagggugucaccgccgcuuguccucaugcaggggccaaaaguuuuuauaagaaucugaucuggcucgugaaaaagggaaacagcuacccaaaauuaucuaaguccuauauaaaugacaagggcaaagaaguacugguucuuuggggcauccaccaccccucaacgagcgcugaucaacagaguuuguaccagaacguggacgccuacgucuucguggggacuucucgcuauuccaagaaauuuaagccugagauugcgauccgaccaaaagugcgugaucaggagggaagaaugaauuacuauuggacccuggucgaacccggugacaagauuacauucgaggcaacuggcaaccuaguugugccuagguacgccuuugcuauggaacggaacgccgggagcggaaucauaauuucggauaccccaguacaugacugcaauacaaccugucaaacgccgaaaggcgcaaucaacacuucucuccccuuccagaauauucacccuaucacaaucgguaagugcccaaaguaugugaaauccaccaagcugcgccuugcuacugggcugagaaacguccccucaauucagaguaggggauuguuuggcgccauagcgggcuucaucgaagggggauggacagguaugguggacggcugguacggguaucaucaccagaaugaacaaggaagcggcuacgccgcagaucucaaauccacccagaacgcuauugacgagaucacgaauaagguuaacucugugauagagaaaaugaauacccaguuuacagccgucgguaaggaguucaaccaccuggaaaagcggauugaaaauuuaaacaaaaagguggaugacggguuccuggauaucuggacuuacaaugcugagcuccuuguacuguuggaaaacgagcgcacccuagacuaucaugauagcaauguuaaaaaccuguacgagaaggugcgaucacagcucaaaaacaaugccaaggaaaucggcaacggauguuuugaguucuaucacaagugcgacaauacauguauggaaagugucaaaaacggcacuuacgauuauccuaaguacuccgaggaagcaaaacugaauagagaggagauugacggggugaaacuugaaagcaccaggaucuaucaaauucuggccauauacucuacagucgcuucaaguuuggugcucguugugagccugggagcgaucuccuuuuggaugugcucuaacgguucguuacagugccggauuuguaucuga

SEQ ID NO: 137408 - RNA, 1701 nt, Artificial Sequence
  derived and/or modified CDS sequence (opt3) from hemagglutinin__InfluenzaA__AFN18856
augaaggccauccuggugguccuccuuuacaccuucgcuacagcaaacgccgacacucugugcauuggcuaucacgcgaauaacagcacggauaccguugacacaguguuggagaagaauguaacugugacccauuccgucaacuuacuggaaaauaagcacaacgggaaacuauguaagcucagaggaguggcuccccugcaucuugguaaaugcaauauagccggcuggauccuggggaacccugagugugaaucuuugucaacagcaaguagcugguccuacauuguugagaccucuucgucagauaauggaacuugcuauccaggcgacuuuaucgauuacgaggagcucagggagcagcugagcaguguguccucuuucgaacgguuugagauuuucccgaagacaagcuccuggcccaaccacgacucaaauaagggugucaccgccgcuuguccucaugcaggggccaaaaguuuuuauaagaaccugaucuggcucgugaaaaagggaaauagcuacccaaaauuaucuaaguccuauauaaacgauaagggcaaagaaguacugguucuuuggggcauccaccaccccucaacgagcgcugaccaacagaguuuguaccagaaugccgaugcguacguguucgucgggacuucucgcuauuccaagaaauuuaagccugagauugcaauccgaccaaaagugcgugaccaggagggaagaaugaacuacuauuggacccugguggaacccggugauaagauuacauucgaggccacuggcaaccuagucguuccuagguacgcuuuugccauggaacggaaugcagggagcggaaucauaauuucggacaccccagugcaugauugcaacacaaccugucaaacgccgaaaggcgcuaucaauacuucucuccccuuccagaacauucacccuaucacaaucgguaagugcccaaaguauguaaaauccaccaagcugcgccuugccacugggcugagaaaugugcccucaauucagaguaggggauuguuuggcgcgauagccggcuucaucgaagggggauggacagguauggucgacggcugguacggguaucaucaccagaacgaacaaggaagcggcuacgcagcugaccucaaauccacccagaaugccauugaugagaucacgaacaagguaaauucuguuauagagaaaaugaacacccaguuuacagcuguggguaaggaguucaaucaccuggaaaagcggauugaaaacuuaaauaaaaaggucgacgauggguuccuggacaucuggacuuacaacgccgagcuccuugugcuguuggaaaaugagcgcacccuagauuaucaugacagcaacgugaaaaaccuguacgagaagguucgaucacagcucaaaaauaacgcaaaggaaaucggcaauggauguuuugaguucuaucacaagugcgauaacacauguauggaaagugugaaaaauggcacuuacgacuauccuaaguacuccgaggaagccaaacugaacagagaggagauugauggggucaaacuugaaagcaccaggaucuaucaaauucuggcuauauacucuacaguggcgucaaguuugguccucgugguuagccugggagcaaucuccuuuuggaugugcucuaaugguucguuacagugccggauuuguaucuga

SEQ ID NO: 137409 - RNA, 1701 nt, Artificial Sequence; identical to SEQ ID NO: 131578
  derived and/or modified CDS sequence (opt3) from hemagglutinin__InfluenzaA__AFN18858

SEQ ID NO: 137410 - RNA, 1701 nt, Artificial Sequence
  derived and/or modified CDS sequence (opt3) from hemagglutinin__InfluenzaA__AFN18860
augaaggccauccuggugguccuccuuuacaccuucgcuacagcaaacgccgacacucugugcauuggcuaucacgcgaauaacagcacggauaccguugacacaguguuggagaaaaauguaacugugacccauuccgucaacuuacuggaagauaagcacaaugggaaacuauguaagcucagaggaguggcuccccugcaucuugguaaaugcaacauagccggcuggauccuggggaauccugagugugaaucuuugucaacagcaaguagcugguccuacauuguugagaccucuucgucagacaacggaacuugcuauccaggcgauuuuaucgacuacgaggagcucagggagcagcugagcaguguguccucuuucgaacgguuugagauuuucccgaagacaagcuccuggcccaaucacgauucaaacaagggugucaccgccgcuuguagucaugcaggggccaagagcuuuuauaagaaucugaucuggcucgugaaaaagggaaacucuuacccuaaauuauccaagucauauauaaaugacaagggcaaagaaguacugguucuuuggggcauccaccacccaagcacgagugcugaucaacagucuuuguaccagaacgccgacgcguacguguucgucgggacuucccgcuauagcaagaaauuuaagcccgagauugcaauccgaccuaaagugcgugaucaggagggaagaauggacuacuauuggacccugguggaaccaggugauaagauuacauucgaggccacuggcaaucuagucguucccagguacgcuuuugccauggaacggaacgcagggucgggaaucauaauuucugacaccccugugcaugacugcaacacaaccugucaaacgccaaaaggcgcuaucaauacuucccucccguuccagaacauucaccccaucacaaucgguaagugcccuaaguauguaaaaucaaccaagcugcgccuugccacugggcugagaaaugugccaaguauucagagcaggggauuguuuggcgcgauagccggcuucaucgaagggggauggacagguauggucgauggcugguacggguaucaucaccagaacgaacaaggauccggcuacgcagcugaccucaaaucuacccagaaugccauugaugagaucacgaacaaggugaauagcguuauagagaaaaugaacacccaguuuacagcuguggguaaggaguucaaucaccuggaaaagcggauugaaaacuuaaauaaaaaggucgacgauggguuccuggacaucuggacuuacaacgccgagcuccuugugcuguuggaaaaugagcgcacccuagauuaucaugacucaaacguuaaaaaucuguacgagaagguacgaagucagcucaaaaacaacgcaaaggaaaucggcaauggauguuuugaguucuaucacaagugcgauaacacauguauggaauccgugaaaaauggcacuuacgacuaucccaaguacagcgaggaagccaaacugaacagagaggagauugauggggucaaacuugaaucuaccaggaucuaucaaauucuggcuauauacucaacaguggcgaguagcuugguccucgugguuucccugggagcaaucucuuuuuggaugugcucgaaugguagcuuacagugccggauuuguaucuga

SEQ ID NO: 137411 - RNA, 1701 nt, Artificial Sequence
  derived and/or modified CDS sequence (opt3) from hemagglutinin__InfluenzaA__AFN18865
augaaggccauccuggugguccuccuuuacaccuucgcuacagcaaacgccgacacucugugcauuggcuaucacgcgaauaacagcacggauaccguugacacaguguuggagaaaaauguaacugugacccauuccgucaacuuacuggaagauaagcacaaugggaaacuauguaagcucagaggaguggcuccccugcaucuugguaaaugcaacauagccggcuggauccuggggaauccugagugugaaucuuugucaacagcaaguagcugguccuacauuguugagaccucuucgucagacaacggaacuugcuauccaggcgauuuuaucgacuacgaggagcucagggagcagcugagcaguguguccucuuucgaacgguuugagauuuucccgaagacaagcuccuggcccaaucacgauucaaacaagggugucaccgccgcuuguccucaugcaggggccaaaaguuuuuauaagaaucugaucuggcucgugaaaaagggaaacagcuacccaaaauuaucuaaguccuauauaaaugacaagggcaaagaaguacugguucuuuggggcauccaccaccccucaacgagcgcugaucaacagaguuuguaccagaacgccgacgcguacguguucgucgggacuucucgcuauuccaagaaauuuaagccugagauugcaauccgaccaaaagugcgugaucaggagggaagaaugaauuacuauuggacccugguggaacccggugacaagauuacauucgaggccacuggcaaccuagucguuccuagguacgcuuuugccauggaacggaacgcagggagcggaaucauaauuucggauaccucugugcaugacugcaauacaaccugucaaacgccaaaaggcgcuaucaacacuucccucccguuccagaauauucaccccaucacaaucgguaagugcccuaaguauguaaaaucaaccaagcugcgccuugccacugggcugagaaacgugccaaguauucagagcaggggauuguuuggcgcgauagccggcuucaucgaagggggauggacagguauggucgacggcugguacggguaucaucaccagaaugaacaaggauccggcuacgcagcugaucucaaaucuacccagaacgccauugacaagaucacgaauaaagugaacagcguuauagagaagaugaauacccaguuuacagcuguggguaaggaguucaaccaccuggaaaaacggauugagaauuuaaacaagaaagucgaugacggguuccuggauaucuggacuuacaaugccgaacuccuugugcuguuggagaacgaacgcacccuagacuaucaugauucaaauguaaagaaccuguacgagaaaguucgaagucagcucaagaacaaugcaaaggagaucggcaacggauguuuugaguucuaucacaaaugcgacaauacauguauggaauccgugaagaacggcacuuacgauuaucccaaauacagcgaagaggccaagcugaauagagaagagauugacggggucaaacuugagucuaccaggaucuaucaaauucuggcuauauacucaacaguggcgaguagcuugguccucgugguuucccugggagcaaucucuuuuuggaugugcucgaacgguagcuuacagugccggauuuguaucuga

SEQ ID NO: 137412 - RNA, 1701 nt, Artificial Sequence
  derived and/or modified CDS sequence (opt3) from hemagglutinin__InfluenzaA__AFN18875
auggaggccauccuggugguccuccuuuacaccuucgcuacagcaaacgccgacacucugugcauuggcuaucacgcgaauaacagcacggauaccguugacacaguguuggaaaagaauguaacugugacccauuccgucaacuuacuggaggauaaacacaaugggaagcuauguaaacucagaggaguggcuccccugcaucuugguaagugcaacauagccggcuggauccuggggaauccugaaugugagucuuugucaacagcaaguagcugguccuacauuguugaaaccucuucgucagacaacggaacuugcuauccaggcgauuuuaucgacuacgaggagcucagggaacagcugagcaguguguccucuuucgagcgguuugaaauuuucccgaaaacaagcuccuggcccaaucacgauucaaacaagggugucaccgccgcuuguccucaugcaggggccaagaguuuuuauaaaaaucugaucuggcucgugaagaaaggaaacagcuacccaaaguuaucuaaauccuauauaaaugacaagggcaaggagguacugguucuuuggggcauccaccaccccucaacgagcgcugcccaacagaguuuguaccagaacgcggaugcauacguguucgucgggucuucccgcuauagcaaaaaguuuaaaccugagauugccauccgaccaaaggugcgugaccaggaaggaagaaugaauuacuauuggacucugguggagcccggugauaaaauuaccuucgaagcuacaggcaaccuagucguuccuagguacgccuuugcaauggagcggaacgcugggucgggaaucauaauuucugacacuccagugcaugauugcaauaccacaugucaaaccccgaagggcgccaucaacacgucccuccccuuccacaauauucauccuaucacuaucgguaaaugcccaaaguauguaaagucaacaaaacugcgccuugcgaccgggcugagaaacgugcccaguauucagagcaggggauuguuuggcgccauagcaggcuucaucgaagggggauggacugguauggucgacggcugguacggguaucaccaccagaaugagcagggauccggcuacgcugccgaccucaagucuacacaaaacgcuauugaugagaucaccaauaaagugaacagcguuauagaaaagaugaauacgcaguuuaccgccguggguaaagaguucaaccaucuggaaaagcggauugagaauuuaaacaagaaagucgacgauggguuccuggacaucuggacauacaaugcagaacuccuugugcuguuggagaacgagcgcacucuagauuaucacgacucaaauguaaagaaccuguacgaaaaaguucgaagucagcucaagaacaaugccaaagagaucggcaacggauguuuugaguucuaucauaagugcgauaauaccuguauggaauccgugaagaacggcacauacgacuauccuaaauacagcgaagaggcuaagcugaauagagaggaaauugauggggucaaacuugagucuacuaggaucuaucagauucuggcgauauacucaaccguggcaaguagcuugguccucgugguuucccugggagccaucucuuuuuggaugugcucgaacgguagcuuacaaugccggauuuguaucuga

SEQ ID NO: 137413 - RNA, 1701 nt, Artificial Sequence
  derived and/or modified CDS sequence (opt3) from hemagglutinin__InfluenzaA__AFN18885
augaaggccauccugauugugcuccuuuacaccuucgcuacagcaaacgccgacacucugugcauaggcuaucacgcgaauaacagcacggauaccgucgacacaguuuuggagaaaaaugugacuguaacccauuccgugaacuuacuggaagauaagcacaaugggaaacuauguaagcucagaggagucgcuccccugcaucuugguaaaugcaacaucgccggcuggauucuggggaauccugagugugaaucuuugucaacagcaaguagcugguccuacaucguggagaccucuucgucagacaacggaacuugcuauccaggcgauuuuauugacuacgaggagcucagggagcagcugagcaguguuuccucuuucgaacgguuugagaucuucccgaagacaagcuccuggcccaaucacgauucaaacaagggugugaccgccgcuuguccucaugcaggggccaaaaguuuuuauaagaaucugauauggcucgucaaaaagggaaacagcuacccaaaauuaucuaaguccuauaucaaugacaagggcaaagaagugcugguacuuuggggcauucaccaccccucaacgagcgcugaucaacagaguuuguaccagaacgccgacgcguacguuuucguggggacuucucgcuauuccaagaaauuuaagccugagaucgcaauucgaccaaaaguccgugaucaggagggaagaaugaauuacuauuggacccugguggaacccggugacaagaucacauucgaggccacuggcaaccuaguggucccuagguacgcuuuugccauggaacggaacgcagggagcggaauaauuaucucggauaccccaguucaugacugcaauacaaccugucaaacgccgaaaggcgcuauuaacacuaaucuccccuuccagaacauccacccuaucacaauugguaagugcccaaaguaugugaaaucuaccaagcugcgccuugccacugggcugagaaauguacccuccacacagucaaggggauuguuuggcgcgauagccggcuucaucgaagggggauggaccgguaugguggacggcugguacggguaucaucaccagaacgaacaaggaaguggcuacgcagcugaucucaaaagcacgcagaaugccauugacgagaucaccaacaaggucaauuccgugauagagaaaaugaacacacaguuuacugcuguugguaaggaguucaaucaccuggaaaagcggauugaaaacuuaaauaaaaagguggaugacggguuccuggauaucuggaccuacaacgccgagcuccuuguccuguuggaaaaugagcgcacacuagacuaucaugauucuaacgugaaaaaccuguacgagaagguacgaagccagcucaaaaauaacgcaaaggaaaucggcaauggauguuuugaguucuaucacaagugcgacaacacuuguauggaaucaguuaaaaauggcaccuacgauuauccuaaguacagugaggaagccaaacugaacagagaggagauugacggggugaaacuugaauccacaaggaucuaucaaauucuggcuauauacagcaccgucgcgucuucauuggugcucgucgugagucugggagcaaucagcuuuuggaugugcuccaaugguucuuuacagugcaagauuuguaucuga

SEQ ID NO: 137414 - RNA, 1701 nt, Artificial Sequence; identical to SEQ ID NO: 130717
  derived and/or modified CDS sequence (opt3) from hemagglutinin__InfluenzaA__AFN18892

SEQ ID NO: 137415 - RNA, 1701 nt, Artificial Sequence; identical to SEQ ID NO: 130959
  derived and/or modified CDS sequence (opt3) from hemagglutinin__InfluenzaA__AFN18894

SEQ ID NO: 137416 - RNA, 1701 nt, Artificial Sequence; identical to SEQ ID NO: 137381
  derived and/or modified CDS sequence (opt3) from hemagglutinin__InfluenzaA__AFN18903

SEQ ID NO: 137417 - RNA, 1701 nt, Artificial Sequence; identical to SEQ ID NO: 131819
  derived and/or modified CDS sequence (opt3) from hemagglutinin__InfluenzaA__AFN18910

SEQ ID NO: 137418 - RNA, 1701 nt, Artificial Sequence
  derived and/or modified CDS sequence (opt3) from hemagglutinin__InfluenzaA__AFN18912
auggaggccauccuggugguccuccuuuacaccuucgcuacagcaaacgccgacacucugugcauuggcuaucacgcgaauaacagcacggauaccguugacacaguguuggaaaagaauguaacugugacccauuccgucaacuuacuggaggauaaacacaaugggaagcuauguaaacucagaggaguggcuccccugcaucuugguaagugcaacauagccggcuggauccuggggaauccugaaugugagucuuugucaacagcaaguagcugguccuacauuguugaaaccucuucgucagacaacggaacuugcuauccaggcgauuuuaucgacuacgaggagcucagggaacagcugagcaguguguccucuuucgagcgguuugaaauuuucccgaaaacaagcuccuggcccaaucacgauucaaacaagggugucaccgccgcuuguccucaugcaggggccaagaguuuuuauaaaaaucugaucuggcucgugaagaaaggaaacagcuacccaaaguuaucuaaauccuauauaaaugacaagggcaaggagguacugguucuuuggggcauccaccaccccucaacgagcgcugaucaacagaguuuguaccagaacgccgacgcguacguguucgucgggucuucccgcuauagcaaaaaguuuaaaccugagauugcaauccgaccaaaggugcgugaucaggaaggaagaaugaauuacuauuggacucugguggagcccggugacaaaauuaccuucgaagccacaggcaaccuagucguuccuagguacgcuuuugccauggagcggaacgcagggucgggaaucauaauuucugauacuuccgugcaugacugcaauaccacaugucaaaccccaaagggcgcuaucaacacgucacucccguuccacaauauucaucccaucacuaucgguaaaugcccuaaguauguaaagaguacaaaacugcgccuugccaccgggcugagaaacgugccaagcauucaguccaggggauuguuuggcgcgauagccggcuucaucgaagggggauggacugguauggucgacggcugguacggguaucaccaccagaaugagcagggaucuggcuacgcagcugaucucaagagcacacaaaacgccauugacgagaucaccaauaaagugaacucaguuauagaaaagaugaauacgcaguuuaccgcuguggguaaagaguucaaccaucuggaaaagcggauugagaauuuaaacaagaaagucgaugacggguuccuggauaucuggacauacaaugccgaacuccuugugcuguuggagaacgagcgcacucuagacuaucacgauaguaauguaaagaaccuguacgaaaaaguucgaucccagcucaagaacaaugcaaaagagaucggcaacggauguuuugaguucuaucauaagugcgacaauaccuguauggaaagcgugaagaacggcacauacgauuaucccaaauacucugaagaggccaagcugaauagagaggaaauugacggggucaaacuugagucaacuaggaucuaucagauucuggcuauauacaguaccguggcgagcuccuugguccucgugguuucucugggagcaaucucguuuuggaugugcagcaacgguuccuuacaaugccggauuuguaucuga

SEQ ID NO: 137419 - RNA, 1701 nt, Artificial Sequence; identical to SEQ ID NO: 131819
  derived and/or modified CDS sequence (opt3) from hemagglutinin__InfluenzaA__AFN18917

SEQ ID NO: 137420 - RNA, 1701 nt, Artificial Sequence; identical to SEQ ID NO: 130717
  derived and/or modified CDS sequence (opt3) from hemagglutinin__InfluenzaA__AFN18927

SEQ ID NO: 137421 - RNA, 1701 nt, Artificial Sequence; identical to SEQ ID NO: 133383
  derived and/or modified CDS sequence (opt3) from hemagglutinin__InfluenzaA__AFN18937

SEQ ID NO: 137422 - RNA, 1701 nt, Artificial Sequence
  derived and/or modified CDS sequence (opt3) from hemagglutinin__InfluenzaA__AFN18952
augaaggccauccuggugguccuccuuuacaccuucgcuacagcaaacgccgacacucugugcauuggcuaucacgcgaauaacagcacggauaccguugacacaguguuggagaaaaauguaacugugacccauuccgucaacauauuagaagauaagcacaauagaaaacuguguaagcuaagggguguggcuccccuccaucugggaaaaugcaacaucgccgguuggauucuuggcaauccugagugugaaucucugucaacagcaaguagcugguccuacaucguugagaccucuucgucagacaacgggacuugcuauccaggagauuuuauugacuacgaagaguugcgggagcagcucagcaguguguccucuuucgaacgcuuugagaucuucccgaagacaagcuccuggcccaaucacgauucaaacaagggcgucaccgccgcuuguccucaugcaggggccaaaaguuuuuauaagaaucugauauggcuggugaaaaaggggaacagcuacccaaaacucucuaaguccuauaucaaugacaagggaaaagaaguauuaguucuguggggcauucaccaccccucaacgagcgcugaucaacagagucuuuaccagaacgccgacgcguacguguucgucggcacuucucgauauuccaagaaauuuaagccugagaucgcaauucguccaaaagugagagaucaggaggggaggaugaauuacuauuggaccuugguggaacccggagacaagaucacauucgaggccacugguaaccuggucguuccucgguacgcuuuugccauggaacgcaacgcaggcagcgggauaauuaucucggauaccccagugcaugacugcaauacaaccugucaaacgccgaaaggagcuauuaacacuucucuacccuuccagaauauccacccuaucacaauuggcaagugcccaaaguauguaaaauccaccaagcucagacuggccacuggucuuaggaacgugcccucaauacagagucgggggcuguuuggagcgaucgccggcuucauugagggcggguggacaggaauggucgacgguugguacggcuaucaucaccagaaugaacaagggagcggauacgcagcugauuugaaauccacccagaacgccaucgacgagauaacgaauaaggugaacucuguuauugagaaaaugaauacccaguuuacagcugugggcaaggaguucaaccaccucgaaaagcgcaucgaaaaucugaacaaaaaggucgaugacgguuucuuagauaucuggacuuacaaugccgagcugcucgugcuucuggaaaacgagcgaaccuuggacuaucaugauagcaauguuaaaaaccuauacgagaagguaagaucacagcugaaaaacaaugcaaaggaaauugggaacggcuguuuugaguucuaucacaagugcgacaauacauguauggaaagugugaaaaacggaacuuacgauuauccuaaguacuccgaggaagccaaacucaauagggagaagaucgacggcgucaaacuggagagcacccggauuuaucaaauacuugcuaucuacucuacaguggcgucaagucuggucuuggugguuagccucggggcaauuuccuuuuggaugugcucuaacggaucgcugcagugccguaucuguaucuga

SEQ ID NO: 137423 - RNA, 1701 nt, Artificial Sequence
  derived and/or modified CDS sequence (opt3) from hemagglutinin__InfluenzaA__AFN18957
augaaggccauccuggugguccuccuuuacaccuucgcuacagcaaacgccgacacucugugcauuggcuaucacgcgaauaacagcacggauaccguugacacaguguuggagaaaaauguaacugugacccauuccgucaacuuacuggaagauaaucacaacgggaagcuauguaaacucagaggaguggcuccccugcaucuugguaagugcaauauagccggcuggauccuggggaacccugagugugaaucuuugucaacagcaaguagcugguccuacauuguugagaccucuucgucagacaauggaacuugcuauccaggcgauuuuaucgacuacgaggagcucagggagcagcugagcaguguguccucuuucgaacgguuugagauuuucccgaaaacaagcuccuggcccaaccacgauucaaauaagggugucaccgccgcuuguccucaugcaggggccaagaguuuuuauaaaaaccugaucuggcucgugaagaaaggaaauagcuacccaaaguuaucuaaauccuauauaaacgacaagggcaaggaaguacugguucuuuggggcauccaccaccccucaacgagcgcugaucaacagaguuuguaccagaaugccgacgcguacguguucgucgggacuucucgcuauuccaaaaaguuuaaaccugagauugcaauccgaccaaaggugcgugaucaggagggaagaaugaacuacuauuggacccugguggaacccggugacaaaauuacauucgaggccacuggcaaccuagucguuccuagguacgcuuuugccauggaacggaaugcagggagcggaaucauaauuucggauaccccagugcaugacugcaacacaaccugucaaacgccgaagggcgcuaucaauacuucucuccccuuccagaacauucacccuaucacaaucgguaaaugcccaaaguauguaaaguccaccaaacugcgccuugccacugggcugagaaaugugcccucaauucagaguaggggauuguuuggcgcgauagccggcuucaucgaagggggauggacagguauggucgacggcugguacggguaucaucaccagaacgaacaaggaagcggcuacgcagcugaucucaaguccacccagaaugccauugacgagaucacgaacaaaguuaauucugugauagagaagaugaacacccaguuuacagcuguggguaaagaguucaaucaccuggaaaagcggauugaaaacuuaaauaagaaagucgaugacggguuccuggauaucuggacuuacaacgccgagcuccuugugcuguuggaaaaugagcgcacccuagacuaucaugauagcaacguaaagaaccuguacgagaaaguucgaucacagcucaagaauaacgcaaaagaaaucggcaauggauguuuugaguucuaucacaagugcgacaacacauguauggaaagugugaagaauggcacuuacgauuauccuaaauacuccgaggaagccaagcugaacagagaggagauugacggggucaaacuugaaagcaccaggaucuaucaaauucuggcuauauacucuacaguggcgucaaguuugguccucgugguuagccugggagcaaucuccuuuuggaugugcucuaaugguucguuacagugccggauuuguaucuga

SEQ ID NO: 137424 - RNA, 1701 nt, Artificial Sequence; identical to SEQ ID NO: 136806
  derived and/or modified CDS sequence (opt3) from hemagglutinin__InfluenzaA__AFN18964

SEQ ID NO: 137425 - RNA, 1701 nt, Artificial Sequence
  derived and/or modified CDS sequence (opt3) from hemagglutinin__InfluenzaA__AFN18974
augaaggccauccuggugguccuccuuuacaccuucgcuacagcaaacgccgacacucugugcauuggcuaucacgcgaauaacagcacggauaccguugacacaguguuggagaaaaauguaacugugacccauuccgucaacuuacuggaagauaagcacaaugggaaacuauguaagcucagaggaguggcuccccugcaucuugguaaaugcaacauagccggcuggauccuggggaauccugagugugaaucuuugucaacagcaaguagcugguccuacauuguugagaccucuucgucagacaacggaacuugcuauccaggcgauuuuaucgacuacgaagaacucagggagcagcugagcaguauguccucuuucgaacgguuugagauuuucccgaagacaagcuccuggcccaaucacgauccuaacaagggugugaccgccgcuuguccacaugcaggggccaaaucauuuuauaagaaucugaucuggcucgucaaaaagggaaacaguuaccccaaauuaagcaagucuuauauaaaugacaagggcaaaaaggugcugguacuuuggggcauccaccacccuuccacgucagcugaucaacagagcuuguaccagaacgccgacgcguacguuuucguggggaccagucgcuauucuaaaaaguuuaaaccagaaauugcaauccgacccaagguccgugaucaggagggaagaaugaauuacuauuggacucugguggagccuggugacaaaauuacauucgaagccacuggcaaccuaguggucccaagguacgcuuuugccauggagcggaacgcaggguccggaaucauaauuagcgauaccccgguucaugacugcaauacaaccugucaaacgcccaagggcgcuaucaacacuucgcucccuuuccagaauauucacccaaucacaaucgguaagugccccaaauaugugaagucuaccaaacugcgccuugccacugggcugagaaacguaccuuccauucagucaaggggauuguuuggcgcgauagccggcuucaucgaagggggauggacagguaugguggacggcugguacggguaucaucaccagaaugagcaaggaaguggcuacgcagcugaucucaagagcacccagaacgccauugacgaaaucacgaauaaagucaacuccgugauagagaagaugaauacccaguuuacagcuguugguaaggaguucaaccaccuggaaaaacggauugagaauuuaaacaagaaaguggaugacggguuccuggauaucuggacuuacaaugccgaacuccuuguccuguuggagaacgaacgcacccuagacuaucaugauucuaaugugaagaaccuguacgagaaaguacgaagccagcucaagaacaaugcaaaggagaucggcaacggauguuuugaguucuaucacaaaugcgacaauacauguauggagucaguuaagaacggcacuuacgauuauccaaaauacagugacgaagccaagcugaauagagaggaaauugauggggugaaacuugaguccaccaggaucuaucaaauucuggcuauauacagcacagucgcgucuucauuggugcucgucgugagucugggagcaaucagcuuuuggaugugcuccaacgguucuuuacagugccggauuuguaucuga

SEQ ID NO: 137426 - RNA, 1701 nt, Artificial Sequence; identical to SEQ ID NO: 132269
  derived and/or modified CDS sequence (opt3) from hemagglutinin__InfluenzaA__AFN18979

SEQ ID NO: 137427 - RNA, 1701 nt, Artificial Sequence
  derived and/or modified CDS sequence (opt3) from hemagglutinin__InfluenzaA__AFN18982
augaaggccauccuggugguccuccuuuacaccuucgcuauugcaaacgccgacacacugugcauaggcuaucacgcgaauaacagcacugauacgguugacaccguguuggagaaaaauguaacagugacucauuccgucaacuuacuggaagauaagcacaaugggaaacuauguaagcucagaggaguggcuccccugcaucuugguaaaugcaacaucgccggcuggauucuggggaauccugagugugaaucuuugucaaccgcaaguagcugguccuacaucguugagacaucuucgucagacaacggaaccugcuauccaggcgauuuuauugacuacgaggagcucagggagcagcugagcaguguguccucuuucgaacgguuugagaucuucccgaagacuaauagcuggcccaaccacgauuccaauaagggugucacagccgcuuguccucaugcaggggccaaaucauuuuauaagaaccugauauggcucgugaaaaagggaaauaguuacccaaaauuaagcaagucuuauaucaacgacaagggcaaagaaguacugguucuuuggggcauucaccaccccuccaccucagcugaucaacagagcuuguaccagaaugccgacgcguacguguucgucgggacgagucgcuauucuaagaaauuuaagccugagaucgcaauucgaccaaaagugcgugaucaggagggaagaaugaacuacuauuggacucugguggaacccggugacaagaucaccuucgaggccacaggcaaccuagucguuccuagguacgcuuuugccauggaacggaaugcaggguccggaauaauuaucagcgauacuccagugcaugacugcaacaccacaugucaaaccccgaaaggcgcuauuaauacgucgcuccccuuccagaacauccacccuaucacuauugguaagugcccaaaguauguaaaaucuacaaagcugcgccuugccaccgggcugagaaaugugcccuccauacagucaaggggauuguuuggcgcgaucgccggcuucauugaagggggauggacugguauggucgacggcugguacggguaucaucaccagaacgaacaaggaaguggcuacgcagcugaucucaaaagcacacagcacgccaucgacgagauaaccaauaaggugaacuccguuauugagaaaaugaauacgcaguuuaccgcuguggguaaggaguucaaccaucuggaaaagcggaucgaaaauuuaaacaaaaaggucgaugacggguuccuggauaucuggacauacaaugccgagcuccuugugcuguuggaaaacgagcgcacucuagacuaucacgauucuaauguaaagaaccuguacgagaagguucgaagccagcucaaaaacaaugcaaaggaaauuggcaacggauguuuugaguucuaucauaagugcgacaauaccuguauggaaucagugaaaaacggcacauacgauuauccuaaguacagugaggaagccaaacugaauagagaggagaucaacggggucaaacuugaauccacuaggauuuaucaaauacuggcuaucuacagcaccguggcgucuucauugguccucgugguuagucugggagcaauuagcuuuuggaugugcuccaaugguucuuuacagugccggaucuguaucuga

SEQ ID NO: 137428 - RNA, 1701 nt, Artificial Sequence; identical to SEQ ID NO: 137320
  derived and/or modified CDS sequence (opt3) from hemagglutinin__InfluenzaA__AFN18984

SEQ ID NO: 137429 - RNA, 1701 nt, Artificial Sequence; identical to SEQ ID NO: 130717
  derived and/or modified CDS sequence (opt3) from hemagglutinin__InfluenzaA__AFN18986

SEQ ID NO: 137430 - RNA, 1701 nt, Artificial Sequence; identical to SEQ ID NO: 130717
  derived and/or modified CDS sequence (opt3) from hemagglutinin__InfluenzaA__AFN18988

SEQ ID NO: 137431 - RNA, 1701 nt, Artificial Sequence; identical to SEQ ID NO: 131881
  derived and/or modified CDS sequence (opt3) from hemagglutinin__InfluenzaA__AFN18993

SEQ ID NO: 137432 - RNA, 1701 nt, Artificial Sequence; identical to SEQ ID NO: 131881
  derived and/or modified CDS sequence (opt3) from hemagglutinin__InfluenzaA__AFN18999

SEQ ID NO: 137433 - RNA, 1701 nt, Artificial Sequence; identical to SEQ ID NO: 131515
  derived and/or modified CDS sequence (opt3) from hemagglutinin__InfluenzaA__AFN19006

SEQ ID NO: 137434 - RNA, 1701 nt, Artificial Sequence; identical to SEQ ID NO: 130717
  derived and/or modified CDS sequence (opt3) from hemagglutinin__InfluenzaA__AFN19026

SEQ ID NO: 137435 - RNA, 1701 nt, Artificial Sequence; identical to SEQ ID NO: 131857
  derived and/or modified CDS sequence (opt3) from hemagglutinin__InfluenzaA__AFN19036

SEQ ID NO: 137436 - RNA, 1701 nt, Artificial Sequence; identical to SEQ ID NO: 130717
  derived and/or modified CDS sequence (opt3) from hemagglutinin__InfluenzaA__AFN19043

SEQ ID NO: 137437 - RNA, 1701 nt, Artificial Sequence; identical to SEQ ID NO: 130717
  derived and/or modified CDS sequence (opt3) from hemagglutinin__InfluenzaA__AFN19053

SEQ ID NO: 137438 - RNA, 1701 nt, Artificial Sequence; identical to SEQ ID NO: 130717
  derived and/or modified CDS sequence (opt3) from hemagglutinin__InfluenzaA__AFN19063

SEQ ID NO: 137439 - RNA, 1701 nt, Artificial Sequence; identical to SEQ ID NO: 130717
  derived and/or modified CDS sequence (opt3) from hemagglutinin__InfluenzaA__AFN19070

SEQ ID NO: 137440 - RNA, 1701 nt, Artificial Sequence
  derived and/or modified CDS sequence (opt3) from hemagglutinin__InfluenzaA__AFN19076
augaaggccauccuggugguccuccuuuacaccuucgcuacagcaaacgccgacacucugugcauuggcuaucacgcgaauaacagcacggauaccguugacacaguguuggagaaggauguaacugugacccauuccgucaauuuacuggaagacaagcacaacgggaaacuauguaagcucagaggaguggcuccccugcaucuugguaaaugcaauauagccggcuggauccuggggaacccugagugugaaucuuugucaacagcaaguagcugguccuacauuguugagaccucuucgucagauaauggaacuugcuauccaggcgacuuuaucgauuacgaggagcucagggagcagcugagcaguguguccucuuucgaacgguuugagauuuucccgaagacaagcuccuggcccaaccacgacucaaauaagggugucaccgccgcuuguccucaugcaggggccaaaaguuuuuauaagaaccugaucuggcucgugaaaaagggaaauagcuacccaaaauuaucuaaguccuauauaaacgauaagggcaaagaaguacugguucuuuggggcauccaccaccccucaacgagcgcugaccaacagaguuuguaccagaaugccgaugcguacguguucgucgggacuucucgcuauuccaagaaauuuaagccugagauugcaauccgaccaaaagugcgugaccaggagggaagaaugaacuacuauuggacccugguggaacccggugauaagauuacauucgaggccacuggcaaucuagucguuccuagguacgcuuuugccauggaacggaacgcagggagcggaaucauaauuucggacaccccagugcaugacugcaacacaaccugucaaacgccgaaaggcgcuaucaauacuucucuccccuuccagaacauucacccuaucacaaucgguaagugcccaaaguauguaaaauccaccaagcugcgccuugccacugggcugagaaaugugcccucaauucagaguaggggauuguuuggcgcgauagccggcuucaucgaagggggauggacagguauggucgauggcugguacggguaucaucaccagaacgaacaaggaagcggcuacgcagcugaccucaaauccacccagaaugccauugaugagaucacgaacaagguaaauucuguuauagagaaaaugaacacccaguuuacagcuguggguaaggaguucaaucaccuggaaaagcggauugaaaacuuaaauaaaaaggucgacgauggguuccuggacaucuggacuuacaacgccgagcuccuugugcuguuggaaaaugagcgcacccuagauuaucaugacagcaacgugaaaaaucuguacgagaagguucgaucacagcucaaaaacaacgcaaaggaaaucggcaauggauguuuugaguucuaucacaagugcgauaacacauguauggaaagugugaaaaauggcacuuacgacuauccuaaguacuccgaggaagccaaacugaacagagaggagauugauggggucaaacuugaaagcaccaggaucuaucaaauucuggcuauauacucuacaguggcgucaaguuugguccucgugguuagccugggagcaaucuccuuuuggaugugcucuaaugguucguuacagugccggauuuguaucuga

SEQ ID NO: 137441 - RNA, 1701 nt, Artificial Sequence; identical to SEQ ID NO: 130717
  derived and/or modified CDS sequence (opt3) from hemagglutinin__InfluenzaA__AFN19082

SEQ ID NO: 137442 - RNA, 1701 nt, Artificial Sequence; identical to SEQ ID NO: 130717
  derived and/or modified CDS sequence (opt3) from hemagglutinin__InfluenzaA__AFN19088

SEQ ID NO: 137443 - RNA, 1701 nt, Artificial Sequence; identical to SEQ ID NO: 130717
  derived and/or modified CDS sequence (opt3) from hemagglutinin__InfluenzaA__AFN19097

SEQ ID NO: 137444 - RNA, 1701 nt, Artificial Sequence; identical to SEQ ID NO: 130717
  derived and/or modified CDS sequence (opt3) from hemagglutinin__InfluenzaA__AFN19104

SEQ ID NO: 137445 - RNA, 1701 nt, Artificial Sequence; identical to SEQ ID NO: 130717
  derived and/or modified CDS sequence (opt3) from hemagglutinin__InfluenzaA__AFN19113

SEQ ID NO: 137446 - RNA, 1701 nt, Artificial Sequence; identical to SEQ ID NO: 130717
  derived and/or modified CDS sequence (opt3) from hemagglutinin__InfluenzaA__AFN19119

SEQ ID NO: 137447 - RNA, 1701 nt, Artificial Sequence; identical to SEQ ID NO: 133228
  derived and/or modified CDS sequence (opt3) from hemagglutinin__InfluenzaA__AFN19125

SEQ ID NO: 137448 - RNA, 1701 nt, Artificial Sequence; identical to SEQ ID NO: 130717
  derived and/or modified CDS sequence (opt3) from hemagglutinin__InfluenzaA__AFN19134

SEQ ID NO: 137449 - RNA, 1701 nt, Artificial Sequence; identical to SEQ ID NO: 130717
  derived and/or modified CDS sequence (opt3) from hemagglutinin__InfluenzaA__AFN19144

SEQ ID NO: 137450 - RNA, 1701 nt, Artificial Sequence; identical to SEQ ID NO: 133272
  derived and/or modified CDS sequence (opt3) from hemagglutinin__InfluenzaA__AFN19154

SEQ ID NO: 137451 - RNA, 1701 nt, Artificial Sequence; identical to SEQ ID NO: 130717
  derived and/or modified CDS sequence (opt3) from hemagglutinin__InfluenzaA__AFN19164

SEQ ID NO: 137452 - RNA, 1701 nt, Artificial Sequence; identical to SEQ ID NO: 130717
  derived and/or modified CDS sequence (opt3) from hemagglutinin__InfluenzaA__AFN19174

SEQ ID NO: 137453 - RNA, 1701 nt, Artificial Sequence; identical to SEQ ID NO: 130717
  derived and/or modified CDS sequence (opt3) from hemagglutinin__InfluenzaA__AFN19184

SEQ ID NO: 137454 - RNA, 1701 nt, Artificial Sequence; identical to SEQ ID NO: 130717
  derived and/or modified CDS sequence (opt3) from hemagglutinin__InfluenzaA__AFN19194

SEQ ID NO: 137455 - RNA, 1701 nt, Artificial Sequence; identical to SEQ ID NO: 130717
  derived and/or modified CDS sequence (opt3) from hemagglutinin__InfluenzaA__AFN19203

SEQ ID NO: 137456 - RNA, 1701 nt, Artificial Sequence; identical to SEQ ID NO: 130717
  derived and/or modified CDS sequence (opt3) from hemagglutinin__InfluenzaA__AFN19213

SEQ ID NO: 137457 - RNA, 1701 nt, Artificial Sequence; identical to SEQ ID NO: 130717
  derived and/or modified CDS sequence (opt3) from hemagglutinin__InfluenzaA__AFN19223

SEQ ID NO: 137458 - RNA, 1701 nt, Artificial Sequence; identical to SEQ ID NO: 130717
  derived and/or modified CDS sequence (opt3) from hemagglutinin__InfluenzaA__AFN19233

SEQ ID NO: 137459 - RNA, 1701 nt, Artificial Sequence
  derived and/or modified CDS sequence (opt3) from hemagglutinin__InfluenzaA__AFN19243
augaaggccauccuggugguccuccuuuacaccuucgcuacagcaaacgccgacacucugugcauuggcuaucacgcgaauaacagcacggauaccguugacacaguguuggagaaaaauguaacugugacccauuccgucaacuuacuggaagauaagcacaaugggaaacuauguaagcucagaggaguggcuccccugcaucuugguaaaugcaacauagccggcuggauccuggggaauccugagugugaaucuuugucaacagcaaguagcugguccuacauuguugagaccucuucgucagacaacggaacuugcuauccaggcgauuuuaucgacuacgaggagcucagggagcagcugagcaguguguccucuuucgaacgguuugagauuuucccgaagacaagcuccuggcccaaucacgauucaaacaagggugucaccgccgcuuguccucaugcaggggccaaaaguuuuuauaagaaucugaucuggcucgugaaaaagggaaacagcuacccaaaauuaucuaaguccuauauaaaugacaagggcaaagaaguacugguucuuuggggcauccaccaccccucaacgagcgcugaucaacagaguuuguaccagaacgccgacgcguacguguucgucgggacuucuaaguauuccaaaaaguuuaaaccugagauugcaauccgcccaaaggugcgagaucaggagggacguaugaauuacuauuggacccugguggaacccggugacaaaauuacauucgaggccacuggcaaccuagucguuccuagauacgcuuuugccauggaaaggaacgcagggagcggaaucauaauuucggauaccccagugcaagacugcaauacaaccugucagacgccgaagggcgcuaucaacacuucucuccccuuccagaauauucauccuaucacaaucgguaagugcccaaaauauguaaaguccaccaaacugcggcuugccacugggcugcgcaacgugcccucaauucagaguagaggauuguuuggcgcgauagccggcuucaucgaagggggauggacagguauggucgacggcugguacggguaucaccaucaaaaugaacagggaagcggcuacgcagcugaucucaaguccacccagaacgccauugacgagaucacgaauaaagugaacucuguuauagagaagaugaauacccaguuuacagcuguggguaaggaauuuaaccaccuggagaaaaggauugaaaauuuaaacaagaaagucgaugacggguuccuggauaucuggacuuacaaugccgagcuccuugugcuguuggaaaacgagcggacccuagacuaucacgauagcaauguaaagaaccuguacgagaaaguucgcucacaacucaagaacaaugcaaaggaaaucggcaacggauguuucgaguucuaucauaaaugcgacaauacauguauggaaagugugaagaacggcacuuacgauuauccuaaauacuccgaggaagccaagcugaaucgagaggagauugacggggucaaacuugaaagcaccagaaucuaucagauucuggcuauauacucuacaguggcgucaaguuugguccucgugguuagccugggagcaaucuccuuuuggaugugcucuaacgguucguuacagugcaggauuuguaucuga

SEQ ID NO: 137460 - RNA, 1701 nt, Artificial Sequence; identical to SEQ ID NO: 132833
  derived and/or modified CDS sequence (opt3) from hemagglutinin__InfluenzaA__AFN19250

SEQ ID NO: 137461 - RNA, 1701 nt, Artificial Sequence; identical to SEQ ID NO: 130717
  derived and/or modified CDS sequence (opt3) from hemagglutinin__InfluenzaA__AFN19259

SEQ ID NO: 137462 - RNA, 1701 nt, Artificial Sequence; identical to SEQ ID NO: 130717
  derived and/or modified CDS sequence (opt3) from hemagglutinin__InfluenzaA__AFN19269

SEQ ID NO: 137463 - RNA, 1701 nt, Artificial Sequence; identical to SEQ ID NO: 130717
  derived and/or modified CDS sequence (opt3) from hemagglutinin__InfluenzaA__AFN19279

SEQ ID NO: 137464 - RNA, 1701 nt, Artificial Sequence; identical to SEQ ID NO: 131578
  derived and/or modified CDS sequence (opt3) from hemagglutinin__InfluenzaA__AFN19286

SEQ ID NO: 137465 - RNA, 1701 nt, Artificial Sequence; identical to SEQ ID NO: 130717
  derived and/or modified CDS sequence (opt3) from hemagglutinin__InfluenzaA__AFN19295

SEQ ID NO: 137466 - RNA, 1701 nt, Artificial Sequence; identical to SEQ ID NO: 130717
  derived and/or modified CDS sequence (opt3) from hemagglutinin__InfluenzaA__AFN19305

SEQ ID NO: 137467 - RNA, 1701 nt, Artificial Sequence; identical to SEQ ID NO: 131583
  derived and/or modified CDS sequence (opt3) from hemagglutinin__InfluenzaA__AFN19315

SEQ ID NO: 137468 - RNA, 1701 nt, Artificial Sequence; identical to SEQ ID NO: 130717
  derived and/or modified CDS sequence (opt3) from hemagglutinin__InfluenzaA__AFN19325

SEQ ID NO: 137469 - RNA, 1701 nt, Artificial Sequence; identical to SEQ ID NO: 130717
  derived and/or modified CDS sequence (opt3) from hemagglutinin__InfluenzaA__AFN19335

SEQ ID NO: 137470 - RNA, 1701 nt, Artificial Sequence; identical to SEQ ID NO: 130717
  derived and/or modified CDS sequence (opt3) from hemagglutinin__InfluenzaA__AFN19344

SEQ ID NO: 137471 - RNA, 1701 nt, Artificial Sequence
  derived and/or modified CDS sequence (opt3) from hemagglutinin__InfluenzaA__AFN19351
augaagaccaucauugcccugagcuacauacucugccuuguguucgcucagaaacugcccggcaacgacaauuccauggcaacauuguguuuagggcaccaugccgucccuaacggaacuaucguuaagacgauuaccaaugaucaaaucgaggugacaaacgcgacugaacugguacaaaauucuucaauuggugagaucugcgacaguccacaccagauacuagauggcgaaaacuguacccucaucgacgcucugcuuggggauccgcagugcgacggauuucagaauaaaaagugggaucuguucguggagagaagcaaagccuauuccaacuguuaccccuaugacgucccugauuacgcaucuuugaggucgcucguggccucaagcggcacacuggaauuuaauaacgagaguuucaauuggaccgguguuacucagaacgggacauccucugcuugcauucggcgcagcaauaacuccuuuuucucacgacugaauuggcucacccauuuaaacuuuaaguauccagcacugaacgugacgaugcccaauaacgagcaguucgacaaguuguacaucuggggaguccaccauccuggcacugauaaagaccagauuuuucuuuaugcccaaaguagcggccguaucaccgugucuacaaagagaucccagcaggcuguaauaccaaauauugggucaaggccccggauccgcaacauuccuagcagaaucaguaucuacuggacuauuguuaaaccaggagauauacugcuaaucaauucuaccgguaaccucauugccccgaggggcuacuucaagauccgguccgggaaaagcucgauaaugcgcucugacgcgcccauuggaaaguguaauuccgaaugcaucacaccuaacggcucaaucccaaaugacaagcccuuucagaacgugaaucgaauuaccuauggugcauguccuagauacgucaaacaaaguacgcugaaacuugccacugggaugaggaacgugccagagaagcagacacggggaaucuucggcgcuauugccggcuuuauagaaaaugggugggagggaaugguggaugguugguauggcuuccgucaccagaacagcgaggggcgcggacaagcagcugaccugaaguccacccaggccgcgaucgaucagauuaauggcaaauugaacagacucaucgguaagacuaacgaaaaauuccaccagaucgagaaggaauuuucugaggucgaagggaggauucaagaccuggagaaguacguugaggauacaaaaauagacuuauggagcuauaaugccgaacugcucguggcacuugagaaccagcauaccaucgaucugacggacucagaaaugaauaaguuguucgagaaaaccaagaaacagcuacgggaaaacgcugaggauaugggcaauggaugcuuuaagauuuaccacaagugugacaacgccugcaucggcaguauucgaaaugggacauaugaucaugacguauaccgcgacgaggcucugaacaauagauuccagaucaaaggaguggaacucaaguccgguuacaaagauuggauacuguggaucagcuuugccauuucuugcuuccuucugugugucgcauugcucggcuuuaucaugugggccugccaaaaggggaacgugagguguaauauuugcaucuga

SEQ ID NO: 137472 - RNA, 1701 nt, Artificial Sequence; identical to SEQ ID NO: 137122
  derived and/or modified CDS sequence (opt3) from hemagglutinin__InfluenzaA__AFN19355

SEQ ID NO: 137473 - RNA, 1701 nt, Artificial Sequence; identical to SEQ ID NO: 137122
  derived and/or modified CDS sequence (opt3) from hemagglutinin__InfluenzaA__AFN19357

SEQ ID NO: 137474 - RNA, 1701 nt, Artificial Sequence; identical to SEQ ID NO: 137122
  derived and/or modified CDS sequence (opt3) from hemagglutinin__InfluenzaA__AFN19361

SEQ ID NO: 137475 - RNA, 1701 nt, Artificial Sequence
  derived and/or modified CDS sequence (opt3) from hemagglutinin__InfluenzaA__AFN19363
augaagaccaucauugcccugagcuacauacucugccuuguguucgcucagaaacugcccggcaacgacaauuccacagcaacuuuguguuuagggcaccaugccgucccuaacggaacgaucguuaagaccauuacaaaugaucaaaucgaggugacuaacgcgaccgaacugguacagauuucuucaacaggugagaucugcgacaguccacaccagauacuagauggcgaaaauuguacccucaucgacgcucugcuuggggauccgcagugcgacggauuucaaaacaaaaagugggaucuguucguggagagaagcaaagccuauuccaauuguuaccccuaugacgucccugauuacgcaucuuugaggucgcucguggccucaagcggcacucuggaauuuaacaaugagaguuucaacuggacagguguuacccagaaugggacguccucugcuugcauucggcgcagcaacuccucauuuuucagucgacugaauuggcucacucauuuaaacuuuaaguauccagcacugaaugugaccaugcccaacaacgagcaguucgacaaguuguacaucuggggaguccaccauccuggcacagauaaagaccagauuuuucuuuaugcccaaagcucuggccguaucacuguguccaccaagagaucacagcaggcuguaauaccaaauauugggagcaggccccggauccgcaacauuccuaguagaaucucuaucuacuggacaauuguuaaaccaggagauauacugcuaaucaauuccaccgguaaccucauugccccgaggggcuacuucaagauccggagcgggaaaucgucuauaaugcgcuccgacgcgcccauuggaaaguguaauucagaaugcaucacgccuaacggcaguaucccaaaugacaagcccuuucagaacgugaaucgaauuacuuauggugcauguccuagauacgucaaacaaagcacacugaaacuugccaccgggaugaggaacgugccagagaagcagacucggggaaucuucggcgcuauugccggcuuuauagaaaaugggugggagggaaugguggaugguugguauggcuuccgucaccagaacuccgaggggcgcggacaagcagcugaccugaagucuacacaggccgcgaucgaucagauuaauggcaaauugaacagacucaucgguaagaccaaugaaaaauuccaccagaucgagaaggaauuuagcgaggucgaagggaggauucaagaccuggagaaguacguugaggauacgaaaauagacuuauggucauauaacgccgaacugcucguggcacuugagaaccagcauaccaucgaucugacagacagugaaaugaauaaguuguucgagaaaacuaagaaacagcuacgggaaaacgcugaggauaugggcaauggaugcuuuaagauuuaccacaagugugacaacgccugcaucggcuccauucgaaaugggaccuauaaccaugauguauaccgcgacgaggcucugaauaacagauuccagaucaaaggaguggaacucaagagcgguuacaaagacuggauacuguggaucucuuuugccauuucaugcuuccuucugugugucgcauugcucggcuuuaucaugugggccugccaaaaggggaauauuagguguaacaucugcauauga

SEQ ID NO: 137476 - RNA, 1701 nt, Artificial Sequence; identical to SEQ ID NO: 135030
  derived and/or modified CDS sequence (opt3) from hemagglutinin__InfluenzaA__AFN19365

SEQ ID NO: 137477 - RNA, 1701 nt, Artificial Sequence
  derived and/or modified CDS sequence (opt3) from hemagglutinin__InfluenzaA__AFN19367
augaagaccaucauugcccugagcuacauacucugccuuguguucgcucagaaacugcccgagaacgacaauuccacagcaacuuuguguuuaggccaccaugccgucccuaacgggacgaucguuaagaccauuacaaaugaucaaaucgaagugacuaacgcgaccgagcugguacagucuucaaguacaggagaaauuugcgacagcccacaccagauccuagauggugugaauuguacccucauagacgcucugcuuggcgauccgcagugcgacggguuucaaaacaaaaagugggaucuguucgucgagagauccaaagccuauucuaauuguuaccccuaugacgugccugauuacgcaucguugaggucacucguugccagcaguggaacucuggaauuuaacaaugaguccuucaacuggacaggcgugacccagaaugguacgucuagcgcuugcauccggcgcuccaacucaaguuucuuuagccgacugaauuggcucacucauuuaaacuuuaaguauccagcacugaaugucaccaugcccaacaacgagcaguucgacaagcuguacauuuggggagugcaccauccugggacagauaaagaccagaucuuuuuguaugcccaaucuuccggccguauuacuguaucaaccaagagaagccagcaggcuguuaucccaaauauaggcaguaggccccggauucgcaacaucccuucuagaauuuccaucuacuggacaaucgugaaaccaggggauauucugcuaauaaauagcaccggaaaccucaucgccccgagggguuacuucaagauucagucgggcaaaucuuccaucaugcggucagacgcgcccauagggaaguguaauagugaaugcauuacgccuaacggaagcaucccaaaugacaagcccuuucaaaacgucaaucgcaucacuuauggcgcauguccucgauacgugaaacaguccacacugaaacuugccaccgguaugagaaacgugccagagaagcagacuagggggauuuucggagcuaucgccggcuuuauugaaaauggcugggaggggauggucgauggaugguaugguuuccggcaccaaaacucugagggccgugggcaggcagcugaccuuaagagcacacaggccgcgauagaucagaucaauggaaaauugaaccgccucauuggcaagaccaaugaaaaauuccaccaaaucgagaaggaauuuucagagguugaagguagaauccaggaccuggagaaguacguggaggauacgaaaauugacuuauggaguuauaacgccgaacugcucguagcacuugagaaccagcauaccauagaucugacagacuccgaaaugaauaaguuguucgagaaaacuaagaaacagcuaagggaaaacgcugaggauauggggaauggcugcuuuaagaucuaccacaagugugacaacgccugcauuggaagcauccggaauggcaccuauaaccaugauguguaccgagacgaggcucugaauaaccgcuuccaaauuaaaggggucgaacucaagucuggauacaaagacuggauccuguggauaucauuugccaucaguugcuuccuucuguguguggcauugcucgguuuuauuaugugggccugccagaagggcaauaucagauguaacauuugcaucuga

SEQ ID NO: 137478 - RNA, 1701 nt, Artificial Sequence
  derived and/or modified CDS sequence (opt3) from hemagglutinin__InfluenzaA__AFN19369
augaagaccaucauugcccugagcuacauacucugccuuguguucgcucagaaacugcccgagaacgacaauuccacagcaacuuuguguuuaggccaccaugccgucccuaacgggacgaucguuaagaccauuacaaaugaucaaaucgaagugacuaacgcgaccgagcugguacagucuucaaguacaggagaaauuugcgacagcccacaccagauccuagauggugugaauuguacccucauagacgcucugcuuggcgauccgcagugcgacggguuucaaaacaaaaagugggaucuguucgucgagagauccaaagccuauucuaauuguuaccccuaugacgugccugauuacgcaucguugaggucacucguugccagcaguggaacucuggaauuuaacaaugaguccuucaacuggacaggcgugacccagaaugguacgucuagcgcuugcauccggcgcuccaacucaaguuucuuuagccgacugaauuggcucacucauuuaaacuuuaaguauccagcacugaaugucaccaugcccaacaacgagcaguucgacaagcuguacauuuggggagugcaccauccugggacagauaaagaccagaucuuuuuguaugcccaaucuuccggccguauuacuguaucaaccaagagaagccagcaggcuguuaucccaaauauaggcaguaggccccggauucgcaacaucccuucuagaauuuccaucuacuggacaaucgugaaaccaggggauauucugcuaauaaauagcaccggaaaccucaucgccccgagggguuacuucaagauucggucgggcaaaucuuccaucaugcgcucagacgcgcccauagggaaguguaauagugaaugcauuacgccuaacggaagcaucccaaaugacaagcccuuucagaacgucaaucgaaucacuuauggcgcauguccuagauacgugaaacaauccacacugaaacuugccaccgguaugaggaacgugccagagaagcagacucgggggauuuucggagcuaucgccggcuuuauugaaaauggcugggaggggauggucgauggaugguaugguuuccgucaccagaacucugagggccgcgggcaagcagcugaccuuaagagcacacaggccgcgauagaucagaucaauggaaaauugaacagacucauuggcaagaccaaugaaaaauuccaccagaucgagaaggaauuuucagagguugaagguaggauccaagaccuggagaaguacguggaggauacgaaaauugacuuauggaguuauaacgccgaacugcucguagcacuugagaaccagcauaccauagaucugacagacuccgaaaugaauaaguuguucgagaaaacuaagaaacagcuacgggaaaacgcugaggauauggggaauggcugcuuuaagaucuaccacaagugugacaacgccugcauuggaagcauccgaaauggcaccuauaaccaugauguguaccgcgacgaggcucugaauaacagauuccagauuaaaggggucgaacucaagucuggauacaaagacuggauccuguggauaucauuugccaucaguugcuuccuucuguguguggcauugcucgguuuuauuaugugggccugccaaaagggcaauaucagguguaacauuugcaucuga

SEQ ID NO: 137479 - RNA, 1701 nt, Artificial Sequence
  derived and/or modified CDS sequence (opt3) from hemagglutinin__InfluenzaA__AFN19373
augaagaccaucauugcccugagcuacauacucugccuuguguucgcucagaaacugcccggcaacgacaauuccacagcaacuuuguguuuagggcaccaugccgucccuaacggaacgaucguuaagaccauuacaaaugaucaaaucgaggugacuaacgcgaccgaacugguacaaaauucuucaauuggugagaucugcgacaguccacaccagauacuagauggcgaaaacuguacacucaucgacgcucugcuuggggauccgcagugcgacggauuucagaauaaaaagugggaucuguucguggagagaagcaaagccuauuccaacuguuaccccuaugacgucccugauuacgcaucuuugaggucgcucguggccucaagcggcacccuggaauuuaauaacgagaguuucaauuggacugguguuacacagaacgggaccuccucugcuugcauucggcgcagcaauaacuccuuuuucucacgacugaauuggcucacgcauuuaaacuuuaaguauccagcacugaacgugacuaugcccaauaacgagcaguucgacaaguuguacaucuggggaguccaccauccuggcaccgauaaagaccagauuuuucuuuaugcccaaaguagcggccguaucacagugucuacuaagagaucccagcaggcuguaauaccaaauauugggucaaggccccggauccgcaacauuccuagcagaaucaguaucuacuggaccauuguuaaaccaggagauauacugcuaaucaauucuacagguaaccucauugccccgaggggcuacuucaagauccgguccgggaaaagcucgauaaugcgcucugacgcgcccauuggaaaguguaauuccgaaugcaucaccccuaacggcucaaucccaaaugacaagcccuuucagaacgugaaucgaauuacguauggugcauguccuagauacgucaaacaaaguacucugaaacuugccacagggaugaggaacgugccagagaagcagacccggggaaucuucggcgcuauugccggcuuuauagaaaaugggugggagggaaugguggaugguugguauggcuuccgucaccagaacagcgaggggcgcggacaagcagcugaccugaaguccacucaggccgcgaucgaucagauuaauggcaaauugaacagacucaucgguaagacaaacgaaaaauuccaccagaucgagaaggaauuuucugaggucgaagggaggauucaagaccuggagaaguacguugaggauaccaaaauagacuuauggagcuauaaugccgaacugcucguggcacuugagaaccagcauacgaucgaucugaccgacucagaaaugaauaaguuguucgagaaaacaaagaaacagcuacgggaaaacgcugaggauaugggcaauggaugcuuuaagauuuaccacaagugugacaacgccugcaucggcaguauucgaaaugggacuuaugaucaugacguauaccgcgacgaggcucugaacaauagauuccagaucaaaggaguggaacucaaguccgguuacaaagauuggauacuguggaucagcuuugccauuucuugcuuccuucugugugucgcauugcucggcuuuaucaugugggccugccaaaaggggaacauuagguguaauaucugcauauga

SEQ ID NO: 137480 - RNA, 1701 nt, Artificial Sequence; identical to SEQ ID NO: 137122
  derived and/or modified CDS sequence (opt3) from hemagglutinin__InfluenzaA__AFN19375

SEQ ID NO: 137481 - RNA, 1701 nt, Artificial Sequence
  derived and/or modified CDS sequence (opt3) from hemagglutinin__InfluenzaA__AFN19377
augaagaccaucauugcccugagcuacauacucugccuuguguucgcucagaaacugcccgagaacgacaauuccacagcaacuuuguguuuaggccaccaugccgucccuaacgggacgaucguuaagaccauuacaaaugaucaaaucgaagugacuaacgcgaccgagcugguacagucuucaaguacaggagaaauuugcgacagcccacaccagauccuagauggugugaauuguacccucauagacgcucugcuuggcgauccgcagugcgacggguuucaaaacaaaaagugggaucuguucgucgagagauccaaagccuauucuaauuguuaccccuaugacgugccugauuacgcaucguugaggucacucguugccagcaguggaacucuggaauuuaacaaugaguccuucaacuggacaggcgugacccagaaugguacgucuagcgcuugcauccggcgcuccaacucaaguuucuuuagccgacugaauuggcucacucauuuaaacuuuaaguauccagcacugaaugucaccaugcccaacaacgagcaguucgacaagcuguacauuuggggagugcaccauccugggacagauaaagaccagaucuuuuuguaugcccaaucuuccggccguauuacuguaucaaccaagagaagccagcaggcuguuaucccaaauauaggcaguaggccccggauucgcaacaucccuucuagaauuuccaucuacuggacaaucgugaaaccaggggauauucugcuaauaaauagcaccggaaaccucaucgccccgagggguuacuucaagauucggucgggcaaaucuuccaucaugcgcucagacgcgcccauagggaaguguaauagugaaugcauuacgccuaacggaagcaucccaaaugacaagcccuuucagaacgucaaucgaaucacuuauggcgcauguccuagauacgugaaacaauccacacugaaacuugccaccgguaugaggaacgugccagagaagcagacucgggggauuuucggagcuaucgccggcuuuauugaaaauggcugggaggggauggucgauggaugguaugguuuccgucaccagaacucugagggccgcgggcaagcagcugaccuuaagagcacacaggccgcgauagaucagaucaauggaaaauugaacagacucauuggcaagaccaaugaaaaauuccaccagaucgagaaggaauuuucagagguugaagguaggauccaagaccuggagaaguacguggaggauacgaaaauugacuuauggaguuauaacgccgaacugcucguagcacuugagaaccagcauaccauagaucugacagacuccgaaaugaauaaguuguucgagaaaacuaagaaacagcuacgggaaaacgcugaggauauggggaauggcugcuuuaagaucuaccacaagugugacaacgccugcauuggaagcauccgaaauggcaccuauaaccaugauguguaccgcgacgaggcucugaauaacagauuccagauuaaaggggucgaacucaagucuggauacaaagacuggauccuguggauaucauuugccaucaguugcuuccuucuguguguggcauugcucgguuuuauuaugugggccugccaaaauggcaacaucagguguaauauuugcaucuga

SEQ ID NO: 137482 - RNA, 1701 nt, Artificial Sequence; identical to SEQ ID NO: 137122
  derived and/or modified CDS sequence (opt3) from hemagglutinin__InfluenzaA__AFN19379

SEQ ID NO: 137483 - RNA, 1701 nt, Artificial Sequence; identical to SEQ ID NO: 137479
  derived and/or modified CDS sequence (opt3) from hemagglutinin__InfluenzaA__AFN19381

SEQ ID NO: 137484 - RNA, 1701 nt, Artificial Sequence; identical to SEQ ID NO: 137478
  derived and/or modified CDS sequence (opt3) from hemagglutinin__InfluenzaA__AFN19383

SEQ ID NO: 137485 - RNA, 1701 nt, Artificial Sequence
  derived and/or modified CDS sequence (opt3) from hemagglutinin__InfluenzaA__AFN19385
augaagaccaucauugcccugagcuacauacucugccuuguguucgcucagaaacugcccgagaacgacaauuccacagcaacuuuguguuuaggccaccaugccgucccuaacgggacgaucguuaagaccauuacaaaugaucaaaucgaagugacuaacgcgaccgagcugguacagucuucaaguacaggagaaauuugcgacagcccacaccagauccuagauggugugaauuguacccucauagacgcucugcuuggcgauccgcagugcgacggguuucaaaacaaaaagugggaucuguucgucgagagauccaaagccuauucuaauuguuaccccuaugacgugccugauuacgcaucguugaggucacucguugccagcaguggaacucuggaauuuaacaaugaguccuucaacuggacaggcgugacccagaaugguacgucuagcgcuugcauccggcgcuccaacucaaguuucuuuagccgacugaauuggcucacucauuuaaacuuuaaguauccagcacugaaugucaccaugcccaacaacgagcaguucgacaagcuguacauuuggggagugcaccauccugggacagauaaagaccagaucuuuuuguaugcccaaucuuccggccguauuacuguaucaaccaagagaagccagcaggcuguuaucccaaauauaggcaguaggccccggauucgcaacaucccuucuagaauuuccaucuacuggacaaucgugaaaccaggggauauucugcuaauaaauagcaccggaaaccucaucgccccgagggguuacuucaagauucagucgggcaaaucuuccaucaugcggucagacgcgcccauagggaaguguaauagugaaugcauuacgccuaacggaagcaucccaaaugacaagcccuuucaaaacgucaaucgcaucacuuauggcgcauguccucgauacgugaaacaguccacacugaaacuugccaccgguaugagaaacgugccagagaagcagacuagggggauuuucggagcuaucgccggcuuuauugaaaauggcugggaggggauggucgauggaugguaugguuuccggcaccaaaacucugagggccgugggcaggcagcugaccuuaagagcacacaggccgcgauagaucagaucaauggaaaauugaaccgccucauuggcaagaccaaugaaaaauuccaccaaaucgagaaggaauuuucagagguugaagguagaauccaggaccuggagaaguacguggaggauacgaaaauugacauauggaguuauaacgccgaauuacugguagcacucgagaaccagcauaccaucgaucuuacagacuccgaaaugaauaagcuguucgagaaaacuaagaaacaguugagggaaaacgcugaggauauggggaauggcugcuuuaagauuuaccacaagugugacaacgccugcaucggaagcauucggaauggcaccuauaaccaugauguguaccgagacgaggcucuaaauaaccgcuuccaaaucaaaggggucgaacugaagucuggauacaaagacuggauacucuggaucucauuugccauuaguugcuuccugcuuuguguggcacuguuggguuuuaucaugugggccugccagaagggcaauauuagauguaacaucugcauauga

SEQ ID NO: 137486 - RNA, 1701 nt, Artificial Sequence; identical to SEQ ID NO: 137478
  derived and/or modified CDS sequence (opt3) from hemagglutinin__InfluenzaA__AFN19387

SEQ ID NO: 137487 - RNA, 1701 nt, Artificial Sequence; identical to SEQ ID NO: 137122
  derived and/or modified CDS sequence (opt3) from hemagglutinin__InfluenzaA__AFN19389

SEQ ID NO: 137488 - RNA, 1701 nt, Artificial Sequence; identical to SEQ ID NO: 137122
  derived and/or modified CDS sequence (opt3) from hemagglutinin__InfluenzaA__AFN19391

SEQ ID NO: 137489 - RNA, 1701 nt, Artificial Sequence
  derived and/or modified CDS sequence (opt3) from hemagglutinin__InfluenzaA__AFN19393
augaagaccaucauugcccugagcuacauacucugccuuguguucgcucagaaacugcccggcaacgacaauuccacagcaacuuuguguuuagggcaccaugccgucccuaacggaacgaucguuaagaccauuacaaaugaucaaaucgaggugacuaacgcgaccgaacugguacagucuucaagugcuggugagauuugcgacagcccacaccauauccuagauggcgaaaauuguacacucauagacgcccugcuuggggauccgcagugcgacggauuucagaacaaaaagugggaucuguucguggagagauccagggcauauucuaauuguuaccccuaugacgucccugauuacgccucguugcggucacucguggcuagcaguggcacccuggaauuuaacaaugaguccuucaacuggacugguguuacacaaaaugggaccucuagcgcaugcauccgccgauccaacaauucauuuuucagucgucugaacuggcucacgcacuuaaauuuuaaauauccagcccugaacgugacuaugcccaacaaugagcaguucgacaaacuuuacauuuggggaguccaucacccuggcaccgauaaggaccagaucuuuuuguaugcucaggccagcggcagaauuacagugucuacuaaaaggucccaacaggcgguaaucccaaacauagggucacggccccgcguuagaaauauuccuagcaggaucaguauuuacuggaccaucgugaagccaggagauauccugcuaauuaacucuacagguaaucucauagcaccgcggggcuacuucaaaauccgcuccggaaagagcucgauuaugcgaucugacgcccccaucgggaaauguaacuccgaaugcauaaccccuaauggcucaauuccaaacgacaagcccuuucagaaugucaacagaaucacguauggugcuuguccuagguacgugaagcagaguacucugaaacuugccacagggaugcggaaugugccagagaagcaaacccguggaaucuucggcgcaauugcuggcuuuaucgaaaacgggugggagggaaugauggaugguugguauggcuuccgccaccagaauagcgaggggagaggacaggccgcggaccugaaauccacucaagccgcaauugaucagauaaacggcaaguugaauaggcucaucgguaaaacaaacgaaaaguuccaucagauugagaaagaauuuucugaggucgaagggcggauccaggaccuggagaaguacguugaggauaccaagaucgacuuauggagcuauaacgcugaacugcucguggcccuugagaaucaacacacgauugaucugaccgacucagaaaugaacaaauuguucgagaagacaaagaagcagcuacgagaaaaugcugaggauaugggcaacggaugcuuuaaaauauaccauaagugugacaaugccugcaucggcaguauucgcaacgggacuuaugaucacgacguauacagagacgaggcacuguccaauagguuccagaucaagggaguggaacucaaaagcgguuacaaggauuggauucuguggaucucuuuugccauaucaugcuuccuucugugugucgcuuugcucggcuuuaucaugugggcgugccagaaagggaacauucgguguaauaucugcauuuga

SEQ ID NO: 137490 - RNA, 1701 nt, Artificial Sequence; identical to SEQ ID NO: 137478
  derived and/or modified CDS sequence (opt3) from hemagglutinin__InfluenzaA__AFN19397

SEQ ID NO: 137491 - RNA, 1701 nt, Artificial Sequence; identical to SEQ ID NO: 137122
  derived and/or modified CDS sequence (opt3) from hemagglutinin__InfluenzaA__AFN19399

SEQ ID NO: 137492 - RNA, 1701 nt, Artificial Sequence; identical to SEQ ID NO: 137478
  derived and/or modified CDS sequence (opt3) from hemagglutinin__InfluenzaA__AFN19401

SEQ ID NO: 137493 - RNA, 1701 nt, Artificial Sequence; identical to SEQ ID NO: 137122
  derived and/or modified CDS sequence (opt3) from hemagglutinin__InfluenzaA__AFN19403

SEQ ID NO: 137494 - RNA, 1701 nt, Artificial Sequence; identical to SEQ ID NO: 137478
  derived and/or modified CDS sequence (opt3) from hemagglutinin__InfluenzaA__AFN19405

SEQ ID NO: 137495 - RNA, 1701 nt, Artificial Sequence
  derived and/or modified CDS sequence (opt3) from hemagglutinin__InfluenzaA__AFN19407
augaagaccaucauugcccugagcuacauacucugccuuguguucgcucagaaacugcccggcaacgacaauuccacagcaacuuuguguuuagggcaccaugccgucccuaacggaacgaucguuaagaccauuacaaaugaucaaaucgaggugacuaacgcgaccgaacugguacaaaauucuucaauuggugagaucugcgacaguccacaccagauacuagauggcgaaaacuguacacucaucgacgcucugcuuggggauccgcagugcgacggauuucagaauaaaaagugggaucuguucguggagagaagcaaagccuauuccaacuguuaccccuaugacgucccugauuacgcaucuuugaggucgcucguggccucaagcggcacccuggaauuuaauaacgagaguuucaauugguccgguguuacucagaacgggacaucuagcgcuugcaugcggcgcuccaauucaaguuucuuuagccgacugaacuggcucacccauuuaaauuuuaaguauccagcacugaacgugacgaugcccaacaaugagcaguucgacaagcuguacauuuggggaguccaccauccuggcacugauaaagaccagaucuuuuuguaugcccaaucuuccggccguauuaccgugucaacaaagagaagccagcaggcuguaaucccaaacauagggaguaggccccggauucgcaauaucccuucuagaauuuccaucuacuggacuaucguuaaaccaggagauauucugcuaauaaacagcaccgguaaucucaucgccccgaggggcuacuucaagauucggucggggaaaucuuccaucaugcgcucagacgcgcccauaggaaaguguaacagugaaugcauuacaccuaauggcagcaucccaaacgacaagcccuuucagaaugugaaccgaaucaccuauggugcauguccuagauacgucaaacaauccacgcugaaacuugccacugggaugaggaaugugccagagaagcagacacggggaauuuucggcgcuaucgccggcuuuauugaaaacgggugggagggaaugguggaugguugguauggcuuccgucaccaaaauucugaggggcgcggacaggcagcugaccuuaagagcacccaggccgcgauagaucagaucaacggcaaauugaauagacucauugguaagacuaacgaaaaauuccaccagaucgagaaggaauuuucagaggucgaagggaggauccaagaccuggagaaguacguugaggauacaaaaauugacuuauggaguuauaacgccgaacugcucguggcacuugagaaucagcauaccauagaucugacggacuccgaaaugaacaaguuguucgagaaaaccaagaaacagcuacgggaaaaugcugaggauaugggcaacggaugcuuuaagaucuaccacaagugugacaaugccugcauuggcagcauccgaaacgggacauaugaucaugacguauaccgcgacgaggcucugaauaacagauuccagauuaaaggaguggaacucaagucugguuacaaagauuggauccuguggauaucauuugccaucaguugcuuccuucugugugucgcauugcucggcuuuauuaugugggccugccaaaaggggaauaucagguguaacauuugcaucuga

SEQ ID NO: 137496 - RNA, 1701 nt, Artificial Sequence
  derived and/or modified CDS sequence (opt3) from hemagglutinin__InfluenzaA__AFN19409
augaagaccaucauugcccugagcuacauacucugccuuguguucgcucagaaacugcccggcaacgacaauuccacagcaacuuuguguuuagggcaccaugccgucccuaacggaacgaucguuaagaccauuacaaaugaucaaaucgaggugacuaacgcgaccgaacugguacagucuucaaguauuggugagaucugcgacagcccacaccagauacuagauggcgaaaauuguacacucaucgacgcucugcuuggggauccgcagugcgacggauuucaaaacaaaaagugggaucuguucguggagagauccaaagccuauucuaauuguuaccccuaugacgucccugauuacgcaucguugaggucacucguggccagcaguggcacccuggaauuuaacaaugaguccuucaacuggacugguguuacacagaaugggaccucuagcgcuugcauucggcgcuccaacucaaguuucuuuagccgacugaauuggcucacgcauuuaaacuuuaaguauccagcacugaaugugacuaugcccaacaacgagcaguucgacaagcuguacaucuggggaguccaccauccuggcaccgauaaagaccagauuuuucuuuaugcccaaucuuccggccguaucacagugucaacuaagagaagccagcaggcuguaauaccaaauauugggaguaggccccggauccgcaacauuccuucuagaaucuccaucuacuggaccauuguuaaaccaggagauauacugcuaaucaauagcacagguaaccucauugccccgaggggcuacuucaagauccggucggggaaaucuuccauaaugcgcucagacgcgcccauuggaaaguguaauagugaaugcaucaccccuaacggcagcaucccaaaugacaagcccuuucagaacgugaaucgaauuacguauggugcauguccuagauacgucaaacaauccacucugaaguuggccacagggaugaggaacgugccagagaaacagacccggggaaucuucggcgcuauugccggcuuuauagaaaaugggugggagggaaugguggaugguugguauggcuuccgucaccagaacucugaggggcgcggacaagcagcugaccuuaagagcacucaggccgcgaucgaucagauuaauggcaaauugaacagacucaucgguaagacaaaugaaaaauuccaccagaucgagaaggaauuuucagaggucgaagggaggauucaagaccuggagaaguacguugaggauaccaaaauagacuuauggaguuauaacgccgaacugcucguggcacuugagaaccagcauacgaucgaucugaccgacuccgaaaugaauaaguuguucgagaaaacaaagaaacagcuacgggaaaacgcugaggauaugggcaauggaugcuuuaagauuuaccacaagugugacaacgccugcaucggcagcauucgaaaugggacuuauaaccaugauguauaccgcgacgaggcucugaauaacagauuccagaucaaaggaguggaacucaagucugguuacaaagacuggauacuguggaucucauuugccauuaguugcuuccuucugugugucgcauugcucggcuuuaucaugugggccugccaaaaggggaauauuagguguaacaucugcauauga

SEQ ID NO: 137497 - RNA, 1701 nt, Artificial Sequence; identical to SEQ ID NO: 137478
  derived and/or modified CDS sequence (opt3) from hemagglutinin__InfluenzaA__AFN19411

SEQ ID NO: 137498 - RNA, 1701 nt, Artificial Sequence; identical to SEQ ID NO: 137122
  derived and/or modified CDS sequence (opt3) from hemagglutinin__InfluenzaA__AFN19413

SEQ ID NO: 137499 - RNA, 1701 nt, Artificial Sequence
  derived and/or modified CDS sequence (opt3) from hemagglutinin__InfluenzaA__AFN19415
augaagaccaucauugcccugagcuacauacucugccuuguguucgcucagaaacugcccggcaacgacaauuccacagcaacuuuguguuuagggcaccaugccgucccuaacggaacgaucguuaagaccauuacaaaugaucaaaucgaggugacuaacgcgaccgaacugguacagucuucaaguacaggugagauuugcgacagcccacaccagauccuagauggcgaaaauuguacccucauagacgcucugcuuggggauccgcagugcgacggauuucaaaacaaaaagugggaucuguucguggagagauccaaagccuauucuaauuguuaccccuaugacgucccugauuacgcaucguugaggucacucguggccagcaguggcacucuggaauuuaacaaugaguccuucaacuggacagguguuacccagaaugggacgucuagcgcuugcauccggcgcuccaacucaaguuucuuuagccgacugaauuggcucacucauuuaaacuuuaaguauccagcacugaaugugaccaugcccaacaacgagcaguucgacaagcuguacauuuggggaguccaccauccuggcacagauaaagaccagaucuuuuuguaugcccaaucuuccggccguauuacugugucaaccaagagaagccagcaggcuguaaucccaaauauagggaguaggccccggauucgcaacaucccuucuagaauuuccaucuacuggacaaucguuaaaccaggagauauucugcuaauaaauagcaccgguaaccucaucgccccgaggggcuacuucaagauucggucggggaaaucuuccgugaugcgcucagacgcgcccaucggaaaguguaauagugaaugcauaacgccuaacggcagcauuccaaaugacaagcccuuucagaacgucaaucgaaucacuuauggugcauguccuagauacgugaaacaauccacacugaaacuugccaccgggaugaggaacgugccagagaagcagacucggggaaucuucggcgcuauugccggcuuuaucgaaaaugggugggagggaauggucgaugguugguauggcuuccgucaccagaacucugaggggcgcggacaagcagcugaccuuaagagcacacaggccgcgauugaucagauaaauggcaaauugaacagacucaucgguaagaccaaugaaaaauuccaccagauugagaaggaauuuucagagguugaagggaggauccaagaccuggagaaguacguggaggauacgaaaaucgacuuauggaguuauaacgccgaacugcucguagcacuugagaaccagcauaccauugaucugacagacuccgaaaugaauaaguuguucgagaaaacuaagaaacagcuacgggaaaacgcugaggauaugggcaauggaugcuuuaagauauaccacaagugugacaacgccugcaucggcagcauucgaaaugggaccuauaaccaugauguguaccgcgacgaggcucugaauaacagauuccagaucaaaggagucgaacucaagucugguuacaaagacuggauucuguggaucucauuugccauaaguugcuuccuucuguguguggcauugcucggcuuuaucaugugggccugccaaaaggggaauauuagguguaacaucugcauuuga

SEQ ID NO: 137500 - RNA, 1701 nt, Artificial Sequence
  derived and/or modified CDS sequence (opt3) from hemagglutinin__InfluenzaA__AFN19417
augaagaccaucauugcccugagcuacauacucugccuuguguucgcucagaaacugcccggcaacgacaauuccacagcaacuuuguguuuagggcaccaugccgucccuaacggaacgaucguuaagaccauuacaaaugaucaaaucgaggugacuaacgcgaccgaacugguacagucuucaaguacaggugagauuugcgacagcccacaccagauccuagauggcgaaaauuguacccucauagacgcucugcuuggggauccgcagugcgacggauuucaaaacaaaaagugggaucuguucguggagagauccaaagccuauucuaauuguuaccccuaugacgucccugauuacgcaucguugaggucacucaucgccagcaguggcacucuggaauuuaacaaugaguccuucaacuggacaggugugacccagaaugggacgucuagcgcuugcauucggcgcuccaacucaaguuucuuuagccgacugaauuggcucacucauuuaaacuuuaaguauccagcacugaauguuaccaugcccaacaacgagcaguucgacaagcuguacaucuggggagugcaccauccuggcacagauaaagaccagauuuuucuuuaugcccaaucuuccggccguaucacugucucaaccaagagaagccagcaggcugugauaccaaauauugggaguaggccccggauccgcaacauuccuucuagaaucuccaucuacuggacaauuguaaaaccaggagauauacugcuaaucaauagcaccgguaaccucauugccccgaggggcuacuucaagauccggucggggaaaucuuccauaaugcgcucagacgcgcccauuggaaaguguaauagugaaugcaucacgccuaacggcagcaucccaaaugacaagcccuuucagaacguuaaucgaauuacuuauggugcauguccuagauacgugaaacaauccacacugaaguuggccaccgggaugaggaacgucccagagaaacagacucggggaaucuucggcgcuauugccggcuuuauagaaaaugggugggagggaaugguggaugguugguauggcuuccgucaccagaacucugaggggcgcggacaagcagcugaccuuaagagcacacaggccgcgaucgaucagauuaauggcaaauugaacagacucaucgguaagaccaaugaaaaauuccaccagaucgagaaggaauuuucagagguggaagggaggauucaagaccuggagaaguacgucgaggauacgaaaauagacuuauggaguuauaacgccgaacugcucguugcacuugagaaccagcauaccaucgaucugacagacuccgaaaugaauaaguuguucgagaaaacuaagaaacagcuacgggaaaacgcugaggauaugggcaauggaugcuuuaagauuuaccacaagugugacaacgccugcaucggcagcauucgaaaugggaccuauaaccaugauguguaccgcgacgaggcucugaauaacagauuccagaucaaaggaguagaacucaagucugguuacaaagacuggauacuguggaucucauuugccauuaguugcuuccuucuguguguggcauugcucggcuuuaucaugugggccugccaaaaggggaauauuagguguaacaucugcauauga

SEQ ID NO: 137501 - RNA, 1701 nt, Artificial Sequence
  derived and/or modified CDS sequence (opt3) from hemagglutinin__InfluenzaA__AFN19423
augaagaccaucauugcccugagcuacauacucugccuuguguucgcucagaaacugcccggcaacgacaauuccacagcaacuuuguguuuagggcaccaugccgucccuaacggaacgaucguuaagaccauuacaaaugauagaaucgaggugacuaacgcgaccgaacugguacaaaauucuucaauuggugagaucugcgacaguccacaccagauacuagauggcgaaaacuguacacucaucgacgcucugcuuggggauccgcagugcgacggauuucagaauaaaaagugggaucuguucguggagaggagcaaagccuauuccaacuguuaccccuaugacgucccugauuacgcaucuuugcggucgcucguggccucaagcggcacccuggaauuuaauaacgagaguuucaauuggacugguguuacacaaaacgggaccuccucugcuugcauucgccgaagcaauaacuccuuuuucucacgucugaauuggcucacgcauuuaaacuuuaaguauccagcacugaacgugacuaugcccaauaacgagcaguucgacaaacuuuacaucuggggaguccaccauccuggcaccgauaaagaccagaucuuuuuguaugcccagaguagcggcagaauuacagugucuacuaagaggucccaacaggcuguaauaccaaauauugggucacggccccgcaucagaaacauuccuagcaggaucaguaucuacuggaccauuguuaaaccaggagauauacugcuaaucaauucuacagguaaccucauugccccgcggggcuacuucaagauccgcuccgggaaaagcucgauaaugcgaucugacgcgcccauuggaaaguguaaguccgaaugcaucaccccuaauggcucaaucccaaacgacaaacccuuucagaaugugaacagaauuacguauggugcauguccuagguacgucaagcagaguacucugaaacuugccacagggaugcggaaugugccagagaagcaaacccguggaaucuucggcgcuauugccggcuuuauagaaaacgggugggagggaaugguggaugguugguauggcuuccgccaccagaauagcgaggggagaggacaggcagcugaccugaaauccacucaagccgcgaucgaucagauuaacggcaaguugaauaggcucaucgguaaaacaaacgaaaaguuccaccagaucgagaaggaauuuucugaggucgaagggcggauucaggaccuggagaaauacguugaggauaccaagauagacuuauggagcuauaacgccgaacugcucguggcacuugagaaucaacauacgaucgaucugaccgacucagaaaugaacaaauuguucgagaagacaaagaagcagcuacgagaaaaugcugaggauaugggcaacggaugcuuuaagauuuaccacaaaugugacaaugccugcaucggcaguauucgcaacgggacuuaugaucaugacguauacagagacgaggcucugaauaacagguuccagaucaagggaguggaacucaaauccgguuacaaggauuggauacuguggaucagcuuugccauuucuugcuuccuucugugugucgcauugcucggcuuuaucaugugggccugccagaaagggaauauucgguguaacaucugcauauga

SEQ ID NO: 137502 - RNA, 1701 nt, Artificial Sequence; identical to SEQ ID NO: 137478
  derived and/or modified CDS sequence (opt3) from hemagglutinin__InfluenzaA__AFN19425

SEQ ID NO: 137503 - RNA, 1701 nt, Artificial Sequence
  derived and/or modified CDS sequence (opt3) from hemagglutinin__InfluenzaA__AFN19437
augaagaccaucauugcccugagcuacauacucugccuuguguucgcucagaaacugcccggcaacgacaauuccacagcaacuuuguguuuagggcaccaugccgucccuaacggaacgaucguuaagaccauuacaaaugaucaaaucgaggugacuaacgcgaccgaacugguacaaaauucuucaauuggugagaucugcgacaguccacaccagauacuagauggcgaaaacuguacacucaucgacgcucugcuuggggauccgcagugcgacggauuucagaauaaaaagugggaucuguucguggagagaagcaaagccuauuccaacuguuaccccuaugacgucccugauuacgcaucuuugaggucgcucguggccucaagcggcacccuggaauuuaauaacgagaguuucaauuggacugguguuacacagaacgggaccuccucugcuugcauucggcgcagcaauuccucauuuuucagucgacugaacuggcucacgcauuuaaauuuuaaguauccagcacugaacgugacuaugcccaacaaugagcaguucgacaaacuuuacaucuggggaguccaccauccuggcaccgauaaagaccagaucuuuuuguaugcccaaagcucuggccguauuacaguguccacuaagagaucacagcaggcuguaauaccaaacauugggagcaggccccggauccgcaauauuccuaguagaaucucuaucuacuggaccauuguuaaaccaggagauauacugcuaaucaacuccacagguaaucucauugccccgaggggcuacuuccggauccgcagcgggaagucgucuauaaugcgauccgacgcgcccauuggaaaauguaacucagaaugcaucaccccuaauggcaguaucccaaacgacaagcccuuucagaaugugaacagaauuacguauggugcauguccuagguacgucaagcaaagcacucugaaacuugccacagggaugcggaaugugccagagaagcagacccguggaaucuucggcgcuauugccggcuuuauagaaaacgggugggagggaaugguggaugguugguauggcuuccgccaccaaaauuccgaggggagaggacaggcagcugaccugaaaucuacucaggccgcgaucgaucagauuaacaggaaguugaaucggcucaucggcaaaacaaacgaaaaguuccaccagaucgagaaagaauuuagcgaggucgaaggucgcauucaagaccuggagaaguacguugaggauaccaagauagacuuauggucauauaacgccgaacugcucguggcacuugagaaucagcauacgaucgaucugaccgacagugaaaugaacaaauuguucgagaagacaaagaagcagcuacgagaaaaugcugaggauauggggaacggcugcuuuaaaauuuaccacaagugugacaaugccugcaucggauccauuagaaacggcacuuaugaucauuacguauacagggacgaggcucugaauaaccgguuccagaucaaggggguggaacucaaaagcggauauaaggacuggauacuguggaucucuuuugccauuucaugcuuccuucugugugucgcauugcucgguuuuaucaugugggccugccaaaaaggcaauauucgcuguaacaucugcauauga

SEQ ID NO: 137504 - RNA, 1701 nt, Artificial Sequence
  derived and/or modified CDS sequence (opt3) from hemagglutinin__InfluenzaA__AFN19439
augaagaccaucauugcccugagccacauacucugccuuguguucgcucagaaacugcccgagaacgacaauuccacagcaacuuuguguuuaggccaucacgccgucccuaacgggacgaucguuaagaccauuacaaaugaucaaaucgaagugacuaacgcgaccgagcugguacagucuucaaguacaggagaaauuugcgacagcccacaucagauccuagaugguauaaauuguacccucaucgacgcucugcuuggcgauccgcagugcgacggguuucaaaacaaaaagugggaucuguucguggagagauccaaagccuacucuaauuguuaucccuacgacgucccugauuaugcaucguugaggucacucguggccagcaguggaacucuggaauuuaacaaugaguccuucaacuggacaggcguuacccagaaugguacgucuagcgcuugcauucggcgcuccaacucaaguuucuuuagccgacugaauuggcucacucacuuaaacuuuaaguacccagcacugaaugugaccaugcccaacaacgagcaguucgacaaguuguauaucuggggaguccaucacccugggacagauaaagaccagauuuuucuuuacgcccaaccaucuggccguaucacuguguccaccaagagaucacagcaggcuguaauacccaauauuggcagcaggccucggauccgcaacauuccaaguagaaucucuaucuauuggacaauuguuaaaccgggggauauacugcuaaucaauuccaccggaaaccucauugcccccagggguuacuucaagauccggagcggcaaaucgucuauaaugcgcuccgacgcgccuauugggaaguguaauucagaaugcaucacgccaaacggaaguauccccaaugacaagccuuuucagaacgugaaucgaauuacuuacggcgcauguccaagauaugucaaacaaagcacacugaaacuugccaccgguaugaggaacgugcccgagaagcagacucgggggaucuucggagcuauugccggcuuuauagaaaauggcugggaggggaugguggauggaugguacgguuuccgucaccagaacuccgagggccgcgggcaagcagcugaccugaagucuacacaggccgcgaucgaucagauuaauggaaaauugaacagacucaucggcaagaccaaugaaaaauuccaucagaucgagaaggaauuuagcgaggucgaagguaggauucaagaccuggagaaguauguugaggauacgaaaauagacuuauggucauacaacgccgaacugcucguggcacuugagaaccagcacaccaucgaucugacagacagugaaaugaauaaguuguucgagaaaacuaagaaacagcuacgggaaaacgcugaggauauggggaauggcugcuuuaagauuuaucauaagugugacaacgccugcaucggauccauucgaaauggcaccuacaaccacgauguauaucgcgacgaggcucugaauaacagauuccagaucaaagggguggaacucaagagcggauacaaagacuggauacuguggaucucuuuugccauuucaugcuuccuucugugugucgcauugcucgguuuuaucaugugggccugccaaaagggcaauauuagguguaacaucugcauauga

SEQ ID NO: 137505 - RNA, 1701 nt, Artificial Sequence; identical to SEQ ID NO: 137479
  derived and/or modified CDS sequence (opt3) from hemagglutinin__InfluenzaA__AFN19443

SEQ ID NO: 137506 - RNA, 1701 nt, Artificial Sequence
  derived and/or modified CDS sequence (opt3) from hemagglutinin__InfluenzaA__AFN19445
augaagaccaucauugcccugagcuacauacucugccuuguguucgcucagaaacugcccggcaacgacaauuccacagcaacuuuguguuuagggcaccaugccgucccuaacggaacgaucguuaagaccauuacaaaugauagaaucgaggugacuaacgcgaccgaacugguacaaaauucuucaauuggugagaucugcgacaguccacaccagauacuagauggcgaaaacuguacacucaucgacgcucugcuuggggauccgcagugcgacggauuucagaauaaaaagugggaucuguucguggagaggagcaaagccuauuccaacuguuaccccuaugacgucccugauuacgcaucuuugcggucgcucguggccucaagcggcacccuggaauuuaauaacgagaguuucaauuggacugguguuacacaaaacgggaccuccucugcuugcauucgccgaagcaauaacuccuuuuucucacgucugaauuggcucacgcauuuaaacuuuaaguauccagcacugaacgugacuaugcccaauaacgagcaguucgacaaguuguacaucuggggaguccaccauccuggcaccgauaaagaccagauuuuucuuuaugcccagaguagcggcagaaucacagugucuacuaagaggucccaacaggcuguaauaccaaauauugggucacggccccgcaucagaaacauuccuagcaggaucaguaucuacuggaccauuguuaaaccaggagauauacugcuaaucaauucuacagguaaccucauugccccgcggggcuacuucaagauccgcuccgggaaaagcucgauaaugcgaucugacgcgcccauuggaaaguguaaguccgaaugcaucaccccuaauggcucaaucccaaacgacaaacccuuucagaaugugaacagaauuacguauggugcauguccuagguacgucaagcagaguacucugcggcuugccacagggaugcguaaugugccagagaaacaaacccgcggaaucuucggcgcuauugccggcuuuauagaaaacgggugggagggaaugguggaugguugguauggcuucagacaccagaauagcgaggggaggggacaggcagcugaccugaaguccacucaagccgcgaucgaucagauuaacggcaaauugaaucggcucaucgguaagacaaacgaaaaauuccaccagaucgagaaggaauuuucugaggucgaagggcgcauucaggaccuggagaaguacguugaggauaccaaaauagacuuauggagcuauaacgccgaacugcucguggcacuugagaaucaacauacgaucgaucugaccgacucagaaaugaacaaguuguucgagaaaacaaagaaacagcuacgagaaaaugcugaggauaugggcaacggaugcuuuaagauuuaccacaagugugacaaugccugcaucggcaguauuagaaacgggacuuaugaucaugacguauacagggacgaggcucugaauaaccgguuccagaucaaaggaguggaacucaaguccgguuacaaagauuggauacuguggaucagcuuugccauuucuugcuuccuucugugugucgcauugcucggcuuuaucaugugggccugccagaaggggaauauucgcuguaacaucugcauauga

SEQ ID NO: 137507 - RNA, 1701 nt, Artificial Sequence; identical to SEQ ID NO: 137501
  derived and/or modified CDS sequence (opt3) from hemagglutinin__InfluenzaA__AFN19447

SEQ ID NO: 137508 - RNA, 1701 nt, Artificial Sequence
  derived and/or modified CDS sequence (opt3) from hemagglutinin__InfluenzaA__AFN19451
augaagaccaucauugcccugagcuacauacucugccuuguguucgcucagaaacugcccggcaacgacaauuccacagcaacuuuguguuuagggcaccaugccgucccuaacggaacgaucguuaagaccauuacaaaugaucaaaucgaggugacuaacgcgaccgaacugguacaaaauucuucaauuggugagaucugcgacaguccacaccagauacuagauggcgaaaacuguacacucaucgacgcucugcuuggggauccgcagugcgacggauuucagaauaaaaagugggaucuguucguggagagaagcaaagccuauuccaacuguuaccccuaugacgucccugauuacgcaucuuugaggucgcucguggccucaagcggcacccuggaauuuaauaacgagaguuucaauuggacugguguuacacagaacgggaccuccucugcuugcauucggcgcagcaauuccucauuuuucagucgacugaacuggcucacgcauuuaaauuuuaaguauccagcacugaacgugacuaugcccaacaaugagcaguucgacaaguuguacaucuggggaguccaccauccuggcaccgauaaagaccagauuuuucuuuaugcccaaagcucuggccguaucacaguguccacuaagagaucacagcaggcuguaauaccaaacauugggagcaggccccggauccgcaauauuccuaguagaaucucuaucuacuggaccauuguuaaaccaggagauauacugcuaaucaacuccacagguaaucucauugccccgaggggcuacuucaagauccggagcgggaaaucgucuauaaugcgcuccgacgcgcccauuggaaaguguaacucagaaugcaucaccccuaauggcaguaucccaaacgacaagcccuuucagaaugugaaccgaauuacguauggugcauguccuagauacgucaaacaaagcacucugaaacuugccacagggaugaggaaugugccagagaagcagacccggggaaucuucggcgcuauugccggcuuuauagaaaacgggugggagggaaugguggaugguugguauggcuuccgucaccaaaauuccgaggggcgcggacaggcagcugaccugaagucuacucaggccgcgaucgaucagauuaacggcaaauugaauagacucaucgguaagacaaacgaaaaauuccaccagaucgagaaggaauuuagcgaggucgaagggaggauucaagaccuggagaaguacguugaggauaccaaaauagacuuauggucauauaacgccgaacugcucguggcacuugagaaucagcauacgaucgaucugaccgacagugaaaugaacaaguuguucgagaaaacaaagaaacagcuacgggaaaaugcugaggauaugggcaacggaugcuuuaagauuuaccacaagugugacaaugccugcaucggcuccauucgaaacgggacuuaugaucaugacguauaccgcgacgaggcucugaauaacagauuccagaucaauggaguggaacucaaaagcgguuacaaggauuggauacuguggaucucuuuugccauuucaugcuuccuucugugugucgcauugcucggcuuuaucaugugggccugccaaaaagggaacauuagguguaauaucugcauauga

SEQ ID NO: 137509 - RNA, 1701 nt, Artificial Sequence
  derived and/or modified CDS sequence (opt3) from hemagglutinin__InfluenzaA__AFN19453
augaagaccaucauugcccugagcuacauacucugccuuguguucgcucagaaacugcccggcaacgacaauuccacagcaacuuuguguuuagggcaccaugccgucccuaacggaacgaucguuaagaccauuacaaaugaucaaaucgaggugacuaacgcgaccgaacugguacaaaauucuucaauuggugagaucugcgacaguccacaccagauacuagauggcgaaaacuguacacucaucgacgcucugcuuggggauccgcagugcgacggauuucagaauaaaaagugggaucuguucguggagagaagcaaagccuauuccaacuguuaccccuaugacgucccugauuacgcaucuuugaggucgcucguggccucaagcggcacccuggaauuuaauaacgagaguuucaauuggacugguguuacacagaacgggaccuccucugcuugcauucggcgcagcaauuccucauuuuucagucgacugaacuggcucacgcauuuaaauuuuaaguauccagcacugaacgugacuaugcccaacaaugagcaguucgacaaguuguacaucuggggaguccaccauccuggcaccgauaaagaccagauuuuucuuuaugcccaaagcucuggccguaucacaguguccacuaagagaucacagcaggcuguaauaccaaacauugggagcaggccccggauccgcaauauuccuaguagaaucucuaucuacuggaccauuguuaaaccaggagauauacugcuaaucaacuccacagguaaucucauugccccgaggggcuacuucaagauccggagcgggaaaucgucuauaaugcgcuccgacgcgcccauuggaaaguguaacucagaaugcaucaccccuaauggcaguaucccaaacgacaagcccuuucagaaugugaaccgaauuacguauggugcauguccuagauacgucaaacaaagcacucugaaacuugccacagggaugaggaaugugccagagaagcagacccggggaaucuucggcgcuauugccggcuuuauagaaaacgggugggagggaaugguggaugguugguauggcuuccgucaccaaaauuccgaggggcgcggacaggcagcugaccugaagucuacucaggccgcgaucgaucagauuaacggcaaauugaauagacucaucgguaagacaaacgaaaaauuccaccagaucgagaaggaauuuagcgaggucgaagggaggauucaagaccuggagaaguacguugaggauaccaaaauagacuuauggucauauaacgccgaacugcucguggcacuugagaaucagcauacgaucgaucugaccgacagugaaaugaacaaguuguucgagaaaacaaagaaacagcuacgggaaaaugcugaggauaugggcaacggaugcuuuaagauuuaccacaagugugacaaugccugcaucggcuccauucgaaacgggacuuaugaucaugacguauaccgcgacgaggcucugaauaacagauuccaggugaaaggagucgaacucaagagcgguuacaaagauuggauccuguggauaucuuuugccaucucaugcuuccuucuguguguggcauugcucggcuuuauuaugugggccugccaaaaggggaauaucagguguaacauuugcaucuga

SEQ ID NO: 137510 - RNA, 1701 nt, Artificial Sequence; identical to SEQ ID NO: 137501
  derived and/or modified CDS sequence (opt3) from hemagglutinin__InfluenzaA__AFN19455

SEQ ID NO: 137511 - RNA, 1701 nt, Artificial Sequence; identical to SEQ ID NO: 137122
  derived and/or modified CDS sequence (opt3) from hemagglutinin__InfluenzaA__AFN19457

SEQ ID NO: 137512 - RNA, 1701 nt, Artificial Sequence; identical to SEQ ID NO: 137122
  derived and/or modified CDS sequence (opt3) from hemagglutinin__InfluenzaA__AFN19459

SEQ ID NO: 137513 - RNA, 1701 nt, Artificial Sequence; identical to SEQ ID NO: 137479
  derived and/or modified CDS sequence (opt3) from hemagglutinin__InfluenzaA__AFN19461

SEQ ID NO: 137514 - RNA, 1701 nt, Artificial Sequence
  derived and/or modified CDS sequence (opt3) from hemagglutinin__InfluenzaA__AFN19465
augaagaccaucauugcccugagcuacauacucugccuuguguucgcucagaaacugcccggcaacgacaauuccacagcaacuuuguguuuagggcaccaugccgucccuaacggaacgaucguuaagaccauuacaaaugaucaaaucgaggugacuaacgcgaccgaacugguacagucuucaaguacaggugagauuugcgacagcccacaccagauccuagauggcgaaaauuguacccucauagacgcucugcuuggggauccgcagugcgacggauuucaaaacaaaaagugggaucuguucguggagagauccaaagccuauucuaauuguuaccccuaugacgucccugauuacgcaucguugaggucacucguggccagcaguggcacucuggaauuuaacaaugaguccuucaacuggacagguguuacccagaaugggacgucuagcgcuugcauccggcgcuccaacucaaguuucuuuagccgacugaauuggcucacucauuuaaacuuuaaguauccagcacugaaugugaccaugcccaacaacgagcaguucgacaagcuguacauuuggggaguccaccauccuggcacagauaaagaccagaucuuuuuguaugcccaaucuuccggccguauuacugugucaaccaagagaagccagcaggcuguaaucccaaauauagggaguaggccccggauucgcaacaucccuucuagaauuuccaucuacuggacaaucguuaaaccaggagauauucugcuaauaaauagcaccgguaaccucaucgccccgaggggcuacuucaagauucggucggggaaaucuuccaucaugcgcucagacgcgcccauaggaaaguguaauagugaaugcauuacgccuaacggcagcaucccaaaugacaagcccuuucagaacgugaaucgaaucacuuauggugcauguccuagauacgucaaacaauccacacugaaacuugccaccgggaugaggaacgugccagagaagcagacucggggaauuuucggcgcuaucgccggcuuuauugaaaaugggugggagggaaugguggaugguugguauggcuuccgucaccagaacucugaggggcgcggacaagcagcugaccuuaagagcacacaggccgcgauagaucagaucaauggcaaauugaacagacucauugguaagaccaaugaaaaauuccaccagaucgagaaggaauuuucagaggucgaagggaggauccaagaccuggagaaguacguugaggauacgaaaauugacuuauggaguuauaacgccgaacugcucguggcacuugagaaccagcauaccauagaucugacagacuccgaaaugaauaaguuguucgagaaaacuaagaaacagcuacgggaaaacgcugaggauaucggcaauggaugcuuuaagauuuaccacaagugugacaacgccugcaucggcagcauucgaaaugggaccuauaaccaugauguauaccgcgacgaggcucugaauaacagauuccagaucaaaggaguggaacucaagucugguuacaaagacuggauacuguggaucucauuugccauuaguugcuuccuucuguguaucgcauugcucggcuuuauuaugugggccugccaaaaggggaauaucagguguaacauaugcauuuga

SEQ ID NO: 137515 - RNA, 1701 nt, Artificial Sequence; identical to SEQ ID NO: 137501
  derived and/or modified CDS sequence (opt3) from hemagglutinin__InfluenzaA__AFN19467

SEQ ID NO: 137516 - RNA, 1701 nt, Artificial Sequence; identical to SEQ ID NO: 137509
  derived and/or modified CDS sequence (opt3) from hemagglutinin__InfluenzaA__AFN19469

SEQ ID NO: 137517 - RNA, 1701 nt, Artificial Sequence; identical to SEQ ID NO: 137122
  derived and/or modified CDS sequence (opt3) from hemagglutinin__InfluenzaA__AFN19471

SEQ ID NO: 137518 - RNA, 1701 nt, Artificial Sequence
  derived and/or modified CDS sequence (opt3) from hemagglutinin__InfluenzaA__AFN19473
augaagaccaucauugcccugagcuacauacucugccuuguguucgcucagaaacugcccggcaacgacaauuccacagcaacuuuguguuuagggcaccaugccgucccuaacggaacgaucguuaagaccauuacaaaugaucaaaucgaggugacuaacgcgaccgaacugguacagucuucaaguacaggugagauuugcggcagcccacaccagauccuagacggggaaaauuguacccucauagaugcucugcuuggagacccgcagugcgauggcuuucaaaacaaaaagugggaccuguucguggagagauccaaagccuauucuaauuguuaccccuaugaugucccugacuacgcaucguugaggucacucguggccagcagugguacucuggaauuuaacaaugaguccuucaacuggacagggguuacccagaauggaacgucuagcgcuugcauccggcgcuccaacucaaguuucuuuagccgacugaauuggcucacucauuuaaacuuuaaguauccagcacugaaugugaccaugcccaacaacgagcaguucgauaagcuguacauuuggggcguccaccauccuggcacagacaaagaucagaucuuuuuguaugcccaaucuuccgggcguauuacugugucaaccaagagaagccagcaggcuguaaucccaaauauaggaaguaggccccggauucgcaacaucccuucuagaauuuccaucuacuggacaaucguuaaaccaggugacauucugcuaauaaauagcaccggcaaccucaucgccccgaggggguacuucaagauucggucgggaaaaucuuccaucaugcgcucagaugcgcccauaggcaaguguaauagugaaugcauuacgccuaacgguagcaucccaaaugacaagcccuuucagaacgugaaucgaaucacuuauggggcauguccuagauacgucaaacaauccacacugaaacuugccaccggaaugaggaacgugccagagaagcagacucggggcauuuucggcgcuaucgccggguuuauugaaaauggaugggaggguaugguggacggcugguauggguuccgucaccagaacucugagggacgcggccaagcagcugaucuuaagagcacacaggccgcgauagaccagaucaaugguaaauugaacagacucauugggaagaccaaugaaaaauuccaccagaucgagaaggaauuuucagaggucgaaggcaggauccaagaucuggagaaguacguugaggacacgaaaauugauuuauggaguuauaacgccgaacugcucguggcacuugagaaccagcauaccauagaccugacagauuccgaaaugaauaaguuguucgagaaaacuaagaaacagcuacgggaaaacgcugaggacaugggaaauggcugcuuuaagaucuaccacaagugugauaacgccugcauugggagcauccgaaauggaaccuauaaccaugacguauaccgcgaugaggcucugaauaacagauuccagauuaaagguguggaacucaagucuggcuacaaagacuggauccuguggauaucauuugccaucaguugcuuccuucugugugucgcauugcucggguuuauuaugugggccugccaaaagggaaauaucagguguaacauuugcaucuga

SEQ ID NO: 137519 - RNA, 1701 nt, Artificial Sequence; identical to SEQ ID NO: 137501
  derived and/or modified CDS sequence (opt3) from hemagglutinin__InfluenzaA__AFN19475

SEQ ID NO: 137520 - RNA, 1701 nt, Artificial Sequence; identical to SEQ ID NO: 137122
  derived and/or modified CDS sequence (opt3) from hemagglutinin__InfluenzaA__AFN19477

SEQ ID NO: 137521 - RNA, 1701 nt, Artificial Sequence
  derived and/or modified CDS sequence (opt3) from hemagglutinin__InfluenzaA__AFN19479
augaagaccaucauugcccugagcugcauacucugucuuguguucgcucagaaacugcccggcaacgacaauuccacagcaacuuugugcuuagggcaccaugccgucccuaacggaacgaucguuaagaccauuacaaaugaucaaaucgaggugacuaacgcgaccgaacugguacaaaauucuucaauuggugagaucugugacaguccacaccagauacuagauggcgaaaacugcacacucaucgacgcucugcuuggggauccgcagugugacggauuucagaauaaaaagugggaucuguucguggagagaagcaaagccuacuccaacugcuaucccuacgacgucccugauuaugcaucuuugaggucgcucguggccucaagcggcacccuggaauuuaauaacgagaguuucaauuggacugguguuacacagaacgggaccuccucugcuuguauucggcgcagcaauuccucauuuuucagucgacugaacuggcucacgcauuuaaauuuuaaguacccagcacugaacgugacuaugcccaacaaugagcaguucgacaaguuguauaucuggggaguccaccauccuggcaccgauaaagaccagauuuuucuuuacgcccaaagcucuggccguaucacaguguccacuaagagaucacagcaggcuguaauaccaaacauugggagcaggccccggauccgcaauauuccuaguagaaucucuaucuauuggaccauuguuaaaccaggagauauacugcuaaucaacuccacagguaaucucauugccccgaggggcuacuucaagauccggagcgggaaaucgucuauaaugcgcuccgacgcgcccauuggaaagugcaacucagaauguaucaccccuaauggcaguaucccaaacgacaagcccuuucagaaugugaaccgaauuacguacggugcaugcccuagauaugucaaacaaagcacucugaaacuugccacagggaugaggaaugugccagagaagcagacccggggaaucuucggcgcuauugccggcuuuauagaaaacgggugggagggaaugguggaugguugguacggcuuccgucaccaaaauuccgaggggcgcggacaggcagcugaccugaagucuacucaggccgcgaucgaucagauuaacggcaaauugaauagacucaucgguaagacaaacgaaaaauuccaccagaucgagaaggaauuuagcgaggucgaagggaggauucaagaccuggagaaguauguugaggauaccaaaauagacuuauggucauacaacgccgaacugcucguggcacuugagaaucagcauacgaucgaucugaccgacagugaaaugaacaaguuguucgagaaaacaaagaaacagcuacgggaaaaugcugaggauaugggcaacggauguuuuaagauuuaucacaagugcgacaaugccugcaucggcuccauucgaaacgggacuuacgaucaugacguauaucgcgacgaggcucugaauaacagauuccagaucaaaggaguggaacucaagagcgguuacaaagauuggauacuguggaucucuuuugccauuucauguuuccuucugugcgucgcauugcucggcuuuaucaugugggccugucaaaaggggaauauuaggugcaacaucuguauauga

SEQ ID NO: 137522 - RNA, 1701 nt, Artificial Sequence; identical to SEQ ID NO: 137501
  derived and/or modified CDS sequence (opt3) from hemagglutinin__InfluenzaA__AFN19483

SEQ ID NO: 137523 - RNA, 1701 nt, Artificial Sequence; identical to SEQ ID NO: 134903
  derived and/or modified CDS sequence (opt3) from hemagglutinin__InfluenzaA__AFN19485

SEQ ID NO: 137524 - RNA, 1701 nt, Artificial Sequence; identical to SEQ ID NO: 137122
  derived and/or modified CDS sequence (opt3) from hemagglutinin__InfluenzaA__AFN19487

SEQ ID NO: 137525 - RNA, 1701 nt, Artificial Sequence
  derived and/or modified CDS sequence (opt3) from hemagglutinin__InfluenzaA__AFN19491
augaagaccaucauugcccugagcuacauacucugccuuguguucgcucagaaacugcccggcaacgacaauuccacagcaacuuuguguuuagggcaccaugccgucccuaacggaacgaucguuaagaccauuacaaaugaucaaaucgaggugacuaacgcgaccgaacugguacagucuucaaguacaggugagauuugcgacagcccacaccagauccuagauggcgaaaauuguacccucauagacgcucugcuuggggauccgcagugcgacggauuucaaaacaaaaagugggaucuguucguggagagauccaaagccuauucuaauuguuaccccuaugacgucccugauuacgcaucguugaggucacucguggccagcaguggcacucuggaauuuaacaaugaguccuucaacuggacagguguuacccagaaugggacgucuagcgcuugcauccggcgcuccaacucaaguuucuuuagccgacugaauuggcucacucauuuaaacuuuaaguauccagcacugaaugugaccaugcccaacaacgagcaguucgacaagcuguacauuuggggaguccaccauccuggcacagauaaagaccagaucuuuuuguaugcccaaucuuccggccguauuacugugucaaccaagagaagccagcaggcuguaaucccaaauauagggaguaggccccggauucgcaacaucccuucuagaauuuccaucuacuggacaaucguuaaaccaggagauauucugcuaauaaauagcaccgguaaccucaucgccccgaggggcuacuucaagauucggucggggaaaucuuccaucaugcgcucagacgcgcccauaggaaaguguaauagugaaugcauuacgccuaacggcagcaucccaaaugacaagcccuuucagaacgugaaucgaaucacuuauggugcauguccuagauacgucaaacaauccacacugaaacuugccaccgggaugaggaacgugccagagaagcagacucggggaauuuucggcgcuaucgccggcuuuauugaaaaugggugggagggaaugguggaugguugguauggcuuccgucaccagaacucugaggggcgcggacaagcagcugaccuuaagagcacacaggccgcgauagaucagaucaauggcaaauugaacagacucauugguaagaccaaugaaaaauuccaccagaucgagaaggaauuuucagaggucgaagggaggauccaagaccuggagaaguacguugaggauacgaaaauugacuuauggaguuauaacgccgaacugcucguggcacuugagaaccagcauaccauagaucugacagacuccgaaaugaauaaguuguucgagaaaacuaagaaacagcuacgggaaaacgcugaggauaugggcaauggaugcuuuaagaucuaccacaagugugacaacgccugcauuggcagcauccgaaaugggaccuauaaccaugauguauaccgcgacgaggcucugaauaacagauuccagauuaaaggaguggaacucaagucugguuacaaagacuggauccuguggauaucauuugccaucaguugcuuccuucugugugucguguugcucggcuuuauuaugugggcaugccaaaaggggaauaucagguguaacauuugcaucuga

SEQ ID NO: 137526 - RNA, 1701 nt, Artificial Sequence
  derived and/or modified CDS sequence (opt3) from hemagglutinin__InfluenzaA__AFN19493
augaagaccaucauugcccugagcuacauacucugccuuguguucgcucagaaacugcccggcaacgacaauuccacagcaacuuuguguuuagggcaccaugccgucccuaacggaacgaucguuaagaccauuacaaaugaucaaaucgaggugacuaacgcgaccgaacugguacagucuucaaguacaggugagauuugcaauagcccacaccagauccuagacggcgaaaacuguacccucauagaugcucugcuuggggacccgcagugcgauggauuucaaaauaaaaagugggaccuguucguggagagauccaaagcccauucuaacuguuaucccuacgaugucccugacuaugcaucguugaggucacucguggccagcaguggcacucuggaauuuaauaacgaguccuucaauuggacagguguuacccagaacgggacgucuagcgcuugcauccggcgcuccaauaacucauuuuucagucgacugaauuggcucacucacuuaaacuuuaaguacccagcacugaacgugaccaugcccaauaacgagcaguucgauaagcuguauauuuggggaguccaucacccuggcacagacaaagaucagaucuuuuuguacgcccaagcuagcggccguauuacugugucuaccaagagaucccagcagacaguaaucccaaauauagggucaaggccccggguucgcaacauuccuagcagagugaguaucuauuggaccauugucaaaccaggagacauccugcuaaucaauucuacggguaaccucauugccccgaggggcuacuucaagauacgguccgggaaaagcucgaucaugcgcucugaugcgcccauuggaaaguguaauuccgcaugcaucacuccuaacggcucaauaccaaaugacaagcccuuucagaacgugaaucgaauuacauacggugccuguccuagauaugugaaacaaaacacccugaaacuugcuacugggaugaggaaugucccagaaaaacagacacggggaaucuucggcgccaucgcaggcuuuauugagaacgggugggaaggaaugguugacgguugguacggcuuccgucaccagaauagugaggggcgcggacaagcugccgaucuuaagagcacccaggcggccaucgaccagauuaacggcaaauugaacagacucauagguaagacgaaugagaaauuccaucagaucgaaaaggaguuuuccgaaguggaggggaggauucaagaucuggaaaaguauguagaggacaccaaaaucgauuuauggucuuacaacgcagagcugcucguggcucuugaaaaucagcacacaaucgaccugacugauagcgagaugaacaaguuguucgaaaagaccaagaaacagcuacgggagaaugccgaagacaugggcaacggaugcuuuaagauuuaucauaagugugauaaugcuugcauaggcucaauccgaaacgggacauacgaccacgaugucuaucgcgacgaggcccugaauaacagauuccagauuaaaggaguggagcucaagagugguuacaaagacuggauccuguggauuuccuuugcaaucagcugcuuccuucuguguguugccuugcucggcuuuauaaugugggcuugccaaaaggggaauaucagguguaacauuugcaucuga

SEQ ID NO: 137527 - RNA, 1701 nt, Artificial Sequence
  derived and/or modified CDS sequence (opt3) from hemagglutinin__InfluenzaA__AFN19495
augaagaccaucauugcccugagcuacauacucugccuuguguucgcucagaaaauccccggcaacgacaauuccacagcaacucuguguuuggggcaccaugccgucccuaacggaacgauuguuaagaccaucacaaaugaucaaauugaggugacuaacgcgaccgaauuaguacagucuucaagugcuggugagaucugcgacagcccacaccauauacuggauggcgaaaauuguacacuaaucgacgcccuccugggggauccgcagugcgacggauuucagaacaaaaagugggaucuuuucguggagagauccagggcauauucuaauuguuaccccuaugacgucccugauuacgccucgcugcggucauugguggcuagcaguggcacccucgaauuuaacaaugaguccuucaacuggacugguguuacacaaaaugggaccucuagcgcaugcauucgccgauccaacaauucauuuuucagucgucugaacuggcugacgcaccucaauuuuaaauauccagccuuaaacgugacuaugcccaacaaugagcaguucgacaagcuguacaucuggggaguccaucacccuggcaccgauaaggaccagauuuuucuuuaugcucaggccagcggcagaaucacagugucuacuaaaaggucccaacaggcgguaauaccaaacauugggucacggccccgcguuagaaauaucccuagcaggauuaguaucuacuggaccaucgugaagccaggagauauuuugcugauaaacucuacagguaaucuaaucgcaccgcggggcuacuucaaaauucgcuccgggaaaagcucgaucaugcgaucugacgcccccauaggaaaauguaacuccgaaugcauuaccccuaauggcucaaucccaaacgacaagcccuuucagaaugucaacagaaucacguauggugcuuguccuagguacgugaagcagaguacucucaaacuggccacagggaugcggaaugugccagagaagcaaacccguggaauuuucggcgcaaucgcuggcuuuauugaaaacgggugggagggaaugauggaugguugguauggcuuccgccaccagaauagcgaggggagaggacaggccgcggaccuuaaauccacucaagccgcaauagaucagaucaacggcaagcugaauagguugauugguaaaacaaacgaaaaguuccaucagaucgagaaagaauuuucugaggucgaagggcggauccaggaccucgagaaguacguugaggauaccaagauugaccuguggagcuauaacgcugaauuacugguggcccucgagaaucaacacacgauagaucuuaccgacucagaaaugaacaaacuguucgagaagacaaagaagcaguugcgagaaaaugcugaggauaugggcaacggaugcuuuaaaaucuaccauaagugugacaaugccugcauuggcaguauccgcaacgggacuuaugaucacgacguauacagagacgaggcacuaaauaacagguuccagauuaagggaguggaacugaaauccgguuacaaggauuggauccucuggaucagcuuugccaccucuugcuuccugcuuugugucgcucuguugggcuuuauaaugugggcgugccagaaagggaauauucgguguaacaucugcauuuga

SEQ ID NO: 137528 - RNA, 1701 nt, Artificial Sequence
  derived and/or modified CDS sequence (opt3) from hemagglutinin__InfluenzaA__AFN19497
augaagaccaucauugcccugagcuacauacucugccuuguguucgcucagaaacugcccgagaacgacaauuccacagcaacuuuguguuuaggccaccaugccgucccuaacgggacgaucguuaagaccauuacaaaugaucaaaucgaagugacuaacgcgaccgagcugguacagucuucaaguacaggagaaauuugcaauagcccacaccagauccuagacggugagaacuguacccucauagaugcucugcuuggcgacccgcagugcgauggguuucaaaauaaaaagugggaccuguucguggaaagauccaaagcccauucuaacuguuaucccuacgaugucccugacuaugcaucguugaggucacucguggccagcaguggaacucuggaguuuaauaacgaguccuucaauuggacaggcguuacccagaacgguacgucuagcgcuugcauccggcgcuccaauaacucauuuuucagucgacugaauuggcucacucacuuaaacuuuaaguacccagcacugaacgugaccaugcccaauaacgaacaguucgauaagcuguauauuuggggaguccaucacccugggacagacaaagaucagaucuuuuuguacgcccaagcuagcggccguauuacugugucuaccaagagaucccagcaggccguaaucccaaauauaggcucaaggccccggguucgcaacauuccuagcagagugaguaucuauuggacaauugucaaaccaggggacauccugcuaaucaauucuaccggaaaccucauugcgccgagggguuacuucaagauacgguccggcaaaagcucgaucaugcgcucugaugcacccauugggaaguguaauuccacgugcaucacuccuaacggaucaauaccaaaugacaagcccuuucagaacgugaaucgaauuacauacggcgccuguccuagauaugugaaacaaaacacccugaaacuugcuacugguaugaggaaugucccagagaagcagacacgggggaucuucggagccaucgcaggcuuuauugaaaacggcugggaggggaugguugacggaugguacgguuuccgucaccagaauagugagggccgcgggcaagcugccgaucuuaagagcacccaggcggccaucgaccagauuaacggaaaauugaacagacucauaggcaagacgaaugaaaaauuccaucagaucgagaaggaauuuuccgagguggaagguaggauucaagaucuggagaaguauguagaggacaccaaaaucgauuuauggucuuacaacgcagaacugcucguggcucuugagaaucagcacacaaucgaccugacugauagcgaaaugaacaaguuguucgagaaaaccaagaaacagcuacgggaaaaugccgaggacauggggaacggcugcuuuaagauuuaucauaagugugauaaugcuugcauaggaucaauccgaaacggcacauacgaccacgaugucuaucgcgacgaggcccugaauaacagauuccagauuaaagggguggaacucaagaguggauacaaagacuggauccuguggauuuccuuugcaaucagcugcuuccuucuguguguugccuugcucgguuuuauaaugugggcuugccaaaagggcaauaucagguguaacauuugcaucuga

SEQ ID NO: 137529 - RNA, 1701 nt, Artificial Sequence; identical to SEQ ID NO: 137479
  derived and/or modified CDS sequence (opt3) from hemagglutinin__InfluenzaA__AFN19499

SEQ ID NO: 137530 - RNA, 1701 nt, Artificial Sequence; identical to SEQ ID NO: 137478
  derived and/or modified CDS sequence (opt3) from hemagglutinin__InfluenzaA__AFN19501

SEQ ID NO: 137531 - RNA, 1701 nt, Artificial Sequence; identical to SEQ ID NO: 135030
  derived and/or modified CDS sequence (opt3) from hemagglutinin__InfluenzaA__AFN19503

SEQ ID NO: 137532 - RNA, 1701 nt, Artificial Sequence; identical to SEQ ID NO: 137479
  derived and/or modified CDS sequence (opt3) from hemagglutinin__InfluenzaA__AFN19507

SEQ ID NO: 137533 - RNA, 1701 nt, Artificial Sequence; identical to SEQ ID NO: 137478
  derived and/or modified CDS sequence (opt3) from hemagglutinin__InfluenzaA__AFN19509

SEQ ID NO: 137534 - RNA, 1701 nt, Artificial Sequence; identical to SEQ ID NO: 137479
  derived and/or modified CDS sequence (opt3) from hemagglutinin__InfluenzaA__AFN19513

SEQ ID NO: 137535 - RNA, 1701 nt, Artificial Sequence; identical to SEQ ID NO: 137478
  derived and/or modified CDS sequence (opt3) from hemagglutinin__InfluenzaA__AFN19515

SEQ ID NO: 137536 - RNA, 1701 nt, Artificial Sequence; identical to SEQ ID NO: 137479
  derived and/or modified CDS sequence (opt3) from hemagglutinin__InfluenzaA__AFN19517

SEQ ID NO: 137537 - RNA, 1701 nt, Artificial Sequence; identical to SEQ ID NO: 137479
  derived and/or modified CDS sequence (opt3) from hemagglutinin__InfluenzaA__AFN19519

SEQ ID NO: 137538 - RNA, 1701 nt, Artificial Sequence; identical to SEQ ID NO: 137122
  derived and/or modified CDS sequence (opt3) from hemagglutinin__InfluenzaA__AFN19521

SEQ ID NO: 137539 - RNA, 1701 nt, Artificial Sequence; identical to SEQ ID NO: 137478
  derived and/or modified CDS sequence (opt3) from hemagglutinin__InfluenzaA__AFN19523

SEQ ID NO: 137540 - RNA, 1701 nt, Artificial Sequence
  derived and/or modified CDS sequence (opt3) from hemagglutinin__InfluenzaA__AFN19527
augaagaccaucauugcccugagcuacacacucugccuuguguucgcucagaaacugcccggcaacgacaauuccacugcaacguuguguuuagggcaccaugccgucccuaacggaaccauaguuaagacaaucacuaaugaucaaauugaggugaccaacgcgacagaacugguacaaaauucuucaaucggugagauuugcgacaguccacaccagauccuagauggcgaaaacuguacccucauagacgcucugcuuggggauccgcagugcgacggauuucagaauaaaaagugggaucuguucguggagagaagcaaagccuauuccaacuguuaccccuaugacgucccugauuacgcaucuuugaggucgcucguggccucaagcggcacucuggaauuuaauaacgagaguuucaauuggacagguguuacccagaacgggacguccucugcuugcauccggcgcagcaauuccucauuuuucagucgacugaacuggcucacucauuuaaauuuuaaguauccagcacugaacgugaccaugcccaacaaugagcaguucgacaaacuuuacauuuggggaguccaccauccuggcacagauaaggaccagaucuuuuuguaugcccaaagcucuggccguauuacuguguccaccaagagaucacagcaggcuguaaucccaaacauagggagcaggccccggauucgcaauaucccuaguagaauuucuaucuacuggacaaucguuaaaccaggagauauucugcuaauaaacuccaccgguaaucucaucgccccgaggggcuacuucaagauucggagcgggaaaucgucuaucaugcgcuccgacgcgcccauaggaaaguguaacucagaaugcauuacgccuaauggcaguaucccaaacgacaagcccuuucagaaugugaaccgaaucacuuauggugcauguccuagauacgucaaacaaagcacacugaaacuugccaccgggaugaggaaugugccagagaagcagacucggggaauuuucggcgcuaucgccggcuuuauugaaaacgggugggagggaaugguggaugguugguauggcuuccgucaccaaaauuccgaggggcgcggacaggcagcugaccugaagucuacacaggccgcgauagaucagaucaacggcaaauugaauagacucauugguaagaccaacgaaaaauuccaccagaucgagaaggaauuuagcgaggucgaagggaggauccaagaccuggagaaguacguugaggauacgaaaauugacuuauggucauauaacgccgaacugcucguggcacuugagaaucagcauaccauagaucugacagacagugaaaugaacaaguuguucgagaaaacuaagaaacagcuacgggaaaaugcugaggauaugggcaacggaugcuuuaagaucuaccacaagugugacaaugccugcauuggcuccauccgaaacgggaccuaugaucaugacguauaccgcgacgaggcucugaauaacagauuccagauuaaaggaguggaacucaagagcgguuacaaagauuggauccuguggauaucuuuugccaucucaugcuuccuucugugugucgcauugcucggcuuuauuaugugggccugccaaaaggggaauaucagguguaacauuugcaucuga

SEQ ID NO: 137541 - RNA, 1701 nt, Artificial Sequence
  derived and/or modified CDS sequence (opt3) from hemagglutinin__InfluenzaA__AFN19529
augaagaccaucauugcccugagcuacauacucugccuuguguucgcucagaaacugcccggcaacgacaauuccacagcaacuuuguguuuagggcaccaugccgucccuaacggaacgaucguuaagaccauuacaaaugaucaaaucgaggugacuaacgcgaccgaacugguacaaaauucuucaauuggugagaucugcgacaguccacaccagauacuagauggcgaaaacuguacacucaucgacgcucugcuuggggauccgcagugcgacggauuucagaauaaaaagugggaucuguucguggagagaagcaaagccuauuccaacuguuaccccuaugacgucccugauuacgcaucuuugaggucgcucguggccucaagcggcacccuggaauuuaauaacgagaguuucaauuggacugguguuacacagaacgggaccuccucugcuugcauucggcgcagcaauuccucauuuuucagucgacugaacuggcucacgcauuuaaauuuuaaguauccagcacugaacgugacuaugcccaacaaugagcaguucgacaaguuguacaucuggggaguccaccauccuggcaccgauaaagaccagauuuuucuuuaugcccaaagcucuggccguaucacaguguccacuaagagaucacagcaggcuguaauaccaaacauugggagcaggccccggauccgcaauauuccuaguagaaucucuaucuacuggaccauuguuaaaccaggagauauacugcuaaucaacuccacagguaaucucauugccccgaggggcuacuucaagauccggagcgggaaaucgucuauaaugcgcuccgacgcgcccauuggaaaguguaacucagaaugcaucaccccuaauggcaguaucccaaacgacaagcccuuucagaaugugaaccgaauuacguauggugcauguccuagauacgucaaacaaagcacucugaaacuugccacagggaugaggaaugugccagagaagcagacccggggaaucuucggcgcuauugccggcuuuauagaaaacgggugggagggaaugguggaugguugguauggcuuccgucaccaaaauuccgaggggcgcggacaggcagcugaccugaagucuacucaggccgcgaucgaucagauuaacggcaaauugaauagacucaucgguaagacaaacgaaaaauuccaccagaucgagaaggaauuuagcgaggucgaagggaggauucaagaccuggagaaguacguugaggauaccaaaauagacuuauggucauauaacgccgaacugcucguggcacuugagaaucagcauacgaucgaucugaccgacagugaaaugaacaaguuguucgagaaaacaaagaaacagcuacgggaaaaugcugaggauaugggcaacggaugcuuuaagauuuaccacaagugugacaaugccugcaucggcuccauucgaaacgggacuuaugaucaugacguauaccgcgacgaggcucugaauaacagauuccagaucaaaggaguggaacucaagagcgguuacaaagauuggauacuguggaucucuuuugccauuucaugcuuccuucugugugucgcauugcucggcuuuaucaugugggccugccaaaaggggaauauuagguguaacaucugcauauga

SEQ ID NO: 137542 - RNA, 1701 nt, Artificial Sequence; identical to SEQ ID NO: 137122
  derived and/or modified CDS sequence (opt3) from hemagglutinin__InfluenzaA__AFN19531

SEQ ID NO: 137543 - RNA, 1701 nt, Artificial Sequence; identical to SEQ ID NO: 137541
  derived and/or modified CDS sequence (opt3) from hemagglutinin__InfluenzaA__AFN19533

SEQ ID NO: 137544 - RNA, 1701 nt, Artificial Sequence
  derived and/or modified CDS sequence (opt3) from hemagglutinin__InfluenzaA__AFN19535
augaagaccaucauugcccugagcuacauacucugccuuguguucgcucagaaaauccccggcaacgacaauuccacagcaacucuguguuuggggcaccaugccgucccuaacggaacgauuguuaagaccaucacaaaugaucaaauugaggugacuaacgcgaccgaauuaguacagucuucaaguacaggugagaucugcgacagcccacaccagauacuggauggcgaaaauuguacccuaaucgacgcucuccugggggauccgcagugcgacggauuucaaaacaaaaagugggaucuuuucguggagagauccaaagccuauucuaauuguuaccccuaugacgucccugauuacgcaucgcugaggucauugguggccagcaguggcacucucgaauuuaacaaugaguccuucaacuggacagguguuacccagaaugggacgucuagcgcuugcauucggcgcuccaacucaaguuucuuuagccgacugaauuggcugacucaucucaacuuuaaguauccagcauuaaaugugaccaugcccaacaacgagcaguucgacaagcuguacaucuggggaguccaccauccuggcacagauaaagaccagauuuuucuuuaugcccaaucuuccggccguaucacugugucaaccaagagaagccagcaggcuguaauaccaaauauugggaguaggccccggauccgcaacauuccuucuagaaucuccaucuacuggacaauuguuaaaccaggagauauauugcugaucaauagcaccgguaaccuaauugccccgaggggcuacuucaagauccggucggggaaaucuuccauaaugcgcucagacgcgcccauuggaaaguguaauagugaaugcaucacgccuaacggcagcaucccaaaugacaagcccuuucagaacgugaaucgaauuacuuauggugcauguccuagauacgucaaacaauccacacucaagcuggccaccgggaugaggaacgugccagagaaacagacucggggaaucuucggcgcuauugccggcuuuauagaaaaugggugggagggaaugguggaugguugguauggcuuccgucaccagaacucugaggggcgcggacaagcagcugaccuuaagagcacacaggccgcgaucgaucagauuaauggcaaacugaacagauugaucgguaagaccaaugaaaaauuccaccagaucgagaaggaauuuucagaggucgaagggaggauucaagaccucgagaaguacguugaggauacgaaaauagaccuguggaguuauaacgccgaauuacugguggcacucgagaaccagcauaccaucgaucuuacagacuccgaaaugaauaagcuguucgagaaaacuaagaaacaguugcgggaaaacgcugaggauaugggcaauggaugcuuuaagauuuaccacaagugugacaacgccugcaucggcagcauucgaaaugggaccuauaaccaugauguauaccgcgacgaggcucuaaauaacagauuccagaucaaaggaguggaacugaagucugguuacaaagacuggauacucuggaucucauuugccauuaguugcuuccugcuuugugucgcacuguugggcuuuaucaugugggccugccaaaaggggaauauuagguguaacaucugcauauga

SEQ ID NO: 137545 - RNA, 1701 nt, Artificial Sequence; identical to SEQ ID NO: 137122
  derived and/or modified CDS sequence (opt3) from hemagglutinin__InfluenzaA__AFN19537

SEQ ID NO: 137546 - RNA, 1701 nt, Artificial Sequence; identical to SEQ ID NO: 137122
  derived and/or modified CDS sequence (opt3) from hemagglutinin__InfluenzaA__AFN19539

SEQ ID NO: 137547 - RNA, 1701 nt, Artificial Sequence; identical to SEQ ID NO: 137122
  derived and/or modified CDS sequence (opt3) from hemagglutinin__InfluenzaA__AFN19543

SEQ ID NO: 137548 - RNA, 1701 nt, Artificial Sequence
  derived and/or modified CDS sequence (opt3) from hemagglutinin__InfluenzaA__AFN19545
augaagaccaucauugcccugagcuacauacucugccuuguguucgcucagaaacugcccggcuccgacaacucuacagcaacuuuguguuuagggcaccaugccgucccuaauggaacgaucguuaagaccauuacaaacgauagaaucgaggugacuaaugcgaccgaacugguacaaaacucaaguauuggugagaucugcgacagcccacaccagauacuagauggcgaaaauuguacacucaucgacgcucugcuuggggauccgcagugcgacggauuuaaaaacaagaaaugggaucuguucguggagagguccaaggccuauucuaauuguuaccccuaugacgucccugauuacgcaucguugcggucacucguggccagcaguggcacccuggaauuuaacaaugaguccuucaacuggacugguguuacacagaaugggaccucuagcgcuugcauucgccgauccaacaauucauuuuucagucgucugaacuggcucacgcauuuaaauuuuaaguauccagcacugaacgugacuaugcccaacaaugagcaauucgacaaacuuuacaucuggggaguccaccauccuggcaccgauaaggaccagauuuuucuuuaugcccagagcucuggcagaaucacaguguccacuaaaaggucacagcaagcuguaauaccaaacauugggagccggccccgcaucagaaauauuccuaguaggaucucuaucuacuggaccauuguuaagccaggagauauacugcuaaucaacuccacagguaaucucauugccccgcggggcuacuucaaaauccagagcgggaagucgucuauaaugcgcuccgacgcgcccauuggaaaguguaaaucagaaugcaucaccccuaacggcaguaucccaaaugacaagcccuuucagaacgugaaucgaauuacguauggugcauguccuagauacgucaaacagagcacucugaaguuggccacagggaugaggaacgugccagagaaacaaacccggggaaucuucggcgcuauugccggcuuuauagaaaaugggugggagggaaugguggaugguugguauggcuuccgucaccagaacuccgaggggcgcggacaggcagcugaccugaagucuacucaagccgcgaucgaucagauuaauggcaaauugaacagacucaucgguaagacaaaugaaaaguuccaccagaucgagaaagaauuuagcgaggucgaagggaggauucaggaccuggagaaguacguugaggauaccaaaauagacuuauggucauauaacgccgaacugcucguggcacuugagaaccaacauacgaucgaucugaccgacagugaaaugaauaaguuguucgagaaaacaaagaagcagcuacgggaaaacgcugaggauaugggcaauggaugcuuuaaaauuuaccacaagugugacaacgccugcaucggcuccauucgaaaugggacuuaugaucaugacguauaccgcgacgaggcucugaacaauagauuccagaucaaaggaguggaacucaagagcgguuacaaagauuggauacuguggaucucuuuugccauuucaugcuuccuucugugugucgcauugcucggcuuuaucaugugggccugccagaaggggaacauuagguguaauaucugcauauga

SEQ ID NO: 137549 - RNA, 1701 nt, Artificial Sequence; identical to SEQ ID NO: 137122
  derived and/or modified CDS sequence (opt3) from hemagglutinin__InfluenzaA__AFN19547

SEQ ID NO: 137550 - RNA, 1701 nt, Artificial Sequence
  derived and/or modified CDS sequence (opt3) from hemagglutinin__InfluenzaA__AFN19549
augaagaccaucauugcccugagcuacauacucugccuuguguucgcucagaaacugcccggcaacgacaauuccacagcaacuuuguguuuagggcaccaugccgucccuaacggaacgaucguuaagaccauuacaaaugaucaaaucgaggugacuaacgcgaccgaacugguacagucuucaaguaaaggugagauuugcaauagcccacaccagauccuagacggcgggaacuguacacucauagaugcucugcuuggagacccgcagugcgauggcuuucaaaauaagaaaugggaccuguucguggaaagauccaaggcccauucuaacuguuaucccuacgaugucccugacuaugcaucguugaggucacucguggccagcagugguacccuggaguuuaauaacgaauccuucaauuggacugggguuacacagaacggaaccucuagcgcuugcaugcggcgcuccaauaacucauuuuucagucgacugaauuggcucacgcacuuaaacuuuaaguacccagcacugaacgugacuaugcccaauaacgagcaguucgauaaacuuuauaucuggggcguccaucacccuggcaccgacaaggaucagaucuuuuuguacgcccaagcuagcgggcguauuacagugucuacuaaaagaucccagcaggccguaauuccaaauaucggaucaaggccccggguucgcaacauaccuagcagagugaguauuuauuggaccaucgucaagccaggugacauucugcuaaucaauucuacaggcaaccucaucgcgccgaggggguacuucaaaauucgguccggaaagagcucgauaaugcgcucugaugcacccaucggcaaguguaauuccgccugcauuaccccuaacgguucaaucccaaaugacaaacccuuucagaacgugaaucgaauaacguacggggcuuguccuagauaugugaagcaaaacacucugaaacuugccacaggaaugaggaaugucccagagaagcagacccggggcauuuucggcgcaaucgcuggguuuaucgaaaacggaugggaggguaugguugacggcugguacggguuccgucaccagaauagugaaggacgcggccaagccgcggaucugaaaagcacucaggccgcaauugaccagaucaacgguaaguugaacagacucauugggaaaacaaaugagaaguuccaucagauagagaaggaauuuuccgagguggaaggcaggauccaagauauugagaaauauguagaagacaccaagaucgaucuguggucuuacaacgcugaguuacugguggcccucgagaaucagcacacgaucgaccuuaccgauagcgaaaugaacaaacuguucgagaagacuaaaaagcaguugcgggaaaaugcugaggacaugggaaacggcugcuuuaagauuuaucauaaaugugauaaugccugcauagggucaauccgaaacggaacauacgaccacgaugucuaucgcgacgaagcacuaaauaacagauuccagauuaaggguguggagcugaaaaguggcuacaaggacuggauccucuggauuuccuuugccaucagcugcuuccugcuuuguguugcucuguugggguuuauaaugugggcgugccaaaaaggaaauaucagguguaacauuugcaucuga

SEQ ID NO: 137551 - RNA, 1701 nt, Artificial Sequence
  derived and/or modified CDS sequence (opt3) from hemagglutinin__InfluenzaA__AFN19551
augaagaccaucauugcccugagcuacauacucugccuuguguucgcucagaaaauccccggcaacgacaauuccacagcaacucuguguuuggggcaccaugccgucccuaacggaacgauuguuaagaccaucacaaaugaucaaauugaggugacuaacgcgaccgaauuaguacagucuucaaguacaggugagaucugcgacagcccacaccagauacuggauggcgaaaauuguacccuaaucgacgcucuccugggggauccgcauugcgacggauuucagaacaaaaagugggaucuuuucguggagagauccaaagccuauucuaauuguuaccccuaugacgucccugauuacgcaucgcugaggucauugguggccagcaguggcacucucgaauuuaacaaugaguccuucaacuggacagguguuacccaaaaugggacgucuagcgcuugcauucggcgcuccaacucaaguuucuuuagccgacugaauuggcugacucaccucaacuuuaaguauccagcauuaaaugugaccaugcccaacaacgagcaguucgacaagcuguacaucuggggaguccaucacccuggcacagauaaagaccagauuuuucuuuaugcccagucuuccggccguaucacugugucaaccaagagaagccaacaggcuguaauaccaaauauugggaguaggccccggauccgcaacauuccuucuagaaucuccaucuacuggacaauuguuaaaccaggagauauauugcugaucaauagcaccgguaaccuaauugccccgaggggcuacuucaagauccggucggggaaaucuuccauaaugcgcucagacgcgcccauuggaaaguguaauagugaaugcaucacgccuaacggcagcaucccaaaugacaagcccuuucagaacgugaaucgaauuacuuauggugcauguccuagauacgucaaacaguccacacucaagcuggccaccgggaugaggaacgugccagagaaacaaacucggggaaucuucggcgcuauugccggcuuuauagaaaaugggugggagggaaugguggaugguugguauggcuuccgucaccagaacucugaggggcgcggacaggcagcugaccuuaagagcacacaagccgcgaucgaucagauuaauggcaaacugaacagauugaucgguaagaccaaugaaaaauuccaucagaucgagaaggaauuuucagaggucgaagggaggauucaggaccucgagaaguacguugaggauacgaaaauagaccuguggaguuauaacgccgaauuacugguggcacucgagaaccaacacaccaucgaucuuacagacuccgaaaugaauaagcuguucgagaaaacuaagaaacaguugcgggaaaacgcugaggauaugggcaauggaugcuuuaagauuuaccauaagugugacaacgccugcaucggcagcauucgaaaugggaccuauaaccacgauguauaccgcgacgaggcucuaaauaacagauuccagaucaaaggaguggaacugaagucugguuacaaagacuggauacucuggaucucauuugccauuaguugcuuccugcuuugugucgcacuguugggcuuuaucaugugggccugccagaaggggaauauuagguguaacaucugcauauga

SEQ ID NO: 137552 - RNA, 1701 nt, Artificial Sequence; identical to SEQ ID NO: 137501
  derived and/or modified CDS sequence (opt3) from hemagglutinin__InfluenzaA__AFN19553

SEQ ID NO: 137553 - RNA, 1701 nt, Artificial Sequence; identical to SEQ ID NO: 137501
  derived and/or modified CDS sequence (opt3) from hemagglutinin__InfluenzaA__AFN19555

SEQ ID NO: 137554 - RNA, 1701 nt, Artificial Sequence; identical to SEQ ID NO: 137122
  derived and/or modified CDS sequence (opt3) from hemagglutinin__InfluenzaA__AFN19557

SEQ ID NO: 137555 - RNA, 1701 nt, Artificial Sequence; identical to SEQ ID NO: 137501
  derived and/or modified CDS sequence (opt3) from hemagglutinin__InfluenzaA__AFN19559

SEQ ID NO: 137556 - RNA, 1701 nt, Artificial Sequence; identical to SEQ ID NO: 137509
  derived and/or modified CDS sequence (opt3) from hemagglutinin__InfluenzaA__AFN19561

SEQ ID NO: 137557 - RNA, 1701 nt, Artificial Sequence
  derived and/or modified CDS sequence (opt3) from hemagglutinin__InfluenzaA__AFN19563
augaagaccaucauugcccugagcuacauacucugccuuguguucgcucagaaacugcccggcaacgacaauuccacagcaacuuuguguuuagggcaccaugccgucccuaacggaacgaucguuaagaccauuacaaaugauagaaucgaggugacuaacgcgaccgaacugguacaaaauucuucaauuggugagaucugcgacaguccacaccagauacuagauggcgaaaacuguacacucaucgacgcucugcuuggggauccgcagugcgacggauuucagaauaaaaagugggaucuguucguggagaggagcaaagccuauuccaacuguuaccccuaugacgucccugauuacgcaucuuugcggucgcucguggccucaagcggcacccuggaauuuaauaacgagaguuucaauuggacugguguuacacaaaacgggaccuccucugcuugcauucgccgaagcaauaacuccuuuuucucacgucugaauuggcucacgcauuuaaacuuuaaguauccagcacugaacgugacuaugcccaauaacgagcaguucgacaaacuuuacaucuggggaguccaccauccuggcaccgauaaagaccagaucuuuuuguaugcccagaguagcggcagaauuacagugucuacuaagaggucccaacaggcuguaauaccaaauauugggucacggccccgcaucagaaacauuccuagcaggaucaguaucuacuggaccauuguuaaaccaggagauauacugcuaaucaauucuacagguaaccucauugccccgcggggcuacuucaagauccgcuccgggaaaagcucgauaaugcgaucugacgcgcccauuggaaaguguaaguccgaaugcaucaccccuaauggcucaaucccaaacgacaaacccuuucagaaugugaacagaauuacguauggugcauguccuagguacgucaagcagaguacucugaaacuugccacagggaugcggaaugugccagagaagcaaacccguggaaucuucggcgcuauugccggcuuuauagaaaacgggugggagggaaugguggaugguugguauggcuuccgccaccagaauagcgaggggagaggacaggcagcugaccugaaauccacucaagccgcgaucgaucagauuaacggcaaguugaauaggcucaucgguaaaacaaacgaaaaguuccaccagaucgagaaggaauuuucugaggucgaagggcggauucaggaccuggagaaauacguugaggauaccaagauagacuuauggagcuauaacgccgaacugcucguggcacuugagaaucaacauacgaucgaucugaccgacucagaaaugaacaaauuguucgagaagacaaagaagcagcuacgagaaaaugcugaggauaugggcaacggaugcuuuaagauuuaccacaaaugugacaaugccugcaucggcaguauucgcaacgggacuuaugaucaugacguauacagagacgaggcucugaauaacagguuccagaucaagggaguggaacucaaauccgguuacaaggauuggauacuguggaucagcuuugccaccucuugcuuccuucugugugucgcauugcucggcuuuauuaugugggccugccagaaagggaauauccgguguaacauuugcaucuga

SEQ ID NO: 137558 - RNA, 1701 nt, Artificial Sequence; identical to SEQ ID NO: 137479
  derived and/or modified CDS sequence (opt3) from hemagglutinin__InfluenzaA__AFN19565

SEQ ID NO: 137559 - RNA, 1701 nt, Artificial Sequence
  derived and/or modified CDS sequence (opt3) from hemagglutinin__InfluenzaA__AFN19567
augaagaccaucauugcccugagcuacauacucugccuuguguucgcucagaaaauccccggcaacgacaauuccacagcaacucuguguuuggggcaccaugccgucccuaacggaacgauuguuaagaccaucacaaaugauagaauugaggugacuaacgcgaccgaauuaguacaaaauucuucaaucggugagauaugcgacaguccacaccagauccuggauggcgaaaacuguacacuaauugacgcucuccugggggauccgcagugcgacggauuucagaauaaaaagugggaucuuuucguggagaggagcaaagccuauuccaacuguuaccccuaugacgucccugauuacgcaucucugcggucguugguggccucaagcggcacccucgaauuuaauaacgagaguuucaauuggacugguguuacacaaaacgggaccuccucugcuugcauccgccgaagcaauaacuccuuuuucucacgucugaauuggcugacgcaucucaacuuuaaguauccagcauuaaacgugacuaugcccaauaacgagcaguucgacaagcuguacauuuggggaguccaccauccuggcaccgauaaagaccagaucuuucuuuaugcccagaguagcggcagaauaacagugucuacuaagaggucccaacaggcuguaauuccaaauaucgggucacggccccgcauuagaaacaucccuagcaggaucaguauuuacuggaccauaguuaaaccaggagauaucuugcugauuaauucuacagguaaccuaaucgccccgcggggcuacuucaagauacgcuccgggaaaagcucgauuaugcgaucugacgcgcccaucggaaaguguaaguccgaaugcaucaccccuaauggcucaauuccaaacgacaaacccuuucagaaugugaacagaaucacguauggugcauguccuagguacgucaagcagaguacucucaaacuggccacagggaugcggaaugugccagagaagcaaacccguggaauuuucggcgcuauagccggcuuuaucgaaaacgggugggagggaaugguggaugguugguauggcuuccgccaccagaauagcgaggggagaggacaggcagcugaccuuaaauccacucaagccgcgauugaucagaucaacggcaagcugaauagguugaucgguaaaacaaacgaaaaguuccaccagauugagaaggaauuuucugaggucgaagggcggauacaggaccucgagaaauacguugaggauaccaagaucgaccuguggagcuauaacgccgaauuacugguggcacucgagaaucaacauacgauugaucuuaccgacucagaaaugaacaaacuguucgagaagacuaaaaagcaguugcgagaaaaugcugaggauaugggcaacggaugcuuuaagaucuaccacaaaugugacaaugccugcauuggcaguauccgcaacgggacauaugaucaugacguauacagagacgaggcucuaaauaacagguuccagauaaagggaguggaacugaaauccgguuacaaggauuggauccucuggauuagcuuugccaucucuugcuuccugcuuugugucgcacuguugggcuuuauuaugugggccugccagaaagggaauauccgguguaacauaugcauuuga

SEQ ID NO: 137560 - RNA, 1701 nt, Artificial Sequence; identical to SEQ ID NO: 137122
  derived and/or modified CDS sequence (opt3) from hemagglutinin__InfluenzaA__AFN19569

SEQ ID NO: 137561 - RNA, 1701 nt, Artificial Sequence
  derived and/or modified CDS sequence (opt3) from hemagglutinin__InfluenzaA__AFN19571
augaagaccaucauugcccugagcuacauacucugccuuguguucgcucagaaacugcccggcaacgacaauuccacagcaacuuuguguuuagggcaccaugccgucccuaacggaacgaucguuaagaccauuacaaaugaucaaaucgaggugacuaacgcgaccgaacugguacagucuucaaguacaggugagauuugcgacagcccacaccagauccuagauggcgaaaauuguacccucauagacgcucugcuuggggauccgcagugcgacggauuucaaaacaaaaagugggaucuguucguggagagauccaaagccuauucuaauuguuaccccuaugacgucccugauuacgcaucguugaggucacucguggccagcaguggcacucuggaauuuaacaaugaguccuucaacuggacagguguuacccagaaugggacgucuagcgcuugcauccggcgcuccaacucaaguuucuucagccgacugaauuggcucacucauuuaaacuuuaaguauccagcacugaaugugaccaugcccaacaacgagcaguucgacaaacuuuacauuuggggaguccaccauccuggcacagauaaggaccagaucuuuuuguauucucaauccucaggccguauuacugugagcaccaagagaagucagcaggccguaaucccaaauauagggucuaggccccggauucgcaacaucccuuccagaauuagcaucuacuggacaaucguuaaaccaggagauauucugcuaauaaauucgaccgguaaccucaucgcuccgaggggcuacuuccggauucgcucugggaaguccucaaucaugcgaagugacgcccccauaggaaaauguaauagcgaaugcauuacgccuaacggcuccaucccaaaugacaagcccuuucagaacgugaauagaaucacuuaugguccuuguccaagguacgucaagcaaucuacacugaaacuugcgaccgggaugcggaacgugcccgagaagcagacucguggaauuuucggcgcaaucgccggcuuuauugaaaaugggugggagggaaugguggaugguugguauggcuaccgccaccagaacagcgaggggagaggacaagcugccgaccugaaaucaacacaggcagcuauagaucagaucaauggcaaguugaacaggcucauugguaaaaccaaugaaaaguuccaccagaucgagaaagaauuuagugaggucgaagggcggauccaagaccuggagaaguauguugaggauacgaagauugacuuauggaccuacaacgccgaacugcucguggcgcuugagaaccagcauacaauagaucugacugacuccgaaaugaauaaauuguuugagaagaccaaaaagcagcuacgagaaaacgccgaggauaugggcaauggaugcuucaaaaucuaucacaagugugacaacgcaugcauuggcagcauccgcaaugggacauacaaccaugauguauacagagacgaggcucugaauaacagguuucagauuaagggaguggaacucaaaucugguuauaaggacuggauccuguggauaucauucgccaucaguugcuuucuucugugugucgcuuugcucggcuucauuaugugggccugccaaaaagggaauauccgguguaacauuugcaucuga

SEQ ID NO: 137562 - RNA, 1701 nt, Artificial Sequence
  derived and/or modified CDS sequence (opt3) from hemagglutinin__InfluenzaA__AFN19573
augaagaccaucauugcccugagcuacauacucugccuuguguucgcucagaaacugcccggcaacgacaauuccacagcaacuuuguguuuagggcaccaugccgucccuaacggaacgaucguuaagaccauuacaaaugaucaaaucgaggugacuaacgcgaccgaacugguacagucuucaaguacagguaaaauuugcgacagcccacaccagauccuagauggcaagaauuguacccucauagacgcucugcuuggggauccgcagugcgacggauuucaaaacaaaaagugggaucuguucguggagagauccaaggccuauucuaauuguuaccccuaugacgucccugauuacgcaucguugaggucacucguggccagcaguggcacucuggaauuuaacaaugaguccuucaacuggacagguguuacccagaaugggacgucuagcgcuugcauccggcgcuccaaaaacucauuuuucagucgacugaauuggcucacucauuuaaacuuuaaguauagcgcacugaaugugaccaugccaaacaaagaacaguucgacaaacuuuacauuuggggaguccaccaucccggcacagauaaggaccagaucucuuuguaugcccaggcuuccggccguauuacugugucaaccaagagaagccaacagacaguaaucccuaacauagggaguaggccacggguucgcaauauucccucuagaaucuccauuuacuggaccaucgugaagccuggagauauccugcuaauuaacagcacggguaaucucauagccccaaggggcuacuuuaaaaugcagucggggaagucuuccaucaugcggucagacgcgccgauuggaaaauguaacagugagugcaucacucccaauggcagcauaccuaacgacaagccauuccaaaaugucaaccgcauuacauauggugcauguccccgauacgugaaacagaauacccugaaacuugccacugggaugagaaacgugccugagaagcagacaaggggaaucuuuggcgcuaucgccggcuucauugaaaaugggugggagggaauggucgaugguugguauggcuuucggcaccaaaacuccgaagggcguggacaggcagcugaccugaagucuacccaggccgcgaucgaucagauuaauggcaaguugaaccgccucauagguaaaacgaaugagaaguuccaccaaaucgagaaagaguucagcgaaguugaagggaggauucaggaccuggagaaguacguggaagauaccaaaaucgacuuauggucauauaacgccgagcugcucguagcacuugagaaccagcauacaaucgaucugacugacagugaaaugaauaaguuguuugagaagaccaaaaagcagcuaagagaaaacgcugaggauaugggcaauggaugcuucaaaauuuaccacaagugugacaacgccugcauaggcuccauccggaaugggacauaugaucaugacguguaccgagacgaagcucugaacaaucgcuuucaaauuaaaggagucgagcucaagagcgguuacaaggauuggauccuguggauuucuuucgccaucucaugcuuucuucuguguguggcauugcucggcuucauaaugugggccugccagaaagggaacaucagauguaauauuugcaucuga

SEQ ID NO: 137563 - RNA, 1701 nt, Artificial Sequence
  derived and/or modified CDS sequence (opt3) from hemagglutinin__InfluenzaA__AFN19575
augaagaccaucauugcccugagcuacauacucugccuuguguucgcucagaaacugcccggcaacgacaauuccacagcaacuuuguguuuagggcaccaugccgucccuaacggaacgaucguuaagaccauuacaaaugaucaaaucgaggugacuaacgcgaccgaacugguacagucuucaaguacaggugagauuugcgacaauccacaccagauccuagauggcgaaaacuguacccucauagacgcucugcuuggggauccgcagugcgacggauuucaaaauaaaaagugggaucuguucguggagagaagcaaagccuauuccaacuguuaccccuaugacgucccugauuacgcaucuuugaggucgcucguggccucaagcggcacucuggaauuuaauaacgagaguuucaauuggacagguguuacccagaacgggacguccucugcuugcauccggcgcagcaauaacuccuuuuucucacgacugaauuggcucacucauuuaaacuuuaaguauccagcacugaacgugaccaugcccaauaacgagcaguucgacaaacuuuacauuuggggaguccaccauccuggcacagauaaggaccagaucuuuuuguaugcccaaaguagcggccguauuacugugucuaccaagagaucccagcaggcuguaaucccaaauauagggucaaggccccggguucgcaacauuccuagcagaaucaguauuuacuggacaaucgugaaaccaggagauauccugcuaauuaauucuaccgguaaccucauagccccgaggggcuacuucaagauccgguccgggaaaagcucgauuaugcgcucugacgcgcccaucggaaaguguaauuccgaaugcauaacgccuaacggcucaauuccaaaugacaagcccuuucagaacgucaaucgaaucacuuauggugcauguccuagauacgugaaacaaaguacacugaaacuugccaccgggaugaggaacgugccagagaagcagacucggggaaucuucggcgcuauugccggcuuuaucgaaaaugggugggagggaauggucgaugguugguauggcuuccgucaccagaacagcgaggggcgcggacaagcagcugaccugaaguccacacaggccgcgauugaucagauaaauggcaaauugaacagacucaucgguaagaccaacgaaaaauuccaccagauugagaaggaauuuucugagguugaagggaggauccaagaccuggagaaguacguggaggauacgaaaaucgacuuauggagcuauaaugccgaacugcucguagcacuugagaaccagcauaccauugaucugacagacucagaaaugaauaaguuguucgagaaaacuaagaaacagcuacgggaaaacgcugaggauaugggcaauggaugcuuuaagauauaccacaagugugacaacgccugcaucggcaguauucgaaaugggaccuaugaucaugacguguaccgcgacgaggcucugaacaauagauuccagaucaaaggagucgaacucaaguccgguuacaaagauuggauucuguggaucagcuuugccauaucuugcuuccuucuguguguggcauugcucggcuuuaucaugugggccugccaaaaggggaacauuagguguaauaucugcauuuga

SEQ ID NO: 137564 - RNA, 1701 nt, Artificial Sequence; identical to SEQ ID NO: 137478
  derived and/or modified CDS sequence (opt3) from hemagglutinin__InfluenzaA__AFN19577

SEQ ID NO: 137565 - RNA, 1701 nt, Artificial Sequence; identical to SEQ ID NO: 137478
  derived and/or modified CDS sequence (opt3) from hemagglutinin__InfluenzaA__AFN19579

SEQ ID NO: 137566 - RNA, 1701 nt, Artificial Sequence; identical to SEQ ID NO: 137478
  derived and/or modified CDS sequence (opt3) from hemagglutinin__InfluenzaA__AFN19581

SEQ ID NO: 137567 - RNA, 1701 nt, Artificial Sequence; identical to SEQ ID NO: 137478
  derived and/or modified CDS sequence (opt3) from hemagglutinin__InfluenzaA__AFN19583

SEQ ID NO: 137568 - RNA, 1701 nt, Artificial Sequence
  derived and/or modified CDS sequence (opt3) from hemagglutinin__InfluenzaA__AFN19587
augaagaccaucauugcccugagcuacauacucugccuuguguucgcucagaaacugcccgagaacgacaauuccacagcaacuuuguguuuaggccaccaugccgucccuaacgggacgaucguuaagaccauuacaaaugaucaaaucgaagugacuaacgcgaccgagcugguacagucuucaaguacaggagaaauuugcgacagcccacaccagauccuagauggugugaauuguacccucauagacgcucugcuuggcgauccgcagugcgacggguuucaaaacaaaaagugggaucuguucgucgagagauccaaagccuauucuaauuguuaccccuaugacgugccugauuacgcaucguugaggucacucguugccagcaguggaacucuggaauuuaacaaugaguccuucaacuggacaggcgugacccagaaugguacgucuagcgcuugcauccggcgcuccaacucaaguuucuuuagccgacugaauuggcucacucauuuaaacuuuaaguauccagcacugaaugucaccaugcccaacaacgagcaguucgacaagcuguacauuuggggagugcaccauccugggacagauaaagaccagaucuuuuuguaugcccaaucuuccggccguauuacuguaucaaccaagagaagccagcaggcuguuaucccaaauauaggcaguaggccccggauucgcaacaucccuucuagaauuuccaucuacuggacaaucgugaaaccaggggauauucugcuaauaaauagcaccggaaaccucaucgccccgagggguuacuucaagauucggucgggcaaaucuuccaucaugcgcucagacgcgcccauagggaaguguaauagugaaugcauuacgccuaacggaagcaucccaaaugacaagcccuuucagaacgucaaucgaaucacuuauggcgcauguccuagauacgugaaacaauccacacugaaacuugccaccgguaugaggaacgugccagagaagcagacucgggggauuuucggagcuaucgccggcuuuauugaaaauggcugggaggggauggucgauggaugguaugguuuccgucaccagaacucugagggccgcgggcaagcagcugaccuuaagagcacacaggccgcgauagaucagaucaauggaaaauugaacagacucauuggcaagaccaaugaaaaauuccaccagaucgagaaggaauuuucagagguugaagguaggauccaagaccuggagaaguacguggaggauacgaaaauugacuuauggaguuauaacgccgaacugcucguagcacuugagaaccagcauaccauagaucugacagacuccgaaaugaauaaguuguucgagaaaacuaagaaacagcuacgggaaaacgcugaggauauggggaauggcugcuuuaagaucuaccacgagugugacaacgccugcauuggaagcauccgaaauggcaccuauaaccaugauguguaccgcgacgaagcucugaauaacagauuccagauuaagggggucgagcucaaaucuggauacaaggacuggauccuguggauaucauuugccaucaguugcuuccuucuguguguggcauugcucgguuuuauuaugugggccugccaaaaaggcaauaucagguguaacauuugcaucuga

SEQ ID NO: 137569 - RNA, 1701 nt, Artificial Sequence; identical to SEQ ID NO: 137478
  derived and/or modified CDS sequence (opt3) from hemagglutinin__InfluenzaA__AFN19589

SEQ ID NO: 137570 - RNA, 1701 nt, Artificial Sequence
  derived and/or modified CDS sequence (opt3) from hemagglutinin__InfluenzaA__AFN19591
augaagaccaucauugcccugagcuacauacucugccuuguguucgcucagaaacugcccggcaacgacaauuccacagcaacuuuguguuuagggcaccaugccgucccuaacggaacgaucguuaagaccauuacaaaugaucaaaucgaggugacuaacgcgaccgaacugguacaaaauucuucaauuggugagaucugcgacaguccacaccagauacuagauggcgaaaacuguacacucaucgacgcucugcuuggggauccgcagugcgacggauuucagaauaaaaagugggaucuguucguggagagaagcaaagccuauuccaacuguuaccccuaugacgucccugauuacgcaucuuugaggucgcucguggccucaagcggcacccuggaauuuaauaacgagaguuucaauuggacugguguuacacagaacgggaccuccucugcuugcaugcggcgcagcaauuccucauuuuucagucgacugaacuggcucacgcauuuaaauuuuaaguauccagcacugaacgugacuaugcccaacaaugagcaguucgacaaacuuuacauuuggggaguccaccauccuggcaccgauaaggaccagaucuuuuuguaugcccaaagcucuggccguauuacaguguccacuaagagaucacagcaggcuguaaucccaaacauagggagcaggccccggauucgcaauaucccuaguagaauuucuaucuacuggaccaucguuaaaccaggagauauucugcuaauaaacuccacagguaaucucaucgccccgaggggcuacuucaagauucggagcgggaaaucgucuaucaugcgcuccgacgcgcccauaggaaaguguaacucagaaugcauuaccccuaauggcaguaucccaaacgacaagcccuuucagaaugugaaccgaaucacguauggugcauguccuagauacgucaaacaaagcacucugaaacuugccacagggaugaggaaugugccagagaagcagacccggggaauuuucggcgcuaucgccggcuuuauugaaaacgggugggagggaaugguggaugguugguauggcuuccgucaccaaaauuccgaggggcgcggacaggcagcugaccugaagucuacucaggccgcgauagaucagaucaacggcaaauugaauagacucauugguaagacaaacgaaaaauuccaccagaucgagaaggaauuuagcgaggucgaagggaggauccaagaccuggagaaguacguugaggauaccaaaauugacuuauggucauauaacgccgaacugcucguggcacuugagaaucagcauacgauagaucugaccgacagugaaaugaacaaguuguucgagaaaacaaagaaacagcuacgggaaaaugcugaggauaugggcaacggaugcuuuaagaucuaccacaagugugacaaugccugcauuggcuccauccgaaacgggacuuaugaucaugacguauaccgcgacgaggcucugaauaacagauuccagauuaaaggaguggaacucaagagcgguuacaaagauuggauccuguggauaucuuuugccaucucaugcuuccuucugugugucgcauugcucggcuuuauuaugugggccugccaaaaugggaacaucagguguaauauuugcaucuga

SEQ ID NO: 137571 - RNA, 1701 nt, Artificial Sequence; identical to SEQ ID NO: 137478
  derived and/or modified CDS sequence (opt3) from hemagglutinin__InfluenzaA__AFN19593

SEQ ID NO: 137572 - RNA, 1701 nt, Artificial Sequence; identical to SEQ ID NO: 137479
  derived and/or modified CDS sequence (opt3) from hemagglutinin__InfluenzaA__AFN19595

SEQ ID NO: 137573 - RNA, 1701 nt, Artificial Sequence; identical to SEQ ID NO: 137479
  derived and/or modified CDS sequence (opt3) from hemagglutinin__InfluenzaA__AFN19599

SEQ ID NO: 137574 - RNA, 1701 nt, Artificial Sequence; identical to SEQ ID NO: 137541
  derived and/or modified CDS sequence (opt3) from hemagglutinin__InfluenzaA__AFN19601

SEQ ID NO: 137575 - RNA, 1701 nt, Artificial Sequence; identical to SEQ ID NO: 137122
  derived and/or modified CDS sequence (opt3) from hemagglutinin__InfluenzaA__AFN19607

SEQ ID NO: 137576 - RNA, 1701 nt, Artificial Sequence; identical to SEQ ID NO: 137478
  derived and/or modified CDS sequence (opt3) from hemagglutinin__InfluenzaA__AFN19609

SEQ ID NO: 137577 - RNA, 1701 nt, Artificial Sequence
  derived and/or modified CDS sequence (opt3) from hemagglutinin__InfluenzaA__AFN19611
augaagaccaucauugcccugagcuacauacucugccuuguguucgcucagaaacugcccggcaacgacaauuccacagcaacuuuguguuuagggcaccaugccgucccuaacggaacgaucguuaagaccauuacaaaugaucaaaucgaggugacuaacgcgaccgaacugguacaaaauucuucaauuggugagaucugcgacaguccacaccagauacuagauggcgaaaacuguacacucaucgacgcucugcuuggggauccgcagugcgacggauuucagaauaaaaagugggaucuguucguggagagaagcaaagccuauuccaacuguuaccccuaugacgucccugauuacgcaucuuugaggucgcucguggccucaagcggcacccuggaauuuaauaacgagaguuucaauuggacugguguuacacagaacgggaccuccucugcuugcauucggcgcagcaauaacuccuuuuucucacgacugaauuggcucacgcauuuaaacuuuaaguauccagcacugaacgugacuaugcccaauaacgagcaguucgacaaguuguacaucuggggaguccaccauccuggcaccgauaaagaccagauuuuucuuuaugcccaaaguagcggccguaucacagugucuacuaagagaucccagcaggcuguaauaccaaauauugggucaaggccccggauccgcaacauuccuagcagaaucaguaucuacuggaccauuguugaaccaggagauauacugcuaaucaauucuacagguaaccucauugccccgaggggcuacuucaaaauccgguccgggaaaagcucgauaaugcgcucugacgcgcccauuggaaaauguaauuccgagugcaucaccccuaacggcucaaucccaaaugacaagcccuuucagaacgugaaucgaauuacguauggugcauguccuagauacgucaagcaaaguacucugaaacuugccacagggaugaggaacgugccagaaaagcagacccggggaaucuucggcgcuauugccggcuuuauagagaaugggugggagggaaugguggaugguugguauggcuuccgucaccagaacagcgaagggcgcggacaagcagcugaccugaaauccacucaggccgcgaucgaucagauuaauggcaaguugaacagacucaucgguaaaacaaacgagaaguuccaccagaucgaaaaagaguuuucugaagucgaggggaggauucaagaccuggagaaguacguugaagauaccaagauagacuuauggagcuauaaugccgagcugcucguggcacuugaaaaccagcauacgaucgaucugaccgacucagagaugaauaaauuguucgaaaagacaaagaagcagcuacgggagaacgcugaggauaugggcaauggaugcuuuaaaauuuaccacaagugugacaacgccugcaucggcaguauucgaaaugggacuuaugaucaugacguauaccgcgacgaagcucugaacaauagauuccagaucaagggaguggagcucaaauccgguuacaaggauuggauacuguggaucagcuuugccauuucuugcuuccuucugugugucgcauugcucggcuuuaucaugugggccugccaaaaagggaacauuagguguaauaucugcauauga

SEQ ID NO: 137578 - RNA, 1701 nt, Artificial Sequence; identical to SEQ ID NO: 137501
  derived and/or modified CDS sequence (opt3) from hemagglutinin__InfluenzaA__AFN19613

SEQ ID NO: 137579 - RNA, 1701 nt, Artificial Sequence; identical to SEQ ID NO: 137479
  derived and/or modified CDS sequence (opt3) from hemagglutinin__InfluenzaA__AFN19617

SEQ ID NO: 137580 - RNA, 1701 nt, Artificial Sequence
  derived and/or modified CDS sequence (opt3) from hemagglutinin__InfluenzaA__AFN19619
augaagaccaucauugcccugagccacauacucugccuuguguucgcucagaaacugcccggcaacgacaauuccacagcaacuuuguguuuagggcaucacgccgucccuaacggaacgaucguuaagaccauuacaaaugaucaaaucgaggugacuaacgcgaccgaacugguacagucuucaaguacaggugagauuugcgacagcccacaucagauccuagauggcgaaaauuguacccucauagacgcucugcuuggggauccgcagugcgacggauuucaaaacaaaaagugggaucuguucguggagagauccaaagccuacucuaauuguuaucccuacgacgucccugauuaugcaucguugaggucacucguggccagcaguggcacucuggaauuuaacaaugaguccuucaacuggacagguguuacccagaaugggacgucuagcgcuugcauccggcgcuccaacucaaguuucuuuagccgacugaauuggcucacucacuuaaacuuuaaguacccagcacugaaugugaccaugcccaacaacgagcaguucgacaaacuuuauauuuggggaguccaucacccuggcacagauaaggaccagaucuuuuuguacgcccaaucuuccggccguauuacugugucaaccaagagaagccagcaggcuguaaucccaaauauagggaguaaacccaggauucggaacaucccuucucgcauuuccaucuauuggacaaucguuaagccaggagauauucugcuaauaaauagcaccgguaaccucaucgccccgagaggcuacuucaaaauuaggucggggaagucuuccaucaugcggucagacgcgcccauaggaaaguguaauagugaaugcauuacgccuaacggcagcaucccaaaugacaaacccuuucagaacgugaaucgcaucacuuacggugcauguccucgauaugucaagcaauccacacugaaacuugccaccgggaugagaaacgugccagagaagcagacuaggggaauuuucggcgcuaucgccggcuuuauugaaaaugggugggagggaaugguggaugguugguacggcuuccggcaccagaacucugaggggcguggacaagcagcugaccugaaaagcacacaggccgcgauagaucagaucaauggcaaguugaaccgccucauugguaaaaccaaugaaaaguuccaucagaucgagaaggaauuuucagaggucgaagggagaauccaagaccuggagaaauauguugaggauacgaagauugacuuauggaguuacaacgccgaacugcucguggcacuugagaaccagcacaccauagaucugacagacuccgaaaugaauaaauuguucgagaagacuaaaaagcagcuaagggaaaacgcugaggauaugggcaauggaugcuuuaagaucuaucauaaaugugacaacgccugcauuggcagcauccggaaugggaccuacaaccacgauguauaucgagacgaggcucugaauaaccgcuuccagauuaagggaguggaacucaaaucugguuacaaggacuggauccuguggauaucauuugccaucaguugcuuccuucugugugucguguugcucggcuuuauuaugugggcaugccaaaaagggaauaucagauguaacauuugcaucuga

SEQ ID NO: 137581 - RNA, 1701 nt, Artificial Sequence; identical to SEQ ID NO: 137541
  derived and/or modified CDS sequence (opt3) from hemagglutinin__InfluenzaA__AFN19623

SEQ ID NO: 137582 - RNA, 1701 nt, Artificial Sequence; identical to SEQ ID NO: 137478
  derived and/or modified CDS sequence (opt3) from hemagglutinin__InfluenzaA__AFN19629

SEQ ID NO: 137583 - RNA, 1701 nt, Artificial Sequence
  derived and/or modified CDS sequence (opt3) from hemagglutinin__InfluenzaA__AFN19631
augaagaccaucauugcccugagcuacauacucugccuuguguucgcucagaaacugcccgagaacgacuauuccacagcaacuuuguguuuaggccaccaugccgucccuaaugggacgaucguuaagaccauuacaaacgaucaaaucgaagugacuaaugcgaccgagcugguacagucuucaaguacaggagaaauuugcgacagcccacaccagauccuagaugguauaaacuguacccucaucgacgcucugcuuggcgauccgcagugcgacggguuucaaaauaaaaagugggaucuguucguggagagauccaaagccuacucuaacuguuaucccuacgacgucccugauuaugcaucguugaggucacucguggccagcaguggaacucuggaauuuaauaacgaguccuucaauuggacaggcguuacccagaacgguacgucuagcgcuugcauucggcgcuccacuucaaguuucuuuagccgacugaauuggcucacccauuuaaacuuuaaguacccagcacugaaugugacaaugcccaacaaugagcaguucgacaaguuguauaucuggggaguccaccauccugggacugauaaagaccagauuuuucuuuacgcccaaccaucuggccguaucaccguguccacaaagagaucacagcaggcuguaauacccaacauuggcagcaggccucggauccgcaacauuccaaguagaaucucuaucuacuggaccauuguuaaaccgggggauauacugcuaaucaauuccacgggaaaccucauugcccccagggguuauuucaagauccggagcggcaaaucgucuauaaugcgcuccgacgcgccuauugggaaguguaauucagaaugcaucacuccaaacggaaguauccccaaugacaagccuuuucagaacgugaaucgaauuacauacggcgcauguccaagauaugucaaacaaagcacccugaaacuugccacugguaugaggaacgugcccgagaagcagacacgggggaucuucggagcuauugccggcuuuauagaaaauggcugggaggggaugguggauggaugguacgguuuccgucaccagaacuccgagggccgcgggcaagcagcugaccugaagucuacccaggccgcgaucgaucagauuaauggaaaauugaacagacucaucggcaagacgaaugaaaaauuccaccagaucgagaaggaauuuagcgaggucgaagguaggauucaagaccuggagaaguauguugaggauaccaaaauagacuuauggucauacaacgccgaacugcucguggcacuugagaaucagcauacaaucgaucugacugacagugaaaugaacaaguuguucgagaaaaccaagaaacagcuacgggaaaacgcugaggauauggggaauggcugcuuuaagauuuaucacaagugugacaacgccugcaucggauccauucgaaauggcacauacaaccaugauguauaccgcgacgaggcucugaauaacagauuccagaucaaagggguggaacucaagagcggauauaaagacuggauacuguggaucucuuuugccauuucaugcuuccuucugugugucgcauugcucgguuuuaucaugugggccugccaaaagggcaauauuagguguaacaucugcauauga

SEQ ID NO: 137584 - RNA, 1701 nt, Artificial Sequence
  derived and/or modified CDS sequence (opt3) from hemagglutinin__InfluenzaA__AFN19633
augaagaccaucauugcccugagcuacauacucugccuuguguucgcucagaaacugcccggcaacgacaauuccacagcaacuuuguguuuagggcaccaugccgucccuaacggaacgaucguuaagaccauuacaaaugaucaaaucgaggugacuaacgcgaccgaacugguacagucuucaaguacaggugagauuugcgacagcccacaccagauccuagauggcgaaaauuguacccucauagacgcucugcuuggggauccgcagugcgacggauuucaaaacaaaaagugggaucuguucguggagagauccaaagccuauucuaauuguuaccccuaugacgucccugauuacgcaucguugaggucacucguggccagcaguggcacucuggaauuuaacaaugaguccuucaacuggacagguguuacccagaaugggacgucuagcgcuugcauccggcgcuccaacucaaguuucuuuagccgacugaauuggcucacucauuuaaacuuuaaguauccagcacugaaugugaccaugcccaacaacgagcaguucgacaagcuguacauuuggggaguccaccauccuggcacagauaaagaccagaucuuuuuguaugcccaaucuuccggccguauuacuaucucaaccaagagaagccagcaggcugugauaccaaauauugggaguaggccccggauccgcaacauuccuucuagaaucuccaucuacuggacaauuguaaaaccaggagauauacugcuaaucaauagcaccgguaaccucauugccccgaggggcuacuucaagauccggucggggaaaucuuccauaaugcgcucagacgcgcccauuggaaaguguaauagugaaugcaucacgccuaacggcagcaucccaaaugacaagcccuuucagaacguuaaucgaauuacuuauggugcauguccuagauacgugaaacaauccacacugaaacuugccaccgggaugaggaacgucccagagaagcagacucggggaaucuucggcgcuauugccggcuuuauagaaaaugggugggagggaaugguggaugguugguauggcuuccgucaccagaacucugaggggcgcggacaagcagcugaccuuaagagcacacaggccgcgaucgaucagauuaauggcaaauugaacagacucaucgguaagaccaaugaaaaauuccaccagaucgagaaggaauuuucagagguggaagggaggauucaagaccuggagaaguacgucgaggauacgaaaauagacuuauggaguuauaacgccgaacugcucguugcacuugagaaccagcauaccaucgaucugacagacuccgaaaugaauaaguuguucgagaaaacuaagaaacagcuacgggaaaacgcugaggauaugggcaauggaugcuuuaagauuuaccacaagugugacaacgccugcaucggcagcauucgaaaugggaccuauaaccaugauguguaccgcgacgaggcucugaauaacagauuccagaucaaaggaguagaacucaagucugguuacaaagacuggauacuguggaucucauuugccauuaguugcuuccuucuguguguggcauugcucggcuuuaucaugugggccugccaaaaggggaauauuagguguaacaucugcauauga

SEQ ID NO: 137585 - RNA, 1701 nt, Artificial Sequence
  derived and/or modified CDS sequence (opt3) from hemagglutinin__InfluenzaA__AFN19635
augaagaccaucauugcccugagcuacauacucugccuuguguucgcucagaaacugcccgagaacgacaauuccacagcaacuuuguguuuaggccaccaugccgucccuaacgggacgaucguuaagaccauuacaaaugaucaaaucgaagugacuaacgcgaccgagcugguacagucuucaaguacaggagaaauuugcgacagcccacaccagauccuagaugguauaaauuguacccucaucgacgcucugcuuggcgauccgcagugcgacggguuucaaaacaaaaagugggaucuguucguggagagauccaaagccuauucuaauuguuaccccuaugacgucccugauuacgcaucguugaggucacucguggccagcaguggaacucuggaauuuaacaaugaguccuucaacuggacaggcguuacccagaaugguacgucuagcgcuugcauucggcgcuccaacucaaguuucuuuagccgacugaauuggcucacucauuuaaacuuuaaguauccagcacugaaugugaccaugcccaacaacgagcaguucgacaaguuguacaucuggggaguccaccauccugggacagauaaagaccagauuuuucuuuaugcccaaccaucuggccguaucacuguguccaccaagagaucacagcaggcuguaauacccaauauuggcagcaggccucggauccgcaacauuccaaguagaaucucuaucuacuggacaauuguuaaaccgggggauauacugcuaaucaauuccaccggaaaccucauugcccccagggguuacuucaagauccggagcggcaaaucgucuauaaugcgcuccgacgcgccuauugggaaguguaauucagaaugcaucacgccaaacggaaguauccccaaugacaagccuuuucagaacgugaaucgaauuacuuauggcgcauguccaagauacgucaaacaaagcacacugaaacuugccaccgguaugaggaacgugcccgagaagcagacucgggggaucuucggagcuauugccggcuuuauagaaaauggcugggaggggaugguggauggaugguaugguuuccgucaccagaacuccgagggccgcgggcaagcagcugaccugaagucuacacaggccgcgaucgaucagauuaauggaaaauugaacagacucaucggcaagaccaaugaaaaauuccaccagaucgagaaggaauuuagcgaggucgaagguaggauucaagaccuggagaaguacguugaggauacgaaaauagacuuauggucauauaacgccgaacugcucguggcacuugagaaccagcauaccaucgaucugacagacagugaaaugaauaaguuguucgagaaaacuaagaaacagcuacgggaaaacgcugaggauauggggaauggcugcuuuaagauuuaccacaagugugacaacgccugcaucggauccauucgaaauggcaccuauaaccaugauguauaccgcgacgaggcucugaauaacagauuccagaucaaagggguggaacucaagagcggauacaaagacuggauacuguggaucucuuuugccauuucaugcuuccuucugugugucgcauugcucgguuuuaucaugugggccugccaaaagggcaauauuagguguaacaucugcauauga

SEQ ID NO: 137586 - RNA, 1701 nt, Artificial Sequence; identical to SEQ ID NO: 137585
  derived and/or modified CDS sequence (opt3) from hemagglutinin__InfluenzaA__AFN19637

SEQ ID NO: 137587 - RNA, 1701 nt, Artificial Sequence; identical to SEQ ID NO: 137122
  derived and/or modified CDS sequence (opt3) from hemagglutinin__InfluenzaA__AFN19639

SEQ ID NO: 137588 - RNA, 1701 nt, Artificial Sequence; identical to SEQ ID NO: 137541
  derived and/or modified CDS sequence (opt3) from hemagglutinin__InfluenzaA__AFN19641

SEQ ID NO: 137589 - RNA, 1701 nt, Artificial Sequence; identical to SEQ ID NO: 137585
  derived and/or modified CDS sequence (opt3) from hemagglutinin__InfluenzaA__AFN19643

SEQ ID NO: 137590 - RNA, 1701 nt, Artificial Sequence; identical to SEQ ID NO: 137122
  derived and/or modified CDS sequence (opt3) from hemagglutinin__InfluenzaA__AFN19645

SEQ ID NO: 137591 - RNA, 1701 nt, Artificial Sequence
  derived and/or modified CDS sequence (opt3) from hemagglutinin__InfluenzaA__AFN19647
augaagaccaucauugcccugagcuacauacucugccuuguguucgcucagaaacugcccgagaacgacaauuccacagcaacuuuguguuuaggccaccaugccgucccuaacgggacgaucguuaagaccauuacaaaugaucaaaucgaagugacuaacgcgaccgagcugguacagucuucaaguacaggagaaauuugcgacagcccacaccagauccuagauggugugaauuguacccucauagacgcucugcuuggcgauccgcagugcgacggguuucaaaacaaaaagugggaucuguucgucgagagauccaaagccuauucuaauuguuaccccuaugacgugccugauuacgcaucguugaagucacucguugccagcaguggaacucuggaauuuaacaaugaguccuucaacuggacaggcgugacccagaaugguacgucuagcgcuugcaucaggcgguccaacucaaguuucuuuagccgccugaauuggcucacucauuuaaacuuuaaguauccagcacugaaugucaccaugcccaacaacgagcaguucgacaaacuuuacauuuggggagugcaccauccugggacagauaaggaccagaucuuuuuguaugcccaaucuuccggccgaauuacuguaucaaccaaacguagccagcaggcuguuaucccaaauauaggcaguagacccaggauucggaacaucccuucucgcauuuccaucuacuggacaaucgugaagccaggggauauucugcuaauaaauagcaccggaaaccucaucgccccgagagguuacuucaaaauucagucgggcaagucuuccaucaugaggucagacgcgcccauagggaaguguaauagugaaugcauuacgccuaacggaagcaucccaaaugacaaacccuuucaaaacgucaaucggaucacuuauggcgcauguccucgcuacgugaagcaguccacacugaaacuugccaccgguaugcgaaacgugccagagaagcagacuagagggauuuucggagcuaucgccggcuuuauugaaaauggcugggaggggauggucgauggaugguaugguuucaggcaccaaaacucugagggccgggggcaggcagcugaccugaaaagcacacaggccgcgauagaucagaucaauggaaaguugaaccgucucauuggcaaaaccaaugaaaaguuccaccaaaucgagaaggaauuuucagagguugaaggucgcauccaggaccuggagaaauacguggaggauacgaagauugacuuauggaguuauaacgccgaacugcucguagcacuugagaaccagcauaccauagaucugacagacuccgaaaugaauaaauuguucgagaagacuaaaaagcagcuaagagaaaacgcugaggauauggggaauggcugcuuuaagaucuaccacaaaugugacaacgccugcauuggaagcaucaggaauggcaccuauaaccaugauguguaccgggacgaggcucugaauaaccgauuccaaauuaagggggucgaacucaaaucuggauacaaggacuggauccuguggauaucauuugccaucaguugcuuccuucuguguguggcauugcucgguuuuauuaugugggccugccagaaaggcaauauccgcuguaacauuugcaucuga

SEQ ID NO: 137592 - RNA, 1701 nt, Artificial Sequence
  derived and/or modified CDS sequence (opt3) from hemagglutinin__InfluenzaA__AFN19649
augaagaccaucauugcccugagcuacauacucugccuuguguucgcucagaaacugcccggcaacgacaauuccacagcaacuuuguguuuagggcaccaugccgucccuaacggaacgaucguuaagaccauuacaaaugaucaaaucgaggugacuaacgcgaccgaacugguacaaaauucuucaauuagugagaucugcgacagcccacaccagauacuagauggugaaaacuguacacucaucgacgcucugcuuggcgauccgcagugcgacggguuucagaauaaaaagugggaucuguucguggagagauccaaagccuauucuaacuguuaccccuaugacgucccugauuacgcaucguugaggucacucguggccagcaguggaacccuggaauuuaauaacgaguccuucaauuggacuggcguuacacagaacgguaccucuagcgcuugcauucggcgcuccaauucaaguuucuuuagccgacugaacuggcucacgcauuuaaauuuuaaguauccagcacugaacgugacuaugcccaacaaugagcaguucgacaagcuguacaucuggggaguccaccauccugggaccgauaaagaccagauuuuucuuuaugcccaaucuuccggccguaucacagugucaacuaagagaagccagcaggcuguaauaccaaacauuggcaguaggccccggauccgcaauauuccuucuagaaucuccaucuacuggaccauuguuaaaccaggggauauacugcuaaucaacagcacaggaaaucucauugccccgagggguuacuucaagauccggucgggcaaaucuuccauaaugcgcucagacgcgcccauugggaaguguaacagugaaugcaucaccccuaauggaagcaucccaaacgacaagcccuuucagaaugugaaccgaauuacguauggcgcauguccuagauacgucaaacaauccacucugaaguuggccacagguaugaggaaugugccagagaaacagacccgggggaucuucggagcuauugccggcuuuauagaaaacggcugggaggggaugauggauggaugguaugguuuccgucaccaaaauucugagggccgcgggcaggcagcugaccuuaagagcacucaggccgcgaucgaucagauuaacggaaaauugaauagacucaucggcaagacaaacgaaaaauuccaccagaucgagaaggaauuuucagagguggaagguaggauucaagaccuggagaaguacgucgaggauaccaaaauagacuuauggaguuauaacgccgaacugcucguugcacuugagaaucagcauacgaucgaucugaccgacuccgaaaugaacaaguuguucgagaaaacaaagaaacagcuacgggaaaaugcugaggauauggggaacggcugcuuuaagauuuaccacaagugugacaaugccugcaucggaagcauucgaaacggcacuuaugaucaugacguguaccgcgacgaggcucugaauaacagauuccagaucaaagggguagaacucaagucuggauacaaagauuggauacuguggaucucauuugccauuaguugcuuccuucuguguguggcauugcucgguuuuaucaugugggccugccaaaagggcaauauuagguguaacaucugcauauga

SEQ ID NO: 137593 - RNA, 1701 nt, Artificial Sequence; identical to SEQ ID NO: 137585
  derived and/or modified CDS sequence (opt3) from hemagglutinin__InfluenzaA__AFN19653

SEQ ID NO: 137594 - RNA, 1701 nt, Artificial Sequence; identical to SEQ ID NO: 137501
  derived and/or modified CDS sequence (opt3) from hemagglutinin__InfluenzaA__AFN19663

SEQ ID NO: 137595 - RNA, 1701 nt, Artificial Sequence; identical to SEQ ID NO: 137509
  derived and/or modified CDS sequence (opt3) from hemagglutinin__InfluenzaA__AFN19665

SEQ ID NO: 137596 - RNA, 1701 nt, Artificial Sequence
  derived and/or modified CDS sequence (opt3) from hemagglutinin__InfluenzaA__AFN19667
augaagaccaucauugcccugagcuacauacucugccuuguguucgcucagaaacugcccggcaacgacaauuccacagcaacuuuguguuuagggcaccaugccgucccuaacggaacgaucguuaagaccauuacaaaugaucaaaucgaggugacuaacgcgaccgaacugguacaaaauucuucaauuggugagaucugcgacaguccacaccagauacuagauggcgaaaacuguacacucaucgacgcucugcuuggggauccgcagugcgacggauuucagaauaaaaagugggaucuguucguggagagaagcaaagccuauuccaacuguuaccccuaugacgucccugauuacgcaucuuugaggucgcucguggccucaagcggcacccuggaauuuaauaacgagaguuucaauuggacugguguuacacagaacgggaccuccucugcuugcaugcggcgcagcaauuccucauuuuucagucgacugaacuggcucacgcauuuaaauuuuaaguauccagcacugaacgugacuaugcccaacaaugagcaguucgacaaacuuuacauuuggggaguccaccauccuggcaccgauaaggaccagaucuuuuuguaugcccaaagcucuggccguauuacaguguccacuaagagaucacagcaggcuguaaucccaaacauagggagcaggccccggauucgcaauaucccuaguagaauuucuaucuacuggaccaucguuaaaccaggagauauucugcuaauaaacuccacagguaaucucaucgccccgaggggcuacuucaagauucggagcgggaaaucgucuaucaugcgcuccgacgcgcccauaggaaaguguaacucagaaugcauuaccccuaauggcaguaucccaaacgacaagcccuuucagaaugugaaccgaaucacguauggugcauguccuagauacgucaaacaaagcacucugaaacuugccacagggaugaggaaugugccagagaagcagacccggggaauuuucggcgcuaucgccggcuuuauugaaaacgggugggagggaaugguggaugguugguauggcuuccgucaccaaaauuccgaggggcgcggacaggcagcugaccugaagucuacucaggccgcgauagaucagaucaacggcaaauugaauagacucauugguaagacaaacgaaaaauuccaccagaucgagaaggaauuuagcgaggucgaagggaggauccaagaccuggagaaguacguugaggauaccaaaauugacuuauggucauauaacgccgaacugcucguggcacuugagaaucagcauacgauagaucugaccgacagugaaaugaacaaguuguucgagaaaacaaagaaacagcuacgggaaaaugcugaggauaugggcaacggaugcuuuaagaucuaccacaagugugacaaugccugcauuggcuccauccgaaacgggacuuaugaucaugacguauaccgcgacgaggcucugaauaacagauuccagauuaaaggaguggaacucaagagcgguuacaaagauuggauccuguggauaucuuuugccaucucaugcuuccuucugugugucgcauugcucggcuuuauuaugugggccugccaaaaggggaauaucagguguaacauuugcaucuga

SEQ ID NO: 137597 - RNA, 1701 nt, Artificial Sequence
  derived and/or modified CDS sequence (opt3) from hemagglutinin__InfluenzaA__AFN19669
augaagaccaucauugcccugagcuacauacucugcaugguguucgcucagaaacuucccggcaacgacaauuccacagcaacucuguguuuggggcaccaugccgucccuaacggaacgaucguuaagaccauuacaaaugaucaaaucgaggugacuaacgcgaccgaauuaguacagaauagcucaauuggugagaucugcgacaguccacaccagauacuggauggcgaaaacuguacacuaaucgacgcucuccugggggauccgcagugcgacggauuucaaaauaaaaagugggaucuuuucguggagagaagcaaagccuauuccaacuguuaccccuaugacgucccuaauuacgcaucucugaggucguugguggccucaagcggcacccucgaauuuaacaaugagaguuucaacuggacugguguuacacagaaugggaccuccucugcuugcaugcggcgcagcaacuccucauuuuucagucgacugaauuggcugacgcaucucaacuuuaaguauccagcauuaaacgugacuaugcccaauaacgagcaguucgauaagcuguacauuuggggaguccaccauccuggcaccgacaaagaucagaucuuucuuuaugcccaaagcucuggccguauuacaguguccacuaagagaucacagcaggcuguaaucccaaauauagggagcaggccccggauucgcaacaucccuaguagaauuucuaucuacuggaccaucguuaaaccaggagacauuuugcugauaaauuccacagguaaccuaaucgccccgaggggcuacuucaagauucggagcgggaaaucgucuaucaugcgcuccgaugcgcccauaggaaaguguaauucagaaugcauuaccccuaacggcaguaucccaaaugacaagcccuuucagaacgugaaucgaaucacguauggugcauguccuagauacgucaaacaaagcacucucaagcuggccacagggaugaggaacgugccagagaaacagacccggggaauuuucggcgcuaucgccggcuuuauugaaaaugggugggagggaaugguggacgguugguauggcuuccgucaccagaacuccgaggggcgcggacaagcagcugaucuuaagucuacucaggccgcgauagaccagaucaauggcaaacugaacagauugauugguaagacaaacgaaaaauuccaccagaucgagaaggaauuuagcgaggucgaagggaggauccaagaucucgagaaguacguugaggacaccaaaauugaucuguggucauauaaugccgaauuacugguggcacucgagaaccagcauacgauagaccuuaccgauagugaaaugaauaagcuguucgagaaaacaaagaaacaguugcgggaaaacgcugaggacaugggcaauggaugcuuuaagaucuaccacaagugugauaacgccugcauuggcuccauccgaaaugggacuuaugaccaugauguauaccgcgacgaggcucuaaacaauagauuccagauuaaaggaguggaacugaagucugguuacaaagacuggauccucuggauaucuuuugccaucucaugcuuccugcuuugugucgcacuguugggcuuuauuaugugggccugccaaaaggggaacaucagguguaauauuugcaucuga

SEQ ID NO: 137598 - RNA, 1701 nt, Artificial Sequence
  derived and/or modified CDS sequence (opt3) from hemagglutinin__InfluenzaA__AFN19671
augaagaccaucauugcccugagcuacauacucugccuuguguucgcucagaaacugcccggcaacgacaauuccacagcaacuuuguguuuagggcaccaugccgucccuaacggaacgaucguuaagaccauuacaaaugauagaaucgaggugacuaacgcgaccgaacugguacaaaauucuucaauuggugagaucugcgacaguccacaccagauacuagauggcgaaaacuguacacucaucgacgcucugcuuggggauccgcagugcgacggauuucagaauaaaaagugggaucuguucguggagaggagcaaagccuauuccaacuguuaccccuaugacgucccugauuacgcaucuuugcggucgcucguggccucaagcggcacccuggaauuuaauaacgagaguuucaauuggacugguguuacacaaaacgggaccuccucugcuugcauucgccgaagcaauaacuccuuuuucucacgucugaauuggcucacgcauuuaaacuuuaaguauccagcacugaacgugacuaugcccaauaacgagcaguucgacaaacuuuacaucuggggaguccaccauccuggcaccgauaaagaccagaucuuuuuguaugcccagaguagcggcagaauuacagugucuacuaagaggucccaacaggcuguaauaccaaauauugggucacggccccgcaucagaaacauuccuagcaggaucaguaucuacuggaccauuguuaaaccaggagauauacugcuaaucaauucuacagguaaccucauugccccgcggggcuacuucaagauccgcuccgggaaaagcucgauaaugcgaucugacgcgcccauuggaaaguguaaguccgaaugcaucaccccuaauggcucaaucccaaacgacaaacccuuucagaaugugaacagaauuacguauggugcauguccuagguacgucaagcagaguacucugaaacuugccacagggaugcggaaugugccagagaagcaaacccguggaaucuucggcgcuauugccggcuuuauagaaaacgggugggagggaaugguggaugguugguauggcuuccgccaccagaauagcgaggggagaggacaggcagcugaccugaaauccacucaagccgcgaucgaucagauuaacggcaaguugaauaggcucaucgguaaaacaaacgaaaaguuccaccagaucgagaaggaauuuucugaggucgaagggcggauucaggaccuggagaaauacguugaggauaccaagauagacuuauggagcuauaacgccgaacugcucguggcacuugagaaucaacauacgaucgaucugaccgacucagaaaugaacaaauuguucgagaagacaaagaagcagcuacgagaaaaugcugaggauaugggcaacggaugcuuuaagauuuaccacaaaugugacaaugccugcaucgagaguauucgcaacggcacuuaugaucaugacguauacagagacgaagcucugaauaacagguuccagaucaaggggguggagcucaaauccggauacaaggauuggauacuguggaucagcuuugccauuucuugcuuccuucugugugucgcauugcucgguuuuaucaugugggccugccagaaaggcaauauucgguguaacaucugcauauga

SEQ ID NO: 137599 - RNA, 1701 nt, Artificial Sequence; identical to SEQ ID NO: 137122
  derived and/or modified CDS sequence (opt3) from hemagglutinin__InfluenzaA__AFN19674

SEQ ID NO: 137600 - RNA, 1701 nt, Artificial Sequence; identical to SEQ ID NO: 137122
  derived and/or modified CDS sequence (opt3) from hemagglutinin__InfluenzaA__AFN19676

SEQ ID NO: 137601 - RNA, 1701 nt, Artificial Sequence; identical to SEQ ID NO: 137509
  derived and/or modified CDS sequence (opt3) from hemagglutinin__InfluenzaA__AFN19678

SEQ ID NO: 137602 - RNA, 1701 nt, Artificial Sequence
  derived and/or modified CDS sequence (opt3) from hemagglutinin__InfluenzaA__AFN19682
augaagaccaucauugcccugagcuacauacucugccuuguguucgcucagaaacugcccggcaacgacaauuccacagcaacuuuguguuuagggcaccaugccgucccuaacggaacgaucguuaagaccauuacaaaugaucaaaucgaggugacuaacgcgaccgaacugguacaaaauucuucaauuggugagaucugcgacaguccacaccagauacuagauggcgaaaacuguacacucaucgacgcucugcuuggggauccgcagugcgacggauuucagaauaaaaagugggaucuguucguggagagaagcaaagccuauuccaacuguuaccccuaugacgucccuaauuacgcaucuuugaggucgcucguggccucaagcggcacccuggaauuuaacaaugagaguuucaacuggacugguguuacacagaaugggaccuccucugcuugcaugcggcgcagcaacuccucauuuuucagucgacugaauuggcucacgcauuuaaacuuuaaguauccagcacugaacgugacuaugcccaauaacgagcaguucgauaaacuuuacauuuggggaguccaccauccuggcaccgacaaggaucagaucuuuuuguaugcccaaagcucuggccguauuacaguguccacuaagagaucacagcaggcuguaaucccaaauauagggagcaggccccggauucgcaacaucccuaguagaauuucuaucuacuggaccaucguuaaaccaggagacauucugcuaauaaauuccacagguaaccucaucgccccgaggggcuacuucaagauucggagcgggaaaucgucuaucaugcgcuccgaugcgcccauaggaaaguguaauucagaaugcauuaccccuaacggcaguaucccaaaugacaagcccuuucagaacgugaaucgaaucacguauggugcauguccuagauacgucaaacaaagcacucugaaacuugccacagggaugaggaacgugccagagaagcagacccggggaauuuucggcgcuaucgccggcuuuauugaaaaugggugggagggaaugguggacgguugguauggcuuccgucaccagaacuccgaggggcgcggacaagcagcugaucugaagucuacucaggccgcgauagaccagaucaauggcaaauugaacagacucauugguaagacaaacgaaaaauuccaccagaucgagaaggaauuuagcgaggucgaagggaggauccaagaucuggagaaguacguugaggacaccaaaauugauuuauggucauauaaugccgaacugcucguggcacuugagaaccagcauacgauagaccugaccgauagugaaaugaauaaguuguucgagaaaacaaagaaacagcuacgggaaaacgcugaggacaugggcaauggaugcuuuaagaucuaccacaagugugauaacgccugcauuggcuccauccgaaaugggacuuaugaccaugauguauaccgcgacgaggcucugaacaauagauuccagauuaaaggaguggaacucaagagcgguuacaaagacuggauccuguggauaucuuuugccaucucaugcuuccuucugugugucgcauugcucggcuuuauuaugugggccugccaaaaggggaacaucaaauguaauauuugcaucuga

SEQ ID NO: 137603 - RNA, 1701 nt, Artificial Sequence
  derived and/or modified CDS sequence (opt3) from hemagglutinin__InfluenzaA__AFN19684
augaagaccaucauugcccugagcuacauacucugccuugcuuucgcacagaaacugcccggcaacgacaauuccacagccacuuuguguuuagggcaccaugcggugccuaacggaacgaucgucaagaccauuacaaaugaucaaaucgagguuacuaacgcuaccgaacuggugcagucuucaaguacaggugagauuugcgacagcccacaccagauccuagauggcgaaaauuguacccucauagacgcccugcuuggggauccgcagugcgacggauuucaaaacaaaaagugggaucuguucguagagagauccaaagcauauucuaauuguuaccccuaugacgugccugauuacgccucguugaggucacucgucgcuagcaguggcacucuggaauuuaacaaugaguccuucaacuggacaggugugacccagaaugggacgucuagcgcaugcauccggggauccaacucaaguuucuuuagccgccugaauuggcucacucauuuaaacuuuaaguauccagcccugaauguuaccaugcccaacaacgagcaguucgacaagcuguacauuuggggcgugcaccauccuggcacagauaaagaccagaucuuuuuguaugcucaaucuuccgggcgaauuacugucucaaccaagcguagccagcaggccgugaucccaaauauaggaaguagacccaggauucggaacaucccuucucgcauuuccaucuacuggacaaucguaaaaccaggugauauucugcuaauaaauagcaccggcaaccucaucgcgccgagaggguacuucaagauuaggucgggaaaaucuuccaucaugcggucagacgcacccauaggcaaguguaauagugaaugcauuacgccuaacgguagcaucccaaaugacaagcccuuucagaacguuaaucgcaucacuuauggggccuguccucgauacgugaaacaauccacacugaaacuugcuaccggaaugagaaacgucccagagaagcagacuaggggcauuuucggcgccaucgcaggguuuauugaaaauggaugggaggguaugguggauggcugguauggguuccggcaccagaacucugagggacguggccaagcugccgaccuuaagagcacacaggcggccauagaucagaucaaugguaaauugaaccgccucauugggaagaccaaugaaaaauuccaccagaucgagaaggaauuuucagagguggaaggcagaauccaagaccuggagaaguacgucgaggauacgaaaauugacuuauggaguuauaacgcagaacugcucguugcucuugagaaccagcauaccauagaucugacagacuccgaaaugaauaaguuguucgagaaaacuaagaaacagcuaagggaaaacgccgaggauaugggaaauggcugcuuuaagaucuaccacaagugugacaacgcuugcauugggagcauccggaauggaaccuauaaccauaauguguaccgagaugaggcccugaacaaucgcuuccagauuaaagguguagaacucaagucuggcuacaaagacuggauccuguggauaucauuugcaaucaguugcuuccuucuguguguggccuugcucggguuuauuaugugggcuugccaaaagggaaacaucagauguaauauuugcaucuga

SEQ ID NO: 137604 - RNA, 1701 nt, Artificial Sequence
  derived and/or modified CDS sequence (opt3) from hemagglutinin__InfluenzaA__AFN19686
augaagaccaucauugcccugagcuacauacucugccuugcuuucgcacagaaacugcccggcaacgacaauuccacagccacuuuguguuuagggcaccaugcggugccuaacggaacgaucgucaagaccauuacaaaugaucaaaucgagguuacuaacgcuaccgaacuggugcagucuucaaguacaggugagauuugcgacagcccacaccagauccuagauggcgaaaauuguacccucauagacgcccugcuuggggauccgcagugcgacggauuucaaaacaaaaagugggaucuguucguagagagauccaaagcauauucuaauuguuaccccuaugacgugccugauuacgccucguugaggucacucgucgcuagcaguggcacucuggaauuuaacaaugaguccuucaacuggacaggugugacccagaaugggacgucuagcgcaugcauccggcgcuccaacucaaguuucuuuagccgacugaauuggcucacucauuuaaacuuuaaguauccagcccugaauguuaccaugcccaacaacgagcaguucgacaagcuguacauuuggggagugcaccauccuggcacagauaaagaccagaucuuuuuguaugcucaaucuuccggccguauuacugucucaaccaagagaagccagcaggccgugaucccaaauauagggaguaggccccggauucgcaacaucccuucuagaauuuccaucuacuggacaaucguaaaaccaggagauauucugcuaauaaauagcaccgguaaccucaucgcgccgaggggcuacuucaagauucggucggggaaaucuuccaucaugcgcucagacgcacccauaggaaaguguaauagugaaugcauuacgccuaacggcagcaucccaaaugacaagcccuuucagaacguuaaucgaaucacuuauggugccuguccuagauacgugaaacaauccacacugaaacuugcuaccgggaugaggaacauuccagagaagcagacucggggaaucuucggcgccauugcaggcuuuauagaaaaugggugggagggaauggucgaugguugguauggcuuccgucaccagaacucugaggggcgcggacaagcugccgaccuuaagagcacacaggcggccaucgaucagauuaauggcaaauugaacagacucaucgguaagaccaaugaaaaauuccaccagaucgagaaggaauuuucagagguggaagggaggauucaagaccuggagaaguacguggaggauacgaaaauagacuuauggaguuauaacgcagaacugcucgucgcucuugagaaccagcauaccaucgaucugacagacuccgaaaugaauaaguuguucgagaaaacuaagaaacagcuacgggaaaacgccgaggauaugggcaauggaugcuuuaagauuuaccacaagugugacaacgcuugcaucggcagcauucgaaaugggaccuauaaccauaauguuuaccgcgaugaggcccugaacaauagauuccagaucaaaggaguggaacucaagucugguuacaaagacuggauacuguggaucucauuugcaauuaguugcuuccuucuguguguagccuugcucggcuuuaucaugugggcuugccaaaaggggaacauuagguguaauaucugcauauga

SEQ ID NO: 137605 - RNA, 1701 nt, Artificial Sequence
  derived and/or modified CDS sequence (opt3) from hemagglutinin__InfluenzaA__AFN19688
augaagaccaucauugcccugagcuacauacucugccuuguguucgcucaggagcugcccggcaacgacaauuccacagcaacuuuguguuuagggcaccaugccgucccuaacggaacgaucguuaaaaccauuacaaaugaucaaaucgaagugacuaacgcgaccgagcugguacagucuucaaguacaggugaaauuugcgacagcccacaccagauccuagauggcgagaauuguacccucauagacgcucugcuuggggauccgcagugcgacggauuucaaaacaagaaaugggaucuguucguggaaagauccaaggccuauucuaauuguuaccccuaugacgucccugauuacgcaucguugaggucacucguggccagcaguggcacucuggaguuuaacaaugaguccuucaacuggacagguguuacccagaaugggacgucuagcgcuugcauccggcgcuccaacucaaguuucuuuagccgacugaauuggcucacucauuuaaacuuuaaauauccagcacugaaugugaccaugcccaacaacgaacaguucgacaaacuuuacauuuggggaguccaccauccuggcacagauaaggaccagaucuuuuuguaugcccaaucuuccggccguauuacugugucaaccaagagaagccagcaggcuguaaucccaaauauagggaguaggccccggauucgcaacaucccuucuagaauuuccaucuacuggacaaucguuaagccaggagauauucugcuaauaaauagcaccgguaaccucaucgccccgaggggcuacuucaaaauucggucggggaagucuuccaucaugcgcucagacgcgcccauaggaaaauguaauagugagugcauuacgccuaacggcagcaucccaaaugacaagcccuuucagaacgugaaucgaaucacuuauggugcauguccuagauacgucaagcaauccacacugaaacuugccaccgggaugaggaacgugccagaaaagcagacucggggaauuuucggcgcuaucgccggcuuuauugagaaugggugggagggaaugguggaugguugguauggcuuccgucaccagaacucugaagggcgcggacaagcagcugaccugaaaagcacacaggccgcgauagaucagaucaauggcaaguugaacagacucauugguaaaaccaaugagaaguuccaccagaucgaaaaagaguuuucagaagucgaggggaggauccaagaccuggagaaguacguugaagauacgaagauugacuuauggaguuauaacgccgagcugcucguggcacuugaaaaccagcauaccauagaucugacagacuccgagaugaauaaauuguucgaaaagacuaaaaagcagcuacgggagaacgcugaggauaugggcaauggaugcuuuaaaaucuaccacaagugugacaacgccugcauuggcagcauccgaaaugggaccuauaaccaugauguauaccgcgacgaagcucugaauaacagauuccagauuaagggaguggagcucaaaucugguuacaaggacuggauccuguggauaucauuugccaucaguugcuuccuucugugugucgcauugcucggcuuuauuaugugggccugccaaaaagggaauaucagguguaacauuugcaucuga

SEQ ID NO: 137606 - RNA, 1701 nt, Artificial Sequence
  derived and/or modified CDS sequence (opt3) from hemagglutinin__InfluenzaA__AFN19690
augaagaccacaaucgcccugagcuacauucucugccuuguguucgcucagaaacugcccggcaacgacaauuccacugcaacguuguguuuagggcaccaugccgucccuaacggaaccauaguuaagacaaucacuaaugauagaauugaggugaccaacgcgacagaacugguacaaaauucuucaaucggugagauuugcgacaguccacaccagauccuagauggcgaaaacuguacccucauagacgcucugcuuggggauccgcagugcgacggauuucagaauaaaaagugggaucuguucguggagaggagcaaagccuauuccaacuguuaccccuaugacgucccugauuacgcaucuuugcggucgcucguggccucaagcggcacucuggaauuuaauaacgagaguuucaauuggacagguguuacccaaaacgggacguccucugcuugcauccgccgaagcaauaacuccuuuuucucacgucugaauuggcucacucauuuaaacuuuaaguauccagcacugaacgugaccaugcccaauaacgagcaguucgacaaacuuuacauuuggggaguccaccauccuggcacagauaaggaccagaucuuuuuguaugcccagaguagcggcagaauuacugugucuaccaagaggucccaacaggcuguaaucccaaauauagggucacggccccgcauuagaaacaucccuagcaggauuaguaucuacuggacaaucguuaaaccaggagauauucugcuaauaaauucuaccgguaaccucaucgccccgcggggcuacuucaagauucgcuccgggaaaagcucgaucaugcgaucugacgcgcccauaggaaaguguaaguccgaaugcauuacgccuaauggcucaaucccaaacgacaaacccuuucagaaugugaacagaaucacuuauggugcauguccuagguacgucaagcagaguacacugaaacuugccaccgggaugcggaaugugccagagaagcaaacucguggaauuuucggcgcuaucgccggcuuuauugaaaacgggugggagggaaugguggaugguugguauggcuuccgccaccagaauagcgaggggagaggacaggcagcugaccugaaauccacacaagccgcgauagaucagaucaacggcaaguugaauaggcucauugguaaaaccaacgaaaaguuccaccagaucgagaaggaauuuucugaggucgaagggcggauccaggaccuggagaaauacguugaggauacgaagauugacuuauggagcuauaacgccgaacugcucguggcacuugagaaucaacauaccauagaucugacagacucagaaaugaacaaauuguucgagaagacuaaaaagcagcuacgagaaaaugcugaggauaugggcaacggaugcuuuaagaucuaccacaaaugugacaaugccugcauuggcaguauccgcaacgggaccuaugaucaugacguauacagagacgaggcucugaauaacagguuccagauuaagggaguggaucucaaauccgguuacaaggacuggauccuguggaucagcuuugccauaucuugcuuccuucugugugucgcauugcucggcuuuauuaugugggccugccagaaagggaauauccgguguaacauuugcaucuga

SEQ ID NO: 137607 - RNA, 1701 nt, Artificial Sequence
  derived and/or modified CDS sequence (opt3) from hemagglutinin__InfluenzaA__AFN19692
augaagaccaucauugcccugagcuacauacucugccuuguguucgcucagaaaauccccggcaacgacaauuccacagcaacucuguguuuggggcaccaugccgucccuaacggaacgauuguuaagaccaucacaaaugaucaaauugaggugacuaacgcgaccgaauuaguacagucuucaaguacaggugagaucugcgacagcccacaccagauacuggauggcgaaaauuguacccuaaucgacgcucuccugggggauccgcagugcgacggauuucaaaacaaaaagugggaucuuuucguggagagauccaaagccuauucuaauuguuaccccuaugacgucccugauuacgcaucgcugaggucauugguggccagcaguggcacucucgaauuuaacaaugaguccuucaacuggacagguguuacccagaaugggacgucuagcgcuugcauucggcgcuccgacucaaguuucuuuagccgacugaacuggcugacucaucucaauuuuaaguauccagcauuaaacgugaccaugcccaauaacgagcaguucgauaagcuguacaucuggggaguccaccauccuggcacagacaaagaucagauuuuucuuuaugcccaggcuucuggccguaucacuguguccaccaagagaucacaacaggccguaauaccaaacauugggagcaggccccggauccgcaauauuccuaguagaaucucuaucuacuggacaauuguuaaaccaggagacauauugcugaucaacuccaccgguaaucuaauugcgccgaggggcuacuucaagauccggagcgggaaaucgucuauaaugcgcuccgacgcacccauuggaaaguguaacucagaaugcaucacgccuaauggcaguaucccaaacgauaagcccuuucagaaugugaaccgaauuacuuauggugccuguccuagauacgucaaacaaaauacacucaagcuggcuaccgggaugaggaacgugccagagaaacagacucggggaaucuucggcgccauugcaggcuuuauagaaaaugggugggagggaaugguggacgguugguauggcuuccgucaccagaacagcgaggggcgcggacaagcugccgaucuuaaguccacacaggcggccaucgaccagauuaauggcaaacugaacagauugaucgguaagaccaaugaaaaauuccaccagaucgagaaggaauuuucugaggucgaagggaggauucaagaucucgagaaguacguugaggacacgaaaauagaucuguggagcuauaacgcagaauuacugguggcucucgagaaccagcauaccaucgaccuuacagauucagaaaugaauaagcuguucgagaaaacuaagaaacaguugcgggaaaacgccgaggacaugggcaauggaugcuuuaagauuuaccacaagugugauaacgcuugcaucggcaguauucgaaaugggaccuauaaccaugacguauaccgcgacgaggcccuaaauaacagauuccagaucaaaggaguggaacugaaguccgguuacaaagauuggauacucuggaucagcuuugcaauuucuugcuuccugcuuugugucgcccuguugggcuuuaucaugugggcuugccaaaaggggaauauuagguguaacaucugcauauga

SEQ ID NO: 137608 - RNA, 1701 nt, Artificial Sequence
  derived and/or modified CDS sequence (opt3) from hemagglutinin__InfluenzaA__AFN19694
augaagaccaucauugcccugagcuacauacucugccuuguguucgcucagaaacugcccggcaacgacaauuccacagcaacuuuguguuuagggcaccaugccgucccuaacggaacgaucguuaagaccauuacaaaugauagaaucgaggugacuaacgcgaccgaacugguacaaaauucuccaauuggugagaucugcgacucaccgcaccagauacuagauggcgaaaacuguacacucaucgacgcucugcuuggggauccccagugcgacggauuucagaauaaaaagugggaucuguucguggagaggaguaaagccuauagcaacuguuacccuuaugacgucccagauuacgcauccuugcggucucucguggccucgucaggcacccuggaauuuaauaacgagagcuucaauuggacugguguuacacaaaacgggaccaguuccgcuugcauucgccgaucuaauaacagcuuuuucucccgucugaauuggcucacgcauuuaaacuuuaaguaucccgcacugaacgugacuaugccuaauaacgagcaguucgacaaacuuuacaucuggggaguccaccauccaggcaccgauaaagaccagaucuuuuuguaugcccagucaaguggcagaauuacagugagcacuaagaggucucaacaggcuguaauacccaauauugggucccggccucgcaucagaaacauuccaucaaggaucagcaucuacuggaccauuguuaaaccgggagauauacugcuaaucaauaguacagguaaccucauugcgccccggggcuacuucaagauccgcucugggaaauccagcauaaugcgaucggacgccccuauuggaaaguguaagucugaaugcaucaccccaaauggcuccauccccaacgacaaaccuuuucagaaugugaacagaauuacguauggugcauguccaagguacgucaagcagucaacucugaaacuugccacagggaugcggaaugugcccgagaagcaaacccguggaaucuucggcgcuauugccggcuuuauagaaaacgggugggagggaaugguggaugguugguauggcuuccgccaccagaauagugaggggagaggacaggcagcugaccugaaaagcacucaagccgcgaucgaucagauuaacggcaaguugaauaggcucaucgguaaaacaaacgaaaaguuccaccagaucgagaaggaauuuuccgaggucgaagggcggauucaggaccuggagaaauacguugaggauaccaagauagacuuauggucuuauaacgccgaacugcucguggcacuugagaaucaacauacgaucgaucugaccgacagcgaaaugaacaaauuguucgagaagacaaagaagcagcuacgagaaaaugcugaggauaugggcaacggaugcuuuaagauuuaccacaaaugugacaaugccugcaucggcucaauucgcaacgggacuuaugaucaugacguauacagagacgaggcucugaauaacagguuccagaucaagggaguggaacucaaaagugguuacaaggauuggauacuguggaucuccuuugccauuagcugcuuccuucugugugucgcauugcucggcuuuaucaugugggccugccagaaagggaauauucgguguaacaucugcauauga

SEQ ID NO: 137609 - RNA, 1701 nt, Artificial Sequence
  derived and/or modified CDS sequence (opt3) from hemagglutinin__InfluenzaA__AFN19700
augaagaccaucauugcccugagcuacauacucugccuuguguucgcucagaaacugcccggcaacgacaauuccacagcaacuuuguguuuagggcaccaugccgucccuaacggaacgaucguuaagaccauuacaaaugaucaaaucgaggugacuaacgcgaccgaacugguacaaaauucuucaauuggugagaucugcgacaguccacaccagauacuagauggcgaaaacuguacacucaucgacgcucugcuuggggauccgcagugcgacggauuucagaauaaaaagugggaucuguucguggagagaagcaaagccuauuccaacuguuaccccuaugacgucccugauuacgcaucuuugaggucgcucguggccucaagcggcacccuggaauuuaauaacgagcgguucaauuggagugguguuacucagaacgggacauccucugcuugcaugcgccgaagcaauuccucauuuuucagucgucugaacuggcucacccauuuaaauuuuaaguauccagcacugaacgugacgaugcccaacaaugagcaguucgacaaacuuuacauuuggggaguccaccauccuggcacugauaaggaccagaucuuuuuguaugcccaaagcucuggcagaauuaccguguccacaaagaggucacagcaggcuguaaucccaaacauagggagccggccccgcauuagaaauaucccuaguaggauuucuaucuacuggacuaucguuaaaccaggagauauucugcuaauaaacuccaccgguaaucucaucgccccgcggggcuacuucaagauucgcagcgggaaaucgucuaucaugcgauccgacgcgcccauaggaaaguguaacucagaaugcauuacaccuaauggcaguaucccaaacgacaagcccuuucagaaugugaacagaaucaccuauggugcauguccuagguacgucaaacaaagcacgcugaaacuugccacugggaugcggaaugugccagagaagcagacacguggaauuuucggcgcuaucgccggcuuuauugaaaacgggugggagggaaugguggaugguugguauggcuuccgccaccaaaauuccgaggggagaggacaggcagcugaccugaagucuacccaggccgcgauagaucagaucaacggcaaauugaauaggcucauugguaagacuaacgaaaaauuccaccagaucgagaaggaauuuagcgaggucgaagggcggauccaagaccuggagaaguacguugaggauacaaaaauugacuuauggucauauaacgccgaacugcucguggcacuugagaaucagcauaccauagaucugacggacagugaaaugaacaaguuguucgagaaaaccaagaaacagcuacgagaaaaugcugaggauaugggcaacggaugcuuuaagaucuaccacaagugugacaaugccugcauuggcuccauccgcaacgggacauaugaucaugacguauacagagacgaggcucugaauaacagguuccagauuaaaggaguggaacucaagagcgguuacaaagauuggauccuguggauaucuuuugccaucucaugcuuccuucugugugucgcauugcucggcuuuauuaugugggccugccaaaaggggaauauccgguguaacauuugcaucuga

SEQ ID NO: 137610 - RNA, 1701 nt, Artificial Sequence
  derived and/or modified CDS sequence (opt3) from hemagglutinin__InfluenzaA__AFN19702
augaagaccaucauugcccugagcuacauacucugccuuguguucgcucagaaacugcccggcaacgacaauuccacagcaacuuuguguuuagggcaccaugccgucccuaacggaacgaucguuaagaccauuacaaaugauagaaucgaggugacuaacgcgaccgaacugguacaaaauucuucaauuggugagaucugcgacaguccacaccagauacuagauggcgaaaacuguacacucaucgacgcucugcuuggggauccgcagugcgacggauuucagaauaaaaagugggaucuguucguggagaggggcaaagccuauagcaacuguuaccccuaugacgucccugauuacgcauccuugcggucucucguggccucgucagguacccuggaauuuaauaacgagagcuucaauuggacugggguuacacaaaacggaaccaguuccgcuugcauucgccgaucuaauaacagcuuuuucucccgucugaauuggcucacgcauuuaaacuuuaaguauccagcacugaacgugacuaugcccaauaacgagcaguucgacaaacuuuacaucuggggcguccaccauccuggcaccgauaaagaccagaucuuuuuguaugcccagucaagugggagaauuacagugagcacuaagaggucucaacaggcuguaauaccaaauauuggaucccggccccgcaucagaaacauuccuucaaggaucagcaucuacuggaccauuguuaaaccaggugauauacugcuaaucaauaguacaggcaaccucauugccccgcggggguacuucaagauccgcucuggaaaauccagcauaaugcgaucggacgcgcccauuggcaaguguaagucugaaugcaucaccccuaaugguuccaucccaaacgacaaacccuuucagaaugugaacagaauuacguauggggcauguccuagguacgucaagcagucaacucugaaacuugccacaggaaugcggaaugugccagagaagcaaacccguggcaucuucggcgcuauugccggguuuauagaaaacggaugggaggguaugguggauggcugguauggguuccgccaccagaauagugagggaagaggccaggcagcugaccugaaaagcacucaagccgcgaucgaucagauuaacgguaaguugaauaggcucaucgggaaaacaaacgaaaaguuccaccagaucgagaaggaauuuuccgaggucgaaggccggauucaggaccuggagaaauacguugaggauaccaagauagacuuauggucuuauaacgccgaacugcucguggcacuugagaaucaacauacgaucgaucugaccgacagcgaaaugaacaaauuguucgagaagacaaagaagcagcuacgagaaaaugcugaggauaugggaaacggcugcuuuaagauuuaccacaaaugugacaaugccugcaucgggucaauucgcaacggaacuuaugaucaugacguauacagagacgaggcucugaauaacagguuccagaucaaggguguggaacucaaaaguggcuacaaggauuggauacuguggaucuccuuugccauuagcugcuuccuucugugugucgcauugcucggguuuaucaugugggccugccagaaaggaaauauucgguguaacaucugcauauga

SEQ ID NO: 137611 - RNA, 1701 nt, Artificial Sequence; identical to SEQ ID NO: 134863
  derived and/or modified CDS sequence (opt3) from hemagglutinin__InfluenzaA__AFN19709

SEQ ID NO: 137612 - RNA, 1701 nt, Artificial Sequence
  derived and/or modified CDS sequence (opt3) from hemagglutinin__InfluenzaA__AFN19719
augaaggccauccuggugguccuccuuuacaccuucgcuacagcaaacgccgacacucugugcauuggcuaucacgcgaauaacagcacggauaccguugacacaguguuggagaaaaauguaacugugacccauuccgucaacuuacuggaagauaagcacaaugggaaacuauguaagcucagaggaguggcuccccugcaucuugguaaaugcaacauagccggcuggauccuggggaauccugagugugaaucuuugucaacagcaaguagcugguccuacauuguugagaccucuucgucagacaacggaacuugcuauccaggcgauuuuaucgacuacgaggagcucagggagcagcugagcaguguguccucuuucgaacgguuugagauuuucccgaagacaagcuccuggcccaaucacgauucaaacaagggugucaccgccgcuuguccucaugcaggggccaaaaguuuuuauaagaaucugaucuggcucgugaaaaagggaaacagcuacccaaaauuaucuaaguccuauauaaaugacaagggcaaagaaguacugguucuuuggggcauccaccaccccucaacgacugcugaucaacagagcuuguaccagaacgccgacaccuacguguucgucgggacaagucgcuauucuaagaaauuuaagccugagauugcgauccgaccaaaagugcgugaucaggagggaagaaugaauuacuauuggacucugguggaacccggugacaagauuaccuucgaggcaacaggcaaccuagucguuccuagguacgccuuugcuauggaacggaacgccggguccggaaucauaauuagcgauaccccagugcaugacugcaauacgacuugucaaacaccgaaaggcgcaaucaacaccucgcuccccuuccagaauauucacccuaucacuaucgguaagugcccaaaguauguaaaaucuacaaagcugcgccuugcuaccgggcugagaaacgugcccuccauucagucaaggggauuguuuggcgccauagcgggcuucaucgaagggggauggacggguauggucgacggcugguacggguaucaucaccagaaugaacaaggaaguggcuacgccgcagaucucaaaagcacccagaacgcuauugacaagaucacaaauaaagugaacuccguuauagagaagaugaauacucaguuuaccgccguggguaaggaguucaaccaccuggaaaaacggauugagaauuuaaacaagaaagucgaugacggguuccuggauaucuggacauacaaugcugaacuccuugugcuguuggagaacgaacgcacucuagacuaucaugauucuaauguaaagaaccuguacgagaaaguucgaacccagcucaagaacaaugccaaggagaucggcaacggauguuuugaguucuaucacaaaugcgacaauacauguauggaaagcgugaagaacggcaccuacgauuauccuaaauacucagaagaggcaaagcugaauagagaagagauugacggggucaaacuugagaguacuaggguguaucaaauccuggccauuuacuccacggucgcuagcucuuuggugcucguugugucacugggagcgauaaguuuuuggaugugcagcaacgguuccuuacagugccggaucuguauuuga

SEQ ID NO: 137613 - RNA, 1701 nt, Artificial Sequence; identical to SEQ ID NO: 134483
  derived and/or modified CDS sequence (opt3) from hemagglutinin__InfluenzaA__AFN19730

SEQ ID NO: 137614 - RNA, 1701 nt, Artificial Sequence; identical to SEQ ID NO: 134863
  derived and/or modified CDS sequence (opt3) from hemagglutinin__InfluenzaA__AFN19736

SEQ ID NO: 137615 - RNA, 1701 nt, Artificial Sequence
  derived and/or modified CDS sequence (opt3) from hemagglutinin__InfluenzaA__AFN19748
augaaggccauccuggugguccuccuuuacaccuucgcuacagcaaacgccgacacucugugcauuggcuaucacgcgaauaacagcacggauaccguugacacaguguuggagaaaaauguaacugugacccauuccgucaacuuacuggaagauaagcacaaugggaaacuauguaagcucagaggaguggcuccccugcaucuugguaaaugcaacauagccggcuggauccuggggaauccugagugugaaucuuugucaacagcaaguagcugguccuacauuguugagaccucuucgucagacaacggaacuugcuauccaggcgauuuuaucgacuacgaggagcucagggagcagcugagcaguguguccucuuucgaacgguuugagauuuucccgaagacaagcuccuggcccaaucacgauucaaacaagggugucaccgccgcuuguccucaugcaggggccaaaaguuuuuauaagaaucugaucuggcucgugaaaacgggaaacagcuacccaaaguuaucuaaauccuauauaaaugacaagggcaaggaaguacugguucuuuggggcauccaccaccccucaacuaccgcugaucaacagagcuuguaccagaacgccgacacauacguguucgucgggaccagucgcuauucuaaaaaguuuaaaccugagauugcgauccgaccaaaggugcgugaucaggagggaagaaugaauuacuauuggacucugguggaacccggugacaaaauuacauucgaggcaaccggcaaccuagucguuccuagguacgccuuugcuauggaacggaacgccggguccggaaucauaauuagcgauacgccagugcaugacugcaauacuacaugucaaaccccgaagggcgcaaucaacacuucgcuccccuuccagaauauucacccuaucacaaucgguaaaugcccaaaguauguaaagucuaccaaacugcgccuugcuacggggcugagaaacgugcccuccauucagucaaggggauuguuuggcgccauagcgggcuucaucgaagggggauggaccgguauggucgacggcugguacggguaucaucaccagaaugaacaaggaaguggcuacgccgcagaucucaagagcacacagaacgcuauugacaaaaucacuaauaaggugaacuccguuauagagaaaaugaauacccaguuuacagccguggguaaggaguucaaccaccuggaaaagcggauugagaauuuaaacaaaaaggucgaugacggguuccuggauaucuggacuuacaaugcugaacuccuugugcuguuggagaacgaacgcacccuagacuaucaugauucuaauguaaagaaccuguacgagaagguucgaaaccagcucaaaaauaacgccaaggagacaggcaauggauguuuugaguucuaucacaagugcgacaacaccuguauggaaagcgugaaaaauggcacuuacgauuauccuaaguacucagaagaggcaaaacugaacagagaagagaucgacggggucaaacuugagaguacgaggauuuaucaaauccuggccauuuacuccacaguggcuagcucuuugguccucgugguuucacugggagcgauaaguuuuuggaugugcagcaaugguuccuuacagugccggaucuguauuuga

SEQ ID NO: 137616 - RNA, 1701 nt, Artificial Sequence; identical to SEQ ID NO: 134872
  derived and/or modified CDS sequence (opt3) from hemagglutinin__InfluenzaA__AFN19757

SEQ ID NO: 137617 - RNA, 1701 nt, Artificial Sequence; identical to SEQ ID NO: 134863
  derived and/or modified CDS sequence (opt3) from hemagglutinin__InfluenzaA__AFN19768

SEQ ID NO: 137618 - RNA, 1701 nt, Artificial Sequence
  derived and/or modified CDS sequence (opt3) from hemagglutinin__InfluenzaA__AFN19781
augaaggccauccuggugguccuccuuuacaccuucgcuacagcaaacgccgacacucugugcauuggcuaucacgcgaauaacagcacggauaccguugacacaguguuggagaaaaauguaacugugacccauuccgucaacuuacuggaagauaagcacaaugggaaacuauguaagcucagaggaguggcuccccugcaucuugguaaaugcaacauagccggcuggauccuggggaauccugagugugaaucuuugucaacagcaaguagcugguccuacauuguugagaccucuucgucagacaacggaacuugcuauccaggcgauuuuaucgacuacgaggagcucagggagcagcugagcaguguguccucuuucgaacgguuugagauuuucccgaagacaagcuccuggcccaaucacgauucaaacaagggugucaccgccgcuuguccucaugcaggggccaaaaguuuuuauaagaaucugaucuggcucgugaaaaagggaaacagcuacccaaaauuaucuaaguccuauauaaaugacaagggcaaagaaguacugguucuuuggggcauccaccaccccucaacgacugcugaucaacagagcuuguaccagaacgccgacaccuacguguucgucgggacaagucgcuauucuaagaaauuuaagccugagauugcgauccgaccaaaagugcgugaucaggagggaagaaugaauuacuauuggacucugguggaacccggugacaagauuaccuucgaggcaacaggcaaccuagucguuccuagguacgccuuugcuguggaacggaacgccggguccggaaucauaauuagcgauaccccaguacaugacugcaauacgacuugucaaacaccgaaaggcgcaaucaacaccucgcuccccuuccagaauauucacccuaucacuaucgguaagugcccaaaguaugugaaaucuacaaagcugcgccuugcuaccgggcugagaaacguccccuccauucagucaaggggauuguuuggcgccauagcgggcuucaucgaagggggauggacggguaugguggacggcugguacggguaucaucaccagaaugaacaaggaaguggcuacgccgcagaucucaaaagcacccagaacgcuauugacaagaucacaaauaaaguuaacuccgugauagagaagaugaauacucaguuuaccgccgucgguaaggaguucaaccaccuggaaaaacggauugagaauuuaaacaagaaaguggaugacggguuccuggauaucuggacauacaaugcugaacuccuuguacuguuggagaacgaacgcacucuagacuaucaugauucuaauguuaagaaccuguacgagaaagugcgaaaccagcucaagaauaacgccaaggagaucggcaauggauguuuugaguucuaucacaaaugcgacaacaccuguauggaaagcgucaagaauggcacauacgauuauccuaaauacucagaagaggcaaagcugaacagagaagagauugacggggugaaacuugagaguaccaggaucuaucaaauucuggccauauacuccacugucgcuagcucuuuggugcucguugugucacugggagcgaucaguuuuuggaugugcagcaaugguuccuuacagugccggauuuguaucuga

SEQ ID NO: 137619 - RNA, 1701 nt, Artificial Sequence
  derived and/or modified CDS sequence (opt3) from hemagglutinin__InfluenzaA__AFN19791
augaaggccauccuggugguccuccuuuacaccuucgcuauugcaaacgccgacacacugugcauaggcuaucacgcgaauaacagcacugauacgguugacaccguguuggagaaaaauguaacagugacucauuccgucaacuuacuggaagauaagcacaaugggaaacuauguaagcucagaggaguggcuccccugcaucuugguaaaugcaacaucgccggcuggauucuggggaauccugagugugaaucuuugucaaccgcaaguagcugguccuacaucguugagacaucuucgucagacaacggaaccugcuauccaggcgauuuuauuaauuacgaagaacucagggagcagcugagcaguguguccucuuucgaacgguuugagaucuucccgaagacuagcuccuggcccaaccacgacucaaauaagggugucacagccgcuuguccucaugcaggggccaaaaguuuuuauaagaaccugauauggcucgugaaaaagggaaauagcuacccaaaauuaucuaaguccuauaucaacgauaagggcaaagaaguacugguucuuuggggcauucaccaccccucaaccagcgcugaccaacagaguuuguaccagaaugccgaugcguacguguucgucgggacgucuaaguauuccaaaaaguuuaaaccugagaucgcagugcgcccaaaggugcgagaccaggagggacguaugaacuacuauuggacucuggucgaacccggugauaaaauuaccuucgaggccacaggcaaccuacucguuccuagauacgcuuuugccauggaaaggaaugcagggagcggaaucauaauuucggacacuccagugcaugauugcaacaccacaugucaaaccccggagggcgcuaucaauacgucucugcccuuccagaacauucacccuaucacuaucgguaagugcccaaaguauguaaaauccacaaaacuucggcuggccaccggguugcgcaaugugcccucaauucagaguagaggacucuuuggcgcgauagccggcuucaucgaagggggauggacugguauggucgacggcugguacggguaucaucaccagaacgagcaaggaagcggcuacgcagcugaccugaaguccacacagaaugccauugauaagaucaccaacaaaguuaauucugugauagagaagaugaacacgcaguuuaccgcuguggguaaggaguucaaucacuuagagaaaaggauugaaaaccugaauaagaaagucgacgauggguuccucgacaucuggacauacaacgccgagcuucugguguugcuagaaaaugagcggacucuggauuaucaugacagcaacguaaagaaccucuacgagaaaguucgcucacagcugaagaauaacgcaaaggaaaucggcaauggauguuuugaguucuaucacaaaugcgauaacaccuguauggaaagugugaagaauggcacauacgacuauccuaaauacuccgaggaagccaaacuuaaccgagaggagauugauggggucaagcuggaaagcacuagaaucuaucaaauuuuggcuauauacucuaccguggcgucaagucucguccugaucgugagcuuaggagcaauuuccuuuuggaugugcucuaaugguucgcugcagugcaggaucuguaucuga

SEQ ID NO: 137620 - RNA, 1701 nt, Artificial Sequence; identical to SEQ ID NO: 134863
  derived and/or modified CDS sequence (opt3) from hemagglutinin__InfluenzaA__AFN19806

SEQ ID NO: 137621 - RNA, 1701 nt, Artificial Sequence
  derived and/or modified CDS sequence (opt3) from hemagglutinin__InfluenzaA__AFN19808
augaaggccauccuggugguccuccuuuacaccuucgcuacagcaaacgccgacacucugugcauuggcuaucacgcgaauaacagcacggauaccguugacacaguguuggagaagaauguaacugugacccauuccgucaacuuacuggaagauaagcacaaugggaaacuauguaagcucagaggaguggcuccccugcaucuugguaaaugcaacauagccggcuggauccuggggaauccugagugugaaucuuugucaacagcaaacaguuggagcuacauuguugagaccuccucuucggacaauggaacuugcuauccaggcgauuuuaucgacuacgaggagcucagggagcagcugucaagcgugaguuccuucgaacgguuugagauuuucccgaagacaaacucuuggcccaaucacgauagcaacaagggugucaccgccgcuuguccucaugcaggggccaaauccuuuuauaagaaucugaucuggcucgugaaaaagggaaacucauacccaaaauuaaguaagagcuauauaaaugacaagggcaaagaaguacugguucuuuggggcauccaccaccccucuacguccgcugaucaacagucauuguaccagaacgccgacgcguacguguucgucgggacuagccgcuauaguaagaaauuuaagccugagauugcaauccgaccaaaagugcgugaucaggagggaagaaugaacuacuauuggacccugguggaacccggugacaagauuacauucgaggccacuggcaaucuagucguuccuagguacgcuuuugccauggaacggaacgcagggucuggaaucauaauuuccgauaccccagcucaugacugcaauacaaccugucaaacgccgaaaggcgccaucaacacuagccuccccuuccagaauauucacccuaucacaaucgguaagugcccaaaguaugugaacucgaccaaacugcgccuugcgacugggcugagaaauguacccucuauucaguccaggggauuguuuggcgccauagcaggcuucaucgaagggggauggacagguaugguggacggcugguacggguaucaucaccagaacgaacaaggaucaggcuacgcugccgaucucaagaguacccagaaugcuauugacaaaaucacgaacaaggucaauagcgugauagagaaaaugaacacccaguuuacagccguugguaaggaguucaaucaccuggaaaagcggauugagaacuuaaauaaaaagguggaugacggguuccuggauaucuggacuuacaacgcagaacuccuuguccuguuggagaacgaacgcacccuagacuaucaugauuccaaugugaaaaaccuguacgagaagguacgaucucagcucaaaaauaacgccaaggagaucggcaauggauguuuugaguucuaucacaagugcgacaacacauguauggaaagcguuaaaaauggcacuuacgauuauccuaaguacucagaagaggcuaaacugaacagagaagagauugacggggugaaacuugagaguaccaggaucuaucaaauucuggcgauauacuccacagucgcaagcucuuuggugcucgucgugucacugggagccaucaguuuuuggaugugcagcaaugguuccuuacagugccggauuuguaucuga

SEQ ID NO: 137622 - RNA, 1701 nt, Artificial Sequence; identical to SEQ ID NO: 134872
  derived and/or modified CDS sequence (opt3) from hemagglutinin__InfluenzaA__AFN19814

SEQ ID NO: 137623 - RNA, 1701 nt, Artificial Sequence
  derived and/or modified CDS sequence (opt3) from hemagglutinin__InfluenzaA__AFN19816
augaaggccauccuggugguccuccuuuacaccuucgcuacagcaaacgccgacacucugugcauuggcuaucacgcgaauaacagcacggauaccguugacacaguguuggagaaaaauguaacugugacccauuccgucaacuuacuggaagauaagcacaaugggaaacuauguaagcucagaggaguggcuccccugcaucuugguaaaugcaacauagccggcuggauccuggggaauccugagugugaaucuuugucaacagcaaguagcugguccuacauuguugagaccucuucgucagacaacggaacuugcuauccaggcgauuuuaucgacuacgaagaacucagggagcagcugagcaguguguccucuuucgaacgguuugagauuuucccgaagacaagcuccuggcccaaucacgauucaaacaagggugucaccgccgcuuguccucaugcaggggccaaaggauuuuauaagaaucugaucuggcucgugaaaaagggcaacaguuacccaaaauuaagcaagucuuauauaaaugacaagggcaaagaaguacugguucuuugggggauccaccaccccuccacgacugcugaucaacagucauuguaccagaacgccgacaccuacguguucgucggaacaagccgcuauaguaagaaauuuaagccugagauugcgauccgaccaaaagugcgugaucaggaggguagaaugaauuacuauuggacucugguggaacccggcgacaagauuaccuucgaggcaacagggaaccuagucguuccuagguacgccuuugcuauggaacgggaugccggaucuggcaucauaauuuccgacaccccagugcaugacugcaacacgacuugucaaacaccgaaaggugcaaucaauaccagccuccccuuccagaacauucacccuaucacuaucgggaagugcccaaaguauguaaaaucgacaaagcugcgccuugcuaccggacugagaaaugugcccucuauucaguccaggggcuuguuuggcgccauagcgggguucaucgagggagguuggacgggcauggucgaugggugguacggauaucaucaccagaacgaacaaggcucagguuacgccgcagaccucaaaaguacccagaaugcuauugauaagaucacaaacaaagugaauagcguuauagagaagaugaacacucaguuuaccgccguggggaaggaguucaaucaccuggaaaaacggauugagaacuuaaauaagaaagucgacgauggcuuccuggacaucuggacauacaacgcugaacuccuugugcuguuggagaaugaacgcacucuagauuaucaugacuccaacguaaagaaucuguacgagaaaguucgaaaccagcucaagaacaaugccaaggagaucggaaacggcuguuuugaguucuaucacaaaugcgauaauaccuguauggagucugugaagaacgggacauacgacuauccuaaauacagcgaagaggcaaagcugaauagagaagagauugauggagucaaacuugagucaaccaggaucuaucaaauucuggccauauacaguacuguggcuuccagcuugguccucgugguuucucugggugcgaucucauuuuggaugugcaguaacggcagcuuacagugccggauuuguaucuga

SEQ ID NO: 137624 - RNA, 1701 nt, Artificial Sequence
  derived and/or modified CDS sequence (opt3) from hemagglutinin__InfluenzaA__AFN19821
augaaggccauccuggugguccuccuuuacaccuucgcuacagcaaacgccgacacucugugcauuggcuaucacgcgaauaacagcacggauaccguugacacaguguuggagaaaaauguaacugugacccauuccgucaacuuacuggaagauaagcacaaugggaaacuauguaagcucagaggaguggcuccccugcaucuugguaaaugcaacauagccggcuggauccuggggaauccugagugugaaucuuugucaacagcaaguagcugguccuacauuguugagaccucuucgucagacaacggaacuugcuauccaggcgauuuuaucgacuacgaggaacucagggagcagcugagcaguguguccucuuucgaacgguuugagauuuucccgaagacaagcuccuggcccaaucacgauucaaacaagggugucaccgccgcuuguccucaugcaggggccaaaaguuuuuauaagaaucugaucuggcucgugaaaaagggaaacagcuacccaaaauuaucuaaguccuauauaaaugacaagggcaaagaaguacugguucuuuggggcauccaccaccccucaacgacugcugaucaacagagcuuguaccagaacgccgacaccuacguguucgucgggacaagucgcuauucuaagaaacugaagccugagauugcgauccgaccaaaagugcgugaucaggagggaagaaugaauuacuauuggacucuaguggaacccgguggcaagauuaccuuugaggcaacagggaaccucgucguuccuagguacgccuucgcuauggaacggaacgccggauccggcaucauaauuagcgacaccccagugcaugauugcaauacgacuugucaaacaccgaaaggugcaaucaacaccucgcugcccuuucagaauauucacccuaucacuaucgggaagugcccaaaguauguaaaaucuacaaagcugcgccuugcuaccggauugagaaacgugcccuccauucagucaaggggccucuucggcgccauagcgggguuuaucgagggagguuggacgggcauggucgacgggugguacggauaucaucaccagaaugaacaaggcagugguuacgccgcagaccugaaaagcacccagaacgcuauugauaagaucacaaauaaagugaacuccguuauagagaagaugaauacucaguucaccgccguggggaaggaguuuaaccacuuagaaaaacggauugagaaucugaacaagaaagucgacgauggcuuccucgacaucuggacauacaaugcugaacuucugguguugcuagagaacgaacgcacucuggauuaucaugacucuaauguaaagaaccucuacgagaaaguucgaaaccagcugaagaauaacgccaaggagaucggaaauggcuguuucgaauuuuaucacaaaugcgauaacaccuguauggagagcgugaagaaugggacauacgacuauccuaaauacucagaagaggcaaaacuuaacagagaagagauugauggagucaagcuggagaguaccaggaucuaucaaauuuuggccauauacuccacuguggcuagcucucucguccuggugguuucauuaggugcgaucaguuucuggaugugcagcaauggcucccugcagugccggauuuguaucuga

SEQ ID NO: 137625 - RNA, 1701 nt, Artificial Sequence; identical to SEQ ID NO: 134483
  derived and/or modified CDS sequence (opt3) from hemagglutinin__InfluenzaA__AFN19831

SEQ ID NO: 137626 - RNA, 1701 nt, Artificial Sequence
  derived and/or modified CDS sequence (opt3) from hemagglutinin__InfluenzaA__AFN19849
augaaggccauccuggugguccuccuuuacaccuucgcuacagcaaacgccgacacucugugcauuggcuaucacgcgaauaacagcacggauaccguugacacaguguuggagaaaaauguaacugugacccauuccgucaacuuacuggaagauaagcacaaugggaaacuauguaagcucagaggaguggcuccccugcaucuugguaaaugcgacauagccggcuggauccuggggaacccugagugugaaucuuugucaacagcaaguagcugguccuacauuguugagaccucuucgucagauaauggaacuugcuauccaggcgacuuuaucaacuacgaggagcucagggagcagcugagcaguguguccucuuucgaacgguuugagauuuucccgaagacaagcuccuggcccaaucacgauucaaacaagggugucaccgccgcuuguccucaagcaggggccaaaaguuuuuauaagaaucugaucuggcucgugaaaaagggaaacagcuacccaaaauuaucuaaguccuauauaaaugacaagggcaaagaaguacugguucuuuggggcauccaucaccccucaacgagcgcugaucagcagaguuuguaccagaacgccgacgcguacguguucgucgggacuucuaaguauuccaaaaaguuuaaaccugagauugcagugcgcccaaaggugcgagaucaagagggacguaugaauuacuauuggacccuggucgaacccggugacaaaaucacauucgaggccacuggcaaccuacucguuccuagauacgcuuuugccauggaaaggaacgcagggagcggaauuaucauaucggauaccccagugcacgacugcaauacaaccugucagacgccgaagggcgcuauuaacacuucucugcccuuccagaauauccauccuauuacaaucgguaagugcccaaaauauguaaaguccaccaaacuucggcuggccacuggguugcgcaacgugcccucaauccagaguagaggacucuuuggcgcgauugccggcuucauagaagggggauggacagguauggucgacggcugguacggguaucaccaucaaaaugcacagggaagcggcuacgcugccgaucugaaguccacccagaacgcuaucgacaaaauuacgaauaaggugaacucuguuaucgaaaagaugaauacccaguuuacagccguggguaaagaguucaaccacuuagagaagaggauagaaaaucugaacaaaaaggucgaugacggguuccucgauauuuggacuuacaaugcagagcuucugguguugcuagaaaacgagcggacccuggacuaucacgauagcaauguuaaaaaccucuacgaaaagguacgcucacaacugaagaacaaugccaaagagaucggcgacggauguuuugaguucuaucauaagugcgauaacacauguauggaaagugugaaaaauggcacuuacgacuauccuaaguacuccgaggaagcuaaacuuaaccgagaggaaaucgauggggucaagcuggagagcaccagaauuuaucagaucuuggcgauuuacucuacaguggcaucaagucucguccuggugguuagcuuaggagccauauccuuuuggaugugcucuaaugguucgcugcagugcaggaucuguauuuga

SEQ ID NO: 137627 - RNA, 1701 nt, Artificial Sequence
  derived and/or modified CDS sequence (opt3) from hemagglutinin__InfluenzaA__AFN19865
augaaggccauccuggugguccuccuuuacaccuucgcuacagcaaacgccgacacucugugcauuggcuaucacgcgaauaacagcacggauaccguugacacaguguuggagaaaaauguaacugugacccauuccgucaacuuacuggaagauaagcacaaugggaaacuauguaagcucagaggaguggcuccccugcaucuugguaaaugcaacauagccggcuggauccuggggaauccugagugugaaucuuugucaacagcaaguagcugguccuacauuguugagaccucuucgucagacaacggaacuugcuauccaggcgauuuuaucgacuacgaggagcucagggagcagcugagcaguguguccucuuucgaacgguuugagauuuucccgaagacaagcuccuggcccaaucacgauucaaacaagggugucaccgccgcuuguccucaugcaggggccaaaaguuuuuauaagaaucugaucuggcucgugaaaaagggaaacagcuacccaaaauuaucuaaguccuauauaaaugacaagggcaaagaaguacugguucuuuggggcauccaccaccccucaacgacugcugaucaacagagcuuguaccagaacgccgacgcguacguguucgucgggaccagucgcuauucuaagaaauuuaagccugagauugcaauccgaccaaaagugcgugaucaggagggaagaaugaauuacuauuggacacugguggaacccggugacaagauuacuuucgaggccaccggcaaccuagucguuccuagguacgcuuuugccauggaacggaacgcaggguccggaaucauaauuagcgauacacucgugcaugacugcaauaccacgugucaaacuccaaaaggcgcuaucaacacaucgcugccguuccagaauauucaccccaucaccaucgguaagugcccuaaguauguaaaaucuacuaagcugcgccuugccacaggguugagaaacgugccauccauucagucaaggggacucuuuggcgcgauagccggcuucaucgaagggggauggaccgguauggucgacggcugguacggguaucaucaccagaaugaacaaggaaguggcuacgcagcugaucugaaaagcacgcagaacgccauugacaagaucaccaauaaagugaacuccguuauagagaagaugaauacacaguuuacugcuguggguaaggaguucaaccacuuagaaaaacggauugagaaucugaacaagaaagucgaugacggguuccucgauaucuggaccuacaaugccgaacuucugguguugcuagagaacgaacgcacacuggacuaucaugauucuaauguaaagaaccucuacgagaaaguucgaaaccagcugaagaauaacgcaaaggagaucggcaauggauguuuugaguucuaucacaaaugcgacaacacuuguauggaaagcgugaagaauggcaccuacgauuaucccaaauacucagaagaggccaaacuuaacagagaagagauugacggggucaagcuggagaguacaaggaucuaucaaauuuuggcuauauacuccaccguggcgagcucucucguccuggugguuucauuaggagcaaucaguuuuuggaugugcagcaaugguucccugcagugccggauuuguaucuga

SEQ ID NO: 137628 - RNA, 1701 nt, Artificial Sequence
  derived and/or modified CDS sequence (opt3) from hemagglutinin__InfluenzaA__AFN19875
augaaggccauccuggugguccuccuuuacaccuucgcuacagcaaacgccgacacucugugcauuggcuaucacgcgaauaacagcacggauaccguugacacaguguuggagaaaaauguaacugugacccauuccgucaacuuacuggaagauaagcacaaugggaaacuauguaagcucagaggaguggcuccccugcaucuugguaaaugcaacauagccggcuggauccuggggaauccugagugugaaucuuugucaacagcaaguagcugguccuacauuguugagaccucuucgucagacaacggaacuugcuauccaggcgauuuuaucaauuacgaagaacucagggagcagcugagcaguguguccucuuucgaacgguuugagauuuucccgaagacaagcuccuggcccaaccacgacucaaauaagggugucaccgccgcuuguccucaugcaggggagaaaaguuuuuauaagaaccugaucuggcucgugaaaaagggaaauagcuacccaaaauuaucuaaguccuauauaaacgauaagggcaaagagguacugguucuuuggggcauccaccaccccucaacgagcgccgaccaacagaguuuguaccagaaugcugaugccuacguguucgucgggacuucuaaguauuccaaaaaguuuaaaccugagauugcggugcgcccaaaggugcgagaccaggaaggacguaugaacuacuauuggacccuggucgagcccggugauaaaaucacauucgaagcaacuggcaaccuacucguuccuagauacgccuuugcuauggagaggaaugccgggagcggaauuaucauaucggacaccccagugcaugauugcaacacaaccugucaaacgccgaagggcgcaauuaauacuucucugcccuuccagaacauccacccuauuacaaucgguaagugcccaaaauauguaaaguccaccaaacuucggcuggcuacuggguugcgcaaugugcccucaauccagaguagaggacucuuuggcgccauugcgggcuucauagaagggggauggacagguauggucgacggcugguacggguaucaucaccagaacgagcaaggaagcggcuacgccgcagaccugaaguccacccagaaugcuaucgauaaaauuacgaacaagguaaauucuguuaucgagaagaugaacacccaguuuacagccguggguaaagaguucaaucacuuagaaaagaggauagaaaaccugaauaaaaaggucgacgauggguuccucgacauuuggacuuacaacgcugagcuucugguguugcuagaaaaugagcggacccuggauuaucaugacagcaacgugaaaaaccucuacgagaagguucgcucacagcugaagaauaacgccaaagaaaucggcaauggauguuuugaguucuaucacaagugcgauaacacauguauggaaagugugaaaaauggcacuuacgacuauccuaaguacuccgaggaagcaaaacuuaaccgagaggagaucgauggggucaagcuggaaagcaccagaauuuaucaaaucuuggccauuuacucuacaguggcuucaagucucguccuggugguuagcuuaggagcgauauccuuuuggaugugcucuaaugguucgcugcagugcaggaucuguauuuga

SEQ ID NO: 137629 - RNA, 1701 nt, Artificial Sequence
  derived and/or modified CDS sequence (opt3) from hemagglutinin__InfluenzaA__AFN19895
augaaggccauccuggugguccuccuuuacaccuucgcuacagcaaacgccgacacucugugcauuggcuaucacgcgaauaacagcacggauaccguugacacaguguuggagaaaaauguaacugugacccauuccgucaacuuacuggaagauaagcacaaugggaaacuauguaagcucagaggaguggcuccccugcaucuugguaaaugcaacauagccggcuggauccuggggaauccugagugugaaucuuugucaacagcaaguagcugguccuacauuguugagaccucuucgucagacaacggaacuugcuauccaggcgauuuuaucgacuacgaagaguugagggagcagcugagcaguguguccucuuucgaacgguuugagauuuucccgaagacaagcuccuggcccaaucacgauucaaacaagggugucaccgccgcuuguccucaugcaggggccaaaaguuuuuauaagaaucugaucuggcucgugaaaaagggaaacagcuacccaaaaauaucuaaguccuauaucaaugacaagggcaaagaaguauuaguucuguggggcauucaccaccccucaacgacugcugaucaacagagccuuuaccagaacgccgacaccuacguguucgucgggacaagucgcuauucuaagaaauuuaagccugagaucgcgauucgaccaaaagugcgugaucaggagggaagaaugaauuacuauuggacuuugguggaacccggugacaagaucaccuucgaggcaacaggcaaccuggucguuccuagguacgccuuugcuauggaacggaacgccggguccggaauaauuaucagcgauaccccagugcaugacugcaauacgacuugucaaacaccgaaaggcgcaauuaacaccucgcuacccuuccagaauauccacccuaucacuauuggucgcugcccaaaguauguaaagucuacaaaacucagacuggcuaccgggcuuaggaacgugcccuccauacagucacggggacuguuuggcgccaucgcgggcuucauugaagggggauggacggguauggucgacggcugguacggguaucaucaccagaaugaacaaggaaguggcuacgccgcagaucucaagagcacccagaacgcuaucgacaaaauaacaaauaaggugaacuccguuauugagaaaaugaauacucaguuuaccgccguggguaaggaguucaaccaccucgaaaagcgcaucgagaaucugaacaaaaaggucgaugacggguucuuagauaucuggacauacaaugcugaacugcucgugcuucuggagaacgaacgaacuuuggacuaucaugauucuaauguuaaaaaccuauacgagaagguaagaaaccagcugaaaaauaacgccaaggagaccggcaauggauguuuugaguucuaucacaagugcgacaacacauguauggagagcgugaaaaauggcaccuacgauuauccuaaguacucagaagaggcaaaacucaacagggaagucauugacggggugaagcuggagaguacucggaucuaucaaauucuugccauauacuccacggucgcuagcucucugguguugguugugucacucggagcgaucaguuuuuggaugugcagcaaugguucccugcagugccguauuuguaucuga

SEQ ID NO: 137630 - RNA, 1701 nt, Artificial Sequence
  derived and/or modified CDS sequence (opt3) from hemagglutinin__InfluenzaA__AFN19905
augaaggccauccuggugguccuccuuuacaccuucgcuacagcaaacgccgacacucugugcauuggcuaucacgcgaauaacagcacggauaccguugacacaguguuggagaaaaauguaacugugacccauuccgucaacuuacuggaagauaagcacaaugggaaacuauguaagcucagaggaguggcuccccugcaucuugguaaaugcaacauagccggcuggauccuggggaauccugagugugaaucuuugucaacagcaaguagcugguccuacauuguugagaccucuucgucagacaacggaacuugcuauccaggcgauuuuaucgacuacgaagaacucagggagcagcugagcaguguguccucuuucgaacgguuugagauuuucccgaagacaagcuccuggcccaaucacgauucaaacaagggugucaccgccgcuuguccucaugcaggggccaaaggauuuuauaagaaucugaucuggcucgugaaaaagggcaacaguuacccaaaauuaagcaagucuuauauaaaugacaagggcaaagaaguacugguucuuugggggauccaccaccccuccacgacugcugaucaacagucauuguaccagaacgccgacaccuacguguucgucggaacaagccgcuauaguaagaaauuuaagccugagauugcgauccgaccaaaagugcgugaucaggaggguagaaugaauuacuauuggacucugguggaacccggcgacaagauuaccuucgaggcaacagggaaccuagucguuccuagguacgccuuugcuauggaacggaacgccggaucuggcaucauaauuuccgauaccccagugcaugacugcaauacgacuugucaaacaccgaaaggugcaaucaacaccagccuccccuuccagaauauucacccuaucacuaucgggaagugcccaaaguauguaaaaucgacaaagcugcgccuugcuaccggacugagaaacgugcccucuauucaguccaggggcuuguuuggcgccauagcgggguucaucgagggagguuggacgggcauggucgacgggugguacggauaucaucaccagaaugaacaaggcucagguuacgccgcagaucucaaaaguacccagaacgcuguggacaagauuacaaauaaaguuaacagcgugaucgagaagaugaauacucaguuuaccgccgucgggaaggaguucaaccaccuggaaaaacggauagagaauuuaaacaagaaaguggaugacggcuuccuggauauuuggacauacaaugcugaacuccuuguacuguuggagaacgaacgcacucuagacuaucaugauuccaauguuaagaaccuguacgagaaagugcgaaaccagcucaagaauaacgccaaggagaucggaaauggcuguuuugaguucuaucacaaaugcgacaacaccuguauggagucugucaagaaugggacauacgauuauccuaaauacagcgaagaggcaaagcugaacagagaaaagaucgacggagugaaacuugagucaaccaggauuuaucaaauccuggccauuuacaguacugucgcuuccagcuuggugcucauaguuucucugggugcgaucucauuuuggaugugcaguaauggcagcuuacagugccggauuuguaucuga

SEQ ID NO: 137631 - RNA, 1701 nt, Artificial Sequence
  derived and/or modified CDS sequence (opt3) from hemagglutinin__InfluenzaA__AFN19915
augaaggccauccuggugguccuccuuuacaccuucgcuacagcaaacgccgacacucugugcauuggcuaucacgcgaauaacagcacggauaccguugacacaguguuggagaaaaauguaacugugacccauuccgucaacuuacuggaagauaagcacaaugggaaacuauguaagcucagaggaguggcuccccugcaucuugguaaaugcaacauagccggcuggauccuggggaauccugagugugaaucuuugucaacagcaaguagcugguccuacauuguugagaccucuucgucagacaacggaacuugcuauccaggcgauuuuaucaauuacgaagaacucagggagcagcugagcaguguguccucuuucgaacgguuugagauuuucccgaagacaagcuccuggcccaaccacgacucaaauaagggugucaccgccgcuuguccucaagcaggggccaaaaguuuuuauaagaaccugaucuggcucgugaaaaagggaaauagcuacccaaaauuaucuuccucauauauaaacgauaagggcaaggaaguacugguucuuuggggcauccaucaccccagcacgagugcugaccagcagucuuuguaccagaaugccgaugcguacguguucgucgggacuuccgaguauagcaaaaaguuuaaaccugagauugcagugcgcccaaaggugcgagaccaagaaggacguaugaacuacuauuggacccuggucgagcccggugauaaaaucacauucgaagccacuggcaaccuacucguuccuagauacgcuuuugccauggagaggaaugcagggucgggaauuaucauaucugacaccccagugcacgauugcaacacaaccugucagacgccgaagggcgcuauuaauacuucccugcccuuccagaacauccauccuauuacaaucgguaaaugcccaaaguauguaaagucaaccaaacuucggcuggccacuggguugcgcaaugugcccaguauccagagcagaggacucuuuggcgcgauugccggcuucauagaagggggauggacagguauggucgacggcugguacggguaucaccaucaaaacgcacagggauccggcuacgcugccgaccugaagucuacccagaaugcuaucgauaaaauuacgaacaaggugaauagcguuaucgagaaaaugaacacccaguuuacagccguggguaaggaguucaaucacuuagaaaagaggauagagaaccugaauaaaaaggucgacgauggguuccucgacauuuggacuuacaacgcagaacuucugguguugcuagagaaugaacggacccuggauuaucacgacucaaacguuaaaaaccucuacgagaagguacgcagucaacugaaaaauaacgccaaggagaucggcaauggauguuuugaguucuaucauaagugcgauaacacauguauggaguccgugaaaaauggcacuuacgacuauccuaaguacagcgaagaggcuaaacuuaaccgagaagagaucgauggggucaagcuggagucuaccagaauuuaucagaucuuggcgauuuacucaacaguggcaaguagccucguccuggugguuuccuuaggagccauaucuuuuuggaugugcucgaaugguagccugcagugcaggaucuguauuuga

SEQ ID NO: 137632 - RNA, 1701 nt, Artificial Sequence
  derived and/or modified CDS sequence (opt3) from hemagglutinin__InfluenzaA__AFN19922
augaaggccauccugguggucguucucuacaccuucgcuacagcaaacgccgacacucuuugcauuggcuaucacgcgaauaacagcacggauaccguggacacaguacuggagaaaaaugugacugucacccauuccgugaacuuguuagaagauaagcacaaugggaaacuguguaagcuaagaggaguugcuccccuccaucuggguaaaugcaacauagccggcuggauccuugggaauccugagugugaaucucugucaacagcaaguagcugguccuacauuguggagaccucuucgucagacaacggaacuugcuauccaggcgauuuuaucgacuacgaagaguugagggagcagcucagcagugucuccucuuucgaacgguuugagauuuucccgaagacaagcuccuggcccaaucacgauucaaacaagggugugaccgccgcuuguccucaugcaggggccaaaggauuuuauaagaaucugaucuggcugguuaaaaagggcaacaguuacccaaaacucagccgcucuuauauaaaugacaagggcaaggaaguauuagugcugugggggauccaccaccccuccacgacugcugaucaacagucacuuuaccagaacgccgacaccuacgucuucgugggaacaagccgauauaguaaaaaguuuaaaccugagauugcgauccguccaaaggugagagaucaggaggguaggaugaauuacuauuggacuuuggucgaacccggcgacaaaauuaccuucgaggcaacagggaaccugguugugccucgguacgccuuugcuauggaacgcaacgccggaucuggcaucauaauuuccgauaccccagcacaagacugcaauacgacuugucagacaccgaagggugcuaucaacaccagccuacccuuccagaauauucauccuaucacuaucgggaaaugcccaaaguauguaaagucgacaaaacucagacuggccaccggacuuaggaacgugcccucuauucagucccggggccuguuuggcgcgauagccggguucaucgagggagguuggacgggcauggucgacgggugguacggauaucaccaucaaaaugaacagggcucagguuacgcagcugauuugaagaguacccagaacgccauugacaaaaucacaaauaaggugaacagcguuauagagaaaaugaauacucaguuuaccgcuguggggaaggaguucaaccaccucgaaaagcgcauugagaaucugaacaaaaaggucgaugacggcuucuuagauaucuggacauacaaugccgaacugcucgugcuucuggagaacgaacgaacuuuggacuaucacgauuccaauguuaaaaaccuauacgagaagguaagaaaccaacugaaaaauaacgcaaaggagaucggaaauggcuguuuugaguucuaucauaagugcgacaacaccuguauggaaucugugaaaaaugggacauacgauuauccuaaguacagcgaagaggccaaacucaacagggaagagauugacggagucaagcuggagucaacccggaucuaucagauucuugcuauauacaguacuguggcguccagccuggucuuggugguuucucucggugcaaucucauuuuggaugugcaguaauggcagccugcagugccguauuuguaucuga

SEQ ID NO: 137633 - RNA, 1701 nt, Artificial Sequence; identical to SEQ ID NO: 134502
  derived and/or modified CDS sequence (opt3) from hemagglutinin__InfluenzaA__AFN19931

SEQ ID NO: 137634 - RNA, 1701 nt, Artificial Sequence
  derived and/or modified CDS sequence (opt3) from hemagglutinin__InfluenzaA__AFN19941
augaaggccauccuggugguccuccuuuacaccuucgcuacagcaaacgccgacacucugugcauuggcuaucacgcgaauaacagcacggauaccguugacacaguguuggagaaaaauguaacugugacccauuccgucaacuuacuggaagauaagcacaaugggaaacuauguaagcucagaggaguggcuccccugcaucuugguaaaugcaacauagccggcuggauccuggggaauccugagugugaaucuuugucaacagcaaguagcugguccuacauuguugagaccucuaucucggacaacggaacuugcuauccaggcgauuuuauuaauuacgaggagcucagggagcagcugucaagcgugaguuccuucgaacgguuugagaucuucccgaagacaucuagcuggcccaaccacgacuccaauaagggugucaccgccgcuuguccucaagcaggggccaaaucauuuuauaagaaccugauauggcucgugaaaaagggaaauaguuacccaaaauuaagcaagucuuauaucaacgauaagggcaaagaaguacugguucuuuggggcauucaucaccccuccacgucagcugaccagcagagcuuguaccagaaugccgaugcguacguguucgucgggacuuccaaguauucuaaaaaguuuaaaccugagaucgcagugcgcccaaaggugcgagaccaagagggacguaugaacuacuauuggacccuggucgaacccggugauaaaauuacauucgaggccacuggcaaccuacucguuccuagauacgcuuuugccauggaaaggaaugcaggguccggaaucauaauuagcgacaccccagugcacgauugcaacacaaccugucagacgccgaagggcgcuaucaauacuucgcugcccuuccagaacauucauccuaucacaaucgguaagugcccaaaauauguaaagucuaccaaacuucggcuggccacuggguugcgcaaugugcccuccauucagucaagaggacucuuuggcgcgauagccggcuucaucgaagggggauggacagguauggucgacggcugguacggguaucaccaucaaaacgcacagggaaguggcuacgcugccgaccugaaaagcacccagaaugcuauugauaaaaucacgaacaaggugaauaguguuauagaaaagaugaacacccaguuuacagccguggguaaagaguucaaucacuuagagaagaggauugaaaaccugaauaaaaaggucgacgauggguuccucgacaucuggacuuacaacgcagagcuucugguguugcuagaaaaugagcggacccuggauuaucacgacucuaacguaaagaaccucuacgaaaagguucgcagccaacugaagaauaacgccaaagagaucggcaauggauguuuugaguucuaucauaagugcgauaacacauguauggaaucagugaaaaauggcacuuacgacuauccuaaguacagugaggaagcuaaacuuaaccgagaggaaauugauggggucaagcuggaguccaccagaaucuaucagauuuuggcgauauacagcacaguggcaucuucacucguccuggugguuaguuuaggagccaucagcuuuuggaugugcuccaaugguucucugcagugcaggauuuguaucuga

SEQ ID NO: 137635 - RNA, 1701 nt, Artificial Sequence
  derived and/or modified CDS sequence (opt3) from hemagglutinin__InfluenzaA__AFN19951
augaaggccauccuggugguccuccuuuacaccuucgcuacagcaaacgccgacacucugugcauuggcuaucacgcgaauaacagcacggauaccguugacacaguguuggagaaaaauguaacugugacccauuccgucaacuuacuggaagauaagcacaaugggaaacuauguaagcucagaggaguggcuccccugcaucuugguaaaugcaacauagccggcuggauccuggggaauccugagugugaaucuuugucaacagcaaguagcugguccuacauuguugagaccucuucgucagacaacggaacuugcuauccaggcgauuuuaucgacuacgaggagcucagggagcagcugagcaguguguccucuuucgaacgguuugagauuuucccgaagacaagcuccuggcccaaucacgauucaaacaagggugucaccgccgcuuguccucaugcaggggccaaaaguuuuuauaagaaucugaucuggcucgugaaaaagggaaacagcuacccaaaauuaucuaaguccuauauaaaugacaagggcaaagaaguacugguucuuuggggcauccaccaccccucaacgacugcugaucaacagagcuuguaccagaacgccgacaccuacguguucgucgggacaagucgcuauucuaagaaauuuaagccugagauugcgauccgaccaaaagugcgugaucaggagggaagaaugaauuacuauuggacucugguggaacccggugacaagauuaccuucgaggcaacaggcaaccuagucguuccuagguacgccuuugcuauggaacggaacgccggguccggaaucauaauuagcgauaccccagugcaugacugcaauacgacuugucaaacaccgaaaggcgcaaucaacaccucgcuccccuuccagaauauucacccuaucacuaucgguaagugcccaaaguauguaaaaucuacaaagcugcgccuugcuaccgggcugagaaacgugcccuccauucagucaaggggauuguuuggcgccauagcgggcuucaucgaagggggauggacggguauggucgacggcugguacggguaucaucaccagaaugaacaaggaaguggcuacgccgcagaucucaaaagcacccagaacgcuauugacaagaucacaaauaaagugaacuccguuauagagaagaugaauacucaguuuaccgccguggguaaggaguucaaccaccuggaaaaacggauugagaauuuaaacaagaaagucgaugacggguuccuggauaucuggacauacaaugcugaacuccuugugcuguuggagaacgaacgcacucuagacuaucaugauucuaauguaaagaaccuguacgagaaaguucgaaaccagcucaagaauaacgccaaggagaccggcaauggauguuuugaguucuaucacaaaugcgacaacacauguauggaaagcgugaagaauggcaccuacgauuauccuaaauacucagaagaggcaaagcugaacagagaagagaucgacggggucaaacuugagaguacuaggauuuaucaaauccuggccauuuacuccacggcugcgagcucuuuggugcucgucgugucacugggagcaauaaguuuuuggaugugcagcaaugguuccuuacagugccggaucuguauuuga

SEQ ID NO: 137636 - RNA, 1701 nt, Artificial Sequence; identical to SEQ ID NO: 134863
  derived and/or modified CDS sequence (opt3) from hemagglutinin__InfluenzaA__AFN19966

SEQ ID NO: 137637 - RNA, 1701 nt, Artificial Sequence
  derived and/or modified CDS sequence (opt3) from hemagglutinin__InfluenzaA__AFN19972
augaaggccauccuggugguccuccuuuacaccuucgcuacagcaaacgccgacacucugugcauuggcuaucacgcgaauaacagcacggauaccguugacacaguguuggagaaaaauguaacugugacccauuccgucaacuuacuggaagauaagcacaaugggaaacuauguaagcucagaggaguggcuccccugcaucuugguaaaugcaacauagccggcuggauccuggggaauccugagugugaaucuuugucaacagcaaguagcugguccuacauuguugagaccucuucgucagacaacggaacuugcuauccaggcgauuuuaucgacaaugaggagcucagggagcagcugagcaguguguccucuuucgaacgguuugagauuuucccgaagacaagcuccuggcccaaccacgauucaaauaagggugucaccgccgcuuguccucaugcaggggccaaaaguuuuuacaagaaccugaucuggcucgugaaaaagggaaauagcuauccaaaauuaucuaaguccuacauaaacgacaagggcaaagaaguacugguucuuuggggcauccaccaccccucaacgacugcugaucaacagagcuuguaucagaaugccgacaccuacguguucgucgggacaagucgcuacucuaagaaauuuaagccugagauugcgauccgaccaaaagugcgugaucaggagggaagaaugaacuauuacuggacucugguggaacccggugacaagauuaccuucgaggcaacaggcaaccuagucguuccuagguaugccuuugcuauggaacggaaugccggguccggaaucauaauuagcgauaccccagugcaugacugcaacacgacuugucaaacaccgaaaggcgcaaucaauaccucgcuccccuuccagaacauucacccuaucacuaucgguaagugcccaaaguacguaaaaucuacaaagcugcgccuugcuaccgggcugagaaaugugcccuccauucagucaaggggauuguuuggcgccauagcgggcuucaucgaagggggauggacggguauggucgacggcugguauggguaccaucaccagaacgaacaaggaaguggcuaugccgcagaucucaaaagcacccagaaugcuauugacaagaucacaaacaaaguuaauuccgugauagagaagaugaacacucaguuuaccgccguggguaaggaguucaaucaccuggaaaaacggauugagaacuuaaauaagaaagucgaugacggguuccuggauaucuggacauacaacgcugaacuccuugugcuguuggagaaugaacgcacucuagacuaccaugauucuaacguaaagaaccuguaugagaaaguucgaaaucagcucaagaacaaugccaaggagaucggcaacggauguuuugaguucuaccacaaaugcgacaauaccuguauggaaagcgugaagaacggcacauaugauuacccuaaauauucagaagaggcaaagcugaauagagaagagauugacggggucaaacuugagaguaccaggguguaccaaauccuggccauuuauuccacugucgcuagcucuuuggugcucguugugucacugggagcgauaaguuuuuggaugugcagcaacgguuccuuacagugccggaucuguauuuga

SEQ ID NO: 137638 - RNA, 1701 nt, Artificial Sequence
  derived and/or modified CDS sequence (opt3) from hemagglutinin__InfluenzaA__AFN19978
augaaggccauccugguggucaugcucuacaccuucgcuacagcaaacgccgacacucuuugcauuggcuaucacgcgaauaacagcacggauaccguugacacagugcuggagaaaaauguaacugugacccauuccgucaacuuguuagaagauaagcacaaugggaaacuguguaagcuaagaggaguggcuccccuccaucuggguaaaugcaacauagccggcuggauccuugggaauccugagugugaaucucugucaacagcaaguagcugguccuacauuguugagaccucuucgucagacaacggaacuugcuauccaggcgauuuuaucgacuacgaagaguugagggagcagcucagcaguguguccucuuucgaacgguuugagauuuucccgaagacaagcuccuggcccaaucacgauucaaacaagggugucaccgccgcuuguccucaugcaggggccaaaggauuuuauaagaaucugaucuggcuggugaaaaagggcaacaguuacccaaaacucagcaagucuuauauaaaugacaagggcaaagaaguauuaguucugugggggauccaccaccccuccacgacugcugaucaacagucacuuuaccagaacgccgacaccuacguguucgucggaacaagccgcuauaguaagaaauuuaagccugagauugcgauccgaccaaaagugcgugaucaggaggguagaaugaauuacuauuggacuuugguggaacccggcgacaagauuaccuucgaggcaacagggaaccuggucguuccuagguacgccuuugcuauggaacggaacgccggaucuggcaucauaauuuccgauaccccagugcaugacugcaauacgacuugucaaacaccgaaaggugcaaucaacaccagccuacccuuccagaauauucacccuaucacuaucgggaagugcccaaaguauguaaaaucgacaaagcuccgccuggcuaccggacuuagaaacgugcccucuauucaguccaggggccuguuuggcgccauagcgggguucaucgagggagguuggacgggcauggucgacgggugguacggauaucaucaccagaaugaacaaggcucagguuacgccgcagauuugaaaaguacccagaacgcuauugacaagaucacaaauaaagugaacagcguuauagagaagaugaauacucaguuuaccgccguggggaaggaguucaaccaccucgaaaaacggauugagaaucugaacaagaaagucgaugacggcuucuuagauaucuggacauacaaugcugaacugcucgugcuucuggagaacgaacgcacuuuggacuaucaugauuccaauguaaagaaccuauacgagaaaguucgaaaccagcugaagaauaacgccaaggagaucggaaauggcuguuuugaguucuaucacaaaugcgacaacaccuguauggaaucugugaagaaugggacauacgauuauccuaaauacagcgaagaggcaaagcucaacagagagaaaauugacggagucaagcuggaaucaaccaggaucuaucaaauucuugccauauacaguacuguggcuuccagccuggucuuggugguuucucucggugcgaucucauuuuggaugugcaguaauggcagccugcagugccggauuuguaucuga

SEQ ID NO: 137639 - RNA, 1701 nt, Artificial Sequence; identical to SEQ ID NO: 134863
  derived and/or modified CDS sequence (opt3) from hemagglutinin__InfluenzaA__AFN19983

SEQ ID NO: 137640 - RNA, 1701 nt, Artificial Sequence
  derived and/or modified CDS sequence (opt3) from hemagglutinin__InfluenzaA__AFN19993
augaaggccauccuggugguccuccuuuacaccguugcuacaacuaacgcagacacgcugugcauuggcuaucacgccaauaacagcaccgauacaguggacacuguauuggagaaaaaugugaccgucacacauuccgugaacuuacuggaagauaagcacaaugggaaacuauguaagcucagaggaguugcgccccugcaucuugguaaaugcaacauagcuggcuggauccuggggaauccugagugugaaucuuugucaaccgccaguagcugguccuacauuguggagacuucuucgucagacaacggaacaugcuauccaggcgauuucaucgacuacgaggaacucagggagcagcugagcagugucuccucuuuugaacgguucgagauuuuuccgaagaccagcuccuggcccaaucacgauucaaacaagggugugacggcagccuguccucaugcuggggcaaaaggauucuauaagaaucugaucuggcucguuaaaaagggcaacaguuacccaaaauuaagcaagucuuauauaaaugacaagggcaaagaaguacuggugcuuugggggauccaccaccccuccacuaccgccgaucaacagucauuguaccagaacgcugacacauacgucuuugugggaacuagccgcuauaguaagaaauucaagccugagauugccauccgaccaaaagugcgugaucaggaggguagaaugaauuacuauuggacccuggucgaacccggcgacaagauuacauuugaggcgaccgggaaccuaguugugccuagguacgcauucgccauggaacggaacgcuggaucuggcaucauaauuuccgauacgccaguacaugacugcaauacuacaugucaaaccccgaaaggugccaucaacacuagccuccccuuucagaauauucacccuaucacaaucgggaagugcccaaaguaugugaaaucgaccaagcugcgccuugcaacgggacugagaaacguccccucuauucaguccaggggcuuguucggcgcuauagccggguuuaucgagggagguuggaccggcaugguggacgggugguacggauaucaucaccagaaugaacaaggcucagguuacgcggccgaucucaaaaguacacagaacgcaauugacaagaucacuaauaaaguuaacagcgugauagagaagaugaauacccaguucacagcugucgggaaggaguuuaaccaccuggaaaaacggauugagaauuuaaacaagaaaguggaugacggcuuccuggauaucuggacuuacaaugccgaacuccuuguacuguuggagaacgaacgcacccuagacuaucaugauuccaauguuaagaaccuguacgagaaagugcgaaaccagcucaagaauaacgcuaaggagaucggaaauggcuguuucgaauuuuaucacaaaugcgacaacacauguauggagucugucaagaaugggaccuacgauuauccuaaauacagcgaagaggccaagcugaacagagaagagauugacggagugaaacuugagucaacuaggaucuaucaaauucuggcaauauacaguacggucgccuccagcuuggugcucguugugucucugggugcuaucucauucuggaugugcaguaauggcagcuuacagugccggauuuguaucuga

SEQ ID NO: 137641 - RNA, 1701 nt, Artificial Sequence; identical to SEQ ID NO: 134863
  derived and/or modified CDS sequence (opt3) from hemagglutinin__InfluenzaA__AFN20000

SEQ ID NO: 137642 - RNA, 1701 nt, Artificial Sequence; identical to SEQ ID NO: 134870
  derived and/or modified CDS sequence (opt3) from hemagglutinin__InfluenzaA__AFN20006

SEQ ID NO: 137643 - RNA, 1701 nt, Artificial Sequence; identical to SEQ ID NO: 134502
  derived and/or modified CDS sequence (opt3) from hemagglutinin__InfluenzaA__AFN20012

SEQ ID NO: 137644 - RNA, 1701 nt, Artificial Sequence
  derived and/or modified CDS sequence (opt3) from hemagglutinin__InfluenzaA__AFN20018
augaaggccauccuggugguccuccuuuacaccuucgcuacagcaaacgccgacacucugugcauuggcuaucacgcgaauaacagcacggauaccguugacacaguguuggagaaaaauguaacugugacccauuccgucaacuuacuggaagauaagcacaaugggaaacuauguaagcucagaggaguggcuccccugcaucuugguaaaugcaacauagccggcuggauccuggggaauccugagugugaaucuuugucaacagcaaguagcugguccuacauuguugagaccucuucgucagacaacggaacuugcuauccaggcgauuuuaucaauuacgaggagcucagggagcagcugagcaguguguccucuuucgaacgguuugagauuuucccgaagacaagcuccuggcccaaccacgacucaaauaagggugucaccgccgcuuguccucaagcaggggccaaaaguuuuuauaagaaccugaucuggcucgugaaaaagggaaauagcuacccaaaauuaucuaacuccuauauaaaugauaagggcaaggaaguacugguucuuuggggcauccaucaccccucaacgagcgcugaccagcagaguuuguaccagaacgccgaugcguacguguucgucgggacuucuaaauauuccaagaaauuuaagccugagauugcagugcgcccaaaagugcgagaccaagagggacguaugaacuacuauuggacccuggucgaacccggugauaagaucacauucgaggccacuggcaaucuacucguuccuagauacgcuuuugccauggaaaggaacgcagggagcggaauuaucauaucggacaccccagugcacgauugcaauacaaccugucagacgccgaaaggcgcuauuaacacuucucugcccuuccagaauauccauccuauuacaaucgguaagugcccaaaguauguaaaauccaccaaacuucggcuggccacuggguugcgcaacgugcccucaauccagaguagaggacucuuuggcgcgauugccggcuucauagaagggggauggacagguauggucgacggcugguacggguaucaccaucaaaaugcacagggaagcggcuacgcugccgaccugaaguccacccagaacgcuaucgauaagauuacgaauaaagugaacucuguuaucgaaaagaugaauacccaguuuacagccguggguaaggaguucaaccacuuagagaaaaggauagaaaaucugaacaagaaagucgacgauggguuccucgacauuuggacuuacaaugcagagcuucugguguugcuagaaaacgagcggacccuggauuaucacgacagcaacguaaagaaucucuacgaaaaaguucgcucacaacugaagaacaaugccaaggagaucggcaacggauguuuugaguucuaucauaaaugcgauaauacauguauggaaagugugaagaacggcacuuacgacuauccuaaauacuccgaggaagcuaaacuuaaucgagaggaaaucgauggggucaagcuggagagcaccagaauuuaucagaucuuggcgauuuacucuacaguggcaucaagucucguccuggugguuagcuuaggagccauauccuuuuggaugugcucuaacgguucgcugcagugcaggaucuguauuuga

SEQ ID NO: 137645 - RNA, 1701 nt, Artificial Sequence; identical to SEQ ID NO: 134872
  derived and/or modified CDS sequence (opt3) from hemagglutinin__InfluenzaA__AFN20019

SEQ ID NO: 137646 - RNA, 1701 nt, Artificial Sequence; identical to SEQ ID NO: 134502
  derived and/or modified CDS sequence (opt3) from hemagglutinin__InfluenzaA__AFN20021

SEQ ID NO: 137647 - RNA, 1701 nt, Artificial Sequence; identical to SEQ ID NO: 134872
  derived and/or modified CDS sequence (opt3) from hemagglutinin__InfluenzaA__AFN20034

SEQ ID NO: 137648 - RNA, 1701 nt, Artificial Sequence; identical to SEQ ID NO: 134863
  derived and/or modified CDS sequence (opt3) from hemagglutinin__InfluenzaA__AFN20040

SEQ ID NO: 137649 - RNA, 1701 nt, Artificial Sequence; identical to SEQ ID NO: 137635
  derived and/or modified CDS sequence (opt3) from hemagglutinin__InfluenzaA__AFN20046

SEQ ID NO: 137650 - RNA, 1701 nt, Artificial Sequence; identical to SEQ ID NO: 134872
  derived and/or modified CDS sequence (opt3) from hemagglutinin__InfluenzaA__AFN20052

SEQ ID NO: 137651 - RNA, 1701 nt, Artificial Sequence; identical to SEQ ID NO: 134872
  derived and/or modified CDS sequence (opt3) from hemagglutinin__InfluenzaA__AFN20061

SEQ ID NO: 137652 - RNA, 1701 nt, Artificial Sequence
  derived and/or modified CDS sequence (opt3) from hemagglutinin__InfluenzaA__AFN20076
augaaggccauccuggugguccuccuuuacaccuucgcuacagcaaacgccgacacucugugcauuggcuaucacgcgaauaacagcacggauaccguugacacaguguuggagaaaaauguaacugugacccauuccgucaacuuacuggaagauaagcacaaugggaaacuauguaagcucagaggaguggcuccccugcaucuugguaaaugcaacauagccggcuggauccuggggaauccugacugugagucuuugucaacagcaaguagcugguccuacauuguugaaaccucuucgucagauaacggaacuugcuauccaggcgacuuuaucgauuacgaggaacucagggagcagcugagcaguguguccucuuucgagcgguuugaaauuuucccgaagacaagcuccuggcccaaucacgacucaaacaagggugucaccgccgcuuguccucaugcaggggccaaaaguuuuuauaagaaucugaucuggcucgugaaaaagggaaacagcuacccaaaauuaucuaaguccuauauaaaugauaagggcaaagagguacugguucuuuggggcauccaccaccccucaacgacugcugaccaacagagcuuguaccagaacgccgauaccuacguguucgucgggacaagucgcuauucuaagaaauuuaagccugaaauugcgauccgaccaaaagugcgugaccaggagggaagaaugaauuacuauuggacucugguggagcccggugauaagauuaccuucgaagcaacaggcaaccuagucguuccuagguacgccuuugcuauggagcggaacgccggguccggaaucauaauuagcgacaccccagugcaugacugcaauacgacuugucaaacaccgaaaggcgcaaucaacaccucgcuccccuuccagaauauucacccuaucacuaucgguaagugcccaaaguauguaaaaucuacaaagcugcgccuugcuaccgggcugagaaacgugcccuccauucagucaaggggauuguuuggcgccauagcgggcuucaucgaagggggauggacggguauggucgauggcugguacggguaucaucaccagaaugagcaaggaaguggcuacgccgcagaccucaaaagcacccagaacgcuauugauaagaucacaaauaaagugaacuccguuauagaaaagaugaauacucaguuuaccgccguggguaaggaguucaaccaccuggagaaacggauugaaaauuuaaacaagaaagucgacgauggguuccuggacaucuggacauacaaugcugagcuccuugugcuguuggaaaacgagcgcacucuagauuaucaugacucuaauguaaagaaccuguacgaaaaaguucgaaaccagcucaagaauaacgccaaggagaccggcaauggauguuuugaguucuaucacaaaugcgauaacacauguauggaaagcgugaagaauggcaccuacgacuauccuaaauacucagaggaagcaaagcugaacagagaggaaaucgauggggucaaacuugagaguacuaggauuuaucaaauccuggccauuuacuccacgguggcuagcucuuugguccucgugguuucacugggagcgauaaguuuuuggaugugcagcaaugguuccuuacagugccggaucuguauuuga

SEQ ID NO: 137653 - RNA, 1701 nt, Artificial Sequence
  derived and/or modified CDS sequence (opt3) from hemagglutinin__InfluenzaA__AFN20081
augaaggccauccuggugguccuccuuuacaccuucgcuacagcaaacgccgacacucugugcauuggcuaucacgcgaauaacagcacggauaccguugacacaguguuggagaaaaauguaacugugacccauuccgucaacuuacuggaagauaagcacaaugggaaacuauguaagcucagaggaguggcuccccugcaucuugguaaaugcaacauagccggcuggauccuggggaauccugagugugaaucuuugucaacagcaaguagcugguccuacauuguugagaccucuucgucagacaacggaacuugcuauccaggcgauuuuaucgacuacgaagaguugagggagcagcugagcaguguguccucuuucgaacgguuugagauuuucccgaagacaagcuccuggcccaaucacgauucaaacaagggugucaccgccgcuuguccucaugcaggggccaaaaguuuuuauaagaaucugaucuggcucgugaaaaagggaaacagcuacccaaaaauaucuaaguccuauaucaaugacaagggcaaagaaguauuaguucuguggggcauucaccaccccucaacgacugcugaucaacagagccuuuaccagaacgccgacaccuacguguucgucgggacaagucgcuauucuaagaaauuuaagccugagaucgcgauucgaccaaaagugcgugaucaggagggaagaaugaauuacuauuggacuuugguggaacccggugacaagaucaccuucgaggcaacaggcaaccuggucauaccuagguacgccuuugcuauggaacggaacgccggguccggaauuaucauuagcgauaccccaguucaugacugcaauacgacuugucaaacaccgaaaggcgcaaucaacaccucgcuacccuuccagaauauccacccuauuacuauaggucgcugcccaaaguaugugaagucuacaaaacucagacuggcuaccgggcuuaggaacguacccuccauccagucacggggacuguuuggcgccauugcgggcuucaucgaagggggauggacggguaugguggacggcugguacggguaucaucaccagaaugaacaaggaaguggcuacgccgcagaucucaagagcacccagaacgcuauagacaaaauuacaaauaaggucaacuccgugaucgagaaaaugaauacucaguuuaccgccguugguaaggaguucaaccaccucgaaaagcgcaucgagaaucugaacaaaaagguggaugacggguucuuagauauuuggacauacaaugcugaacugcucguccuucuggagaacgaacgaacuuuggacuaucaugauucuaaugugaaaaaccuauacgagaagguaagaaaccagcugaaaaauaacgccaaggagaccggcaauggauguuuugaguucuaucacaagugcgacaacacauguauggagagcguuaaaaauggcaccuacgauuauccuaaguacucagaagaggcaaaacucaacagggaagugaucgacggggucaagcuggagaguacucggauuuaucaaauacuugccaucuacuccacgguggcuagcucucuggucuuggugguuucacucggagcgauuaguuuuuggaugugcagcaaugguucccugcagugccguaucuguaucuga

SEQ ID NO: 137654 - RNA, 1701 nt, Artificial Sequence; identical to SEQ ID NO: 134872
  derived and/or modified CDS sequence (opt3) from hemagglutinin__InfluenzaA__AFN20092

SEQ ID NO: 137655 - RNA, 1701 nt, Artificial Sequence; identical to SEQ ID NO: 137634
  derived and/or modified CDS sequence (opt3) from hemagglutinin__InfluenzaA__AFN20099

SEQ ID NO: 137656 - RNA, 1701 nt, Artificial Sequence
  derived and/or modified CDS sequence (opt3) from hemagglutinin__InfluenzaA__AFN20112
augaaggccauccuggugguccuccuuuacaccuucgcuacagcaaacgccgacacucugugcauuggcuaucacgcgaauaacagcacggauaccguugacacaguguuggagaaaaauguaacugugacccauuccgucaacuuacuggaagauaagcacaaugggaaacuauguaagcucagaggaguggcuccccugcaucuugguaaaugcaacauagccggcuggauccuggggaauccugaguguaagucuuugucaacagcaaguagcugguccuacauuguugaaaccucuucgucagacaacggaacuugcuauccaggcgauuuuaucgacuacgaggaacucagggagcagcugagcaguguguccucuuucgagcgguuugaaauuuucccgaagacaagcuccuggcccaaucacaacccuaauaaaggugucaccgccgcuuguccacaugcaggggccaagucauuuuauaaaaaccugaucuggcucgugaagaauggaaacaguuaccccaaauuaaauacgagcuauauaaacgauaagggcaaggagguacugguucuuuggggcauccaccacccuucuacuuccgcugaccaacagucauuguaccagaacgccgaugcguacgcauucguggggaccagccgcuauaguaaaaaguuuaaaccagaaauugccauccgacccaagguccgugaccaggagggaagaaugaauuacuauuggacacugguggagccuggugauaaaauuacuuucgaagcuaccggcaaccuaguggucccaagguacgccuuugcaauggagcggaaugcugggucuggaaucauaauuuccgacacaagcguucaugauugcaacaccacgugucaaacuccgaagggcgccaucaauacaucgcuccccuuccagaacgugcacccuauuaccaucgguaaaugcccaaaguauguaaagucuacuaaacugcgccuugcgacagggcugagaaaugugcccuccauccagucaaggggauuguuuggcgccauugcaggcuucauagaagggggauggaccgguauggucgacggcugguacggguaucaucaccagaacgagcaaggaaguggcuacgcugccgaccucaagagcacgcagaaugcuuuugauaaaaucaccaacaagguaaauuccguuauugaaaagaugaacacacaguucacugccguggguaaggaguucaaucaccuggagaagcggaucgaaaacuuaaauaaaaaggucgacgauggguuucuggacauauggaccuacaacgcagagcuccuugugcuguuggaaaacgagcgcacacuagauuaucaugacucuaaugugaaaaaccuguacgaaaagguucgaagccagcucaaaacuaaugccaaggagauuggcaacggauguuucgaguuuuaucacaagugcgauaauaccuguauggaaucagugaaaaacggcacauacgacuauccuaaguacagugaggaagcuaaacugaauagagaggaaaucgauggggucaaacuugaguccaccaggaucuaucaaauucuggcgaucuacagcacuguggcaucuucauugguccucgugguuagucugggagccauuagcuucuggaugugcuccaacgguucuuuacagugccggauauguaucuga

SEQ ID NO: 137657 - RNA, 1701 nt, Artificial Sequence
  derived and/or modified CDS sequence (opt3) from hemagglutinin__InfluenzaA__AFN87924
augaaggccauccuggugguccuccuuuacaccuucgcuacagcaaacgccgacacucugugcauuggcuaucacgcgaauaacagcacggauaccguugacacaguguuggagaaaaauguaacugugacccauuccgucaacuuacuggaagauaagcacaaugggaaacuauguaagcucagaggaguggcuccccugcaucuugguaaaugcaacauagccggcuggauccuggggaauccugagugugaaucuuugucaacagcaaguagcugguccuacauuguugagaccucuucgucagacaacggaacuugcuauccaggcgauuuuaucgacuacgaggaacucagggagcagcugagcaguguguccucuuucgaacgguuugagauuuucccgaagacaagcuccuggcccaaucacgauccuaacaagggugucaccgccgcuuguccacaugcaggggccaaaucauuuuauaagaaucugaucuggcucgugaaaaagggaaacaguuaccccaaauuaagcacgucuuauauaaaugacaagcgcaaggaaguacugguucuuuggggcauccaccacccuuccacuucagcugaucaacagagcuuguaccagaacgccgacgcguacgcauucgugggcaccagucgauauucuaaaaaguuuaaaccagagauugccauccgucccaaggucagagaucaggaggggaggaugaauuacuauuggacacugguggaaccuggagacaaaauuacuuucgaggcuaccgguaaccuaguggucccacgguacgccuuugcaauggaacgcaacgcuggcuccgggaucauaauuagcgauacaucgguucaugacugcaauaccacgugucaaacuccgaagggagccaucaacacaucucuccccuuccagaaugugcacccuauuaccaucggcaaaugcccaaaguauguaaaguccacuaaacugagacuugcgacaggucugaggaacgugcccucaauccagagucggggguuguuuggagccauugcaggcuucauagagggcggguggaccggaauggucgacgguugguacggcuaucaucaccagaaugaacaagggagcggauacgcugccgaucucaaguccacgcagaacgcuuuugacaaaaucaccaauaaggugaacucuguuauugagaaaaugaauacacaguucacugccgugggcaaggaguucaaccaccuggaaaagcgcaucgagaauuuaaacaaaaaggucgaugacgguuuucuggauauauggaccuacaaugcagaacuccuugugcuguuggagaacgaacgaacacuagacuaucaugauagcaauguaaagaaccuguacgagaagguuagaucacagcucaaaaacaaugccaaggagauugggaacggcuguuucgaauuuuaucacaagugcgacaauacuuguauggagagugugaaaaacggaaccuacgauuauccuaaguacuccgaagaggcuaaacugaauagggaagagaucgacggcgucaaacuugagagcacacggaucuaucaaauucuggcgaucuacucuaccguggcaucaaguuugguccucgugguuagccugggggccauuuccuucuggaugugcucuaacggaucguuacagugccguauauguaucuga

SEQ ID NO: 137658 - RNA, 1701 nt, Artificial Sequence; identical to SEQ ID NO: 130717
  derived and/or modified CDS sequence (opt3) from hemagglutinin__InfluenzaA__AFN87926

SEQ ID NO: 137659 - RNA, 1701 nt, Artificial Sequence
  derived and/or modified CDS sequence (opt3) from hemagglutinin__InfluenzaA__AFN87927
augaaggccauccuggugguccuccuuuacaccuucgcuacagcaaacgccgacacucugugcauuggcuaucacgcgaauaacagcacggauaccguugacacaguguuggagaaaaauguaacugugacccauuccgucaacuuacuggaagauaagcacaaugggaaacuauguaagcucagaggaguggcuccccugcaucuugguaaaugcaacauagccggcuggauccuggggaauccugagugugaaucuuugucaacagcaaguagcugguccuacauuguugagaccucuucgucagacaacggaacuugcuauccaggcgauuuuaucgacuacgaggagcucagggagcagcugagcaguguguccucuuucgaacgguuugagauuuucccgaagacaagcuccuggcccaaucacgauucaaacaagggugucaccgccgcuuguccucaugcaggggccaaaaguuuuuauaagaaucugaucuggcucgugaaaaagggaaacagcuacccaaaauuaucuaaguccuauauaaaugacaagcgcaaagaaguacugguucuuuggggcauccaccaccccucaacgagcgcugaucaacagaguuuguaccagaacgccgacgcguacguguucgucggcacuucucgauauuccaagaaauuuaagccugagauugcaauccguccaaaagugagagaucaggaggggaggaugaauuacuauuggacccugguggaacccggagacaagauuacauucgaggccacugguaaccuagucguuccucgguacgcuuuugccauggaacgcaacgcaggcagcgggaucauaauuucgggaaccccagugcaugauugcaauacaaccugucaaacgccgaaaggcgcuaucaacacuucucuccccuuccagaauauucacccuaucacaaucgguaagugcccaaaguauguaaaauccaccaagcugagacuugccacugggcugaggaacgugcccucaauucagagucggggauuguuuggcgcgauagccggcuucaucgaagggggauggacagguauggucgacggcugguacggguaucaucaccagaaugaacaaggaagcggcuacgcagcugaccucaaauccacccagaacgccauugauaagaucacgaaucgcgugaacucuguuauagagaaaaugaauacccaguuuacagcuguggguaaggaguucaaccaccuggaaaagcgaauugagaauuuaaacaaaaaggucgacgauggguuccuggacaucuggacuuacaaugccgaacuccuugugcuguuggagaacgaaagaacccuagauuaucaugacagcaauguaaagaaccuguacgagaagguuaggucacagcucaaaaacaaugcaaaggagaucggcaacggauguuuugaguucuaucacaagugcgauaauacauguauggaaagugugaaaaacggcacuuacgacuauccuaaguacuccgaagaggccaaacugaaucgggaagagauugauggggucaaacuugagagcacccguaucuaucaaauucuggcuauauacucuacaguggcgucaaguuugguccucgugguuagccugggagcaaucuccuuuuggaugugcucuaacgguucguuacagugccgcauuuguaucuga

SEQ ID NO: 137660 - RNA, 1701 nt, Artificial Sequence
  derived and/or modified CDS sequence (opt3) from hemagglutinin__InfluenzaA__AFN87928
augaaggccauccuggugguccuccuuuacaccuucgcuacagcaaacgccgacacucugugcauuggcuaucacgcgaauaacagcacggauaccguugacacaguguuggagaaaaauguaacugugacccauuccgucaacuuacuggaagauaagcacaaugggaaacuauguaagcucagaggaguggcuccccugcaucuugguaaaugcaacauagccggcuggauccuggggaauccugagugugaaucuuugucaacagcaaguagcugguccuacauuguugagaccucuucgucagacaacggaacuugcuauccaggcgauuuuaucgacuacgaggagcucagggagcagcugagcaguguguccucuuucgaacgguuugagauuuucccgaagacaagcuccuggcccaaucacgauucaaacaagggugucaccgccgcuuguccucaugcaggggccaaaaguuuuuauaagaaucugaucuggcucgugaaaaagggaaacagcuacccaaaauuaucuaaguccuauauaaaugacaagggcaaagaaguacugguucuuuggggcauccaccaccccucaacgagcgcugaucaacagaguuuguaccagaacgccgacgcguacguguucgucgggacuucucgcuauuccaagaaauuuaagccugagauugcaauccgaccaaaagugcgugauagagagggaaggaugaauuacuauuggacccugguggaacccggugacaagauuacauucgaggccacuggcaaccuagucguuccucgguacgcuuuugccauggaacgcaacgcagggagcggaaucauaauuucggauaccccagugcaugacugcaauacaaccugucagacgccgaaaggcgcuaucaacacuucucuccccuuccaaaauauucacccuaucacaaucgguaagugcccaaaguauguaaaauccaccaagcugagacuugccacugggcugaggaacgugcccucaauucagagucggggauuguuuggcgcgauagccggcuucaucgaagggggauggacagguauggucgacggcugguacggguaucaucaccagaaugaacagggaagcggcuacgcagcugaucucaaauccacccaaaacgccauugacaagaucacgaauaaagugaacucuguuauagagaagaugaauacccaguuuacagcuguggguaaggaguucaaccaccuggaaaaacgcauugagaauuuaaacaagaaagucgaugacggguuccuggauaucuggacuuacaaugccgaacuccuugugcuguuggagaacgaacgaacccuagacuaucaugauagcaauguaaagaaccuguacgagaaaguuagaucacagcucaagaacaaugcaaaggagaucggcaacggauguuuugaguucuaucacaaaugcgacaauacauguauggaaagugugaagaacggcacuuacgauuauccuaaauacuccgaagaggccaagcugaauagggaagagauugacggggucaaacuugagagcacccggaucuaucagauucuggcuauauacucuacaguggcgucaaguuugguccucgcagugagccugggagccaucuccuuuuggaugugcucuaacgguucguuacaaugccguauuuguaucuga

SEQ ID NO: 137661 - RNA, 1701 nt, Artificial Sequence; identical to SEQ ID NO: 131881
  derived and/or modified CDS sequence (opt3) from hemagglutinin__InfluenzaA__AFN87929

SEQ ID NO: 137662 - RNA, 1701 nt, Artificial Sequence; identical to SEQ ID NO: 131881
  derived and/or modified CDS sequence (opt3) from hemagglutinin__InfluenzaA__AFN87930

SEQ ID NO: 137663 - RNA, 1701 nt, Artificial Sequence
  derived and/or modified CDS sequence (opt3) from hemagglutinin__InfluenzaA__AFN87931
augaaggccauccuggugguccuccuuuacaccuucgcuacagcaaacgccgacacucugugcauuggcuaucacgcgaauaacagcacggauaccguugacacaguguuggagaaaaauguaacugugacccauuccgucaacuuacuggaagagaagcacaaugggaaacuauguaagcucagaggaguggcuccccugcaucuugguaaaugcaacauagccggcuggauccuggggaauccugaaugugagucuuugucaacagcaaguagcugguccuacauuguugaaaccucuucgucagauaacggaacuugcuauccaggcgacuuuaucgauuacgaggagcucagggaacagcugagcaguguguccucuuucgagcgguuugaaauuuucccgaagacaagcuccuggcccaaucacgacucaaacaagggugucaccgccgcuuguccucaugcaggggccaaaaguuuuuauaagaaucugaucuggcucgugaaaaagggaaacagcuacccaaaauuaucuaaguccuauauaaaugauaagggcaaagagguacugguucuuuggggcauccaccaccccucaacgagcgcugaccaacagaguauuuaccagaacgccgaugcguacguguucgucgggacuucucgcuauuccaagaaauuuaagccugagaucgcaauucgaccaaaagugcgugaccaggaaggaagaaugaauuacuauuggaccuugguggagcccggugauaagaucacauucgaagccacuggcaaccuggucguuccuagguacgcuuuuaccauggagcggaacgccgggagcggaauaauuaucucggacacaccagugcaugauugcaauaccacgugucaaacuccgaaaggcgcaauuaacacaucucuacccuuccagaauauccacccuaucaccauugguaagugcccaaaguauguaaaauccacuaagcuccgccuggcuacagggcuuagaaacgugcccucaauacagaguaggggacuguuuggcgccaucgcgggcuucauugaagggggauggaccgguauggucgacggcugguacggguaucaucaccagaaugagcaaggaagcggcuacgccgcagacuugaaauccacgcagaacgcuaucgauaagauaaccaauaaagugaacucuguuauugagaagaugaauacacaguuuacugccguggguaaggaguucaaccaccucgaaaaacggaucgaaaaucugaacaagaaagucgacgauggguucuuagacaucuggaccuacaaugcugagcugcucgugcuucuggaaaacgagcgcacauuggauuaucaugacagcaauguaaagaaccuauacgagaaaguucgaucacagcugaagaacaaugccaaggaaauuggcaacggauguuuugaguucuaucacaaaugcgauaauacuuguauggaaagugugaagaacggcaccuacgacuauccuaaauacuccgaggaagcaaagcucaauagagaggagaucgauggggucaaacuggaaagcacaaggauuuaucaaauacuugccaucuacucuaccguggcuucaagucuggucuuggugguuagccucggagcgauuuccuuuuggaugugcucuaacgguucgcugcagugccggaucuguaucuga

SEQ ID NO: 137664 - RNA, 1701 nt, Artificial Sequence
  derived and/or modified CDS sequence (opt3) from hemagglutinin__InfluenzaA__AFN87932
auggaggccauccuggugguccuccuuuacaccuucgcuacagcaaacgccgacacucugugcauuggcuaucacgcgaauaacagcacggauaccguugacacaguguuggaaaagaauguaacugugacccauuccgucaacuuacuggaggauaaacacaaugggaagcuauguaaacucagaggaguggcuccccugcaucuugguaagugcaacauagccggcuggauccuggggaauccugaaugugagucuuugucaacagcaaguagcugguccuacauuguugaaaccucuucgucagacaacggaacuugcuauccaggcgauuuuaucgacuacgaggagcucagggaacagcugagcaguguguccucuuucgagcgguuugaaauuuucccgaaaacaagcuccuggcccaaucacgauucaaacaagggugucaccgccgcuuguccucaugcaggggccaagaguuuuuauaaaaaucugaucuggcucgugaagaaaggaaacagcuacccaaaguuaucuaaauccuauauaaaugacaagggcaaggagguacugguucuuuggggcauccaccaccccucaacgagcgcugaucaacagaguuuguaccagaacgccgacgcguacguguucgucgggucuucccgcuauagcaaaaaguuuaaaccugagauugcaauccgaccaaaggugcgugauagagaaggaaggaugaauuacuauuggacucugguggagcccggugacaaaauuaccuucgaagccacaggcaaccuagucguuccucgguacgcuuuugccauggagcgcaacgcagggucgggaaucauaauuucugauacuccagugcaugacugcaauaccacaugucagaccccgaagggcgcuaucaacacgucccuccccuuccacaauauucauccuaucacuaucgguaaaugcccaaaguauguaaagucaacaaaacugagacuugccaccgggcugaggaacgugcccaguauucaaagccggggauuguuuggcgcgauagccggcuucaucgaagggggauggacugguauggucgacggcugguacggguaucaccaccagaaugagcagggauccggcuacgcagcugaucucaagucuacacagaacgccauugacgagaucaccaauaaagugaacagcguuauagaaaagaugaauacgcaauuuaccgcuguggguaaagaguucaaccaucuggaaaagcgcauugagaauuuaaacaagaaagucgaugacggguuccuggauaucuggacauacaaugccgaacuccuugugcuguuggagaacgagcgaacucuagacuaucacgauucaaauguaaagaaccuguacgaaaaaguuagaagucagcucaagaacaaugcaaaagagaucggcaacggauguuuugaguucuaucauaagugcgacaauaccuguauggaauccgugaagaacggcacauacgauuauccuaaauacagcgaagaggccaagcugaauagggaggaaauugacggggucaaacuugagucuacucggaucuaucagauucuggcuauauacucaaccguggcgaguagcuugguccucgugguuucccugggagcaaucucuuuuuggaugugcucgaacgguagcuuacagugccguauuuguaucuga

SEQ ID NO: 137665 - RNA, 1701 nt, Artificial Sequence; identical to SEQ ID NO: 131881
  derived and/or modified CDS sequence (opt3) from hemagglutinin__InfluenzaA__AFN87933

SEQ ID NO: 137666 - RNA, 1701 nt, Artificial Sequence
  derived and/or modified CDS sequence (opt3) from hemagglutinin__InfluenzaA__AFN87934
augaaggccauccugguggucaugcucuacaccuucgcuacagcaaacgccgacacucuuugcauuggcuaucacgcgaauaacagcacggauaccguugacacagugcuggagaaaaauguaacugugacccauuccgucaacuuguuagaagauaagcacaaugggaaacuguguaagcuaagaggaguggcuccccuccagcuggguaaaugcaacauagccggcuggauccuugggaauccugagugugaaucucugucaacagcaaguagcugguccuacauuguugagaccucuucgucagacaacggaacuugcuauccaggcgauuuuaucgacuacgaagaguugagggagcaacucagcaguguguccucuuucgaacgguuugagauuuucccgaagacaagcuccuggcccaaucaugauucaaacaagggugucaccgccgcuuguccucacgcaggggccaaaggauuuuauaagaaucugaucuggcuggugaaaaagggcaacaguuacccaaaacucagcaagucuuauauaaaugacaagggcaaagaaguauuaguucugugggggauccaucaccccuccacgucagcugaucagcagagccuuuaccagaacgccgacacuuacguguucgucggaaccagucgcuauucuaagaaauuuaagccugagauugcgauccgaccaaaagugcgugaucaagaggguagaaugaauuacuauuggacauugguggaacccggcgacaagauuacuuucgaggcaaccgggaaccuggucguuccuagguacgccuuugcuauggaacggaacgccggauccggcaucauaauuagcgauacaccagugcacgacugcaauaccacgugucagacuccgaaaggugcaaucaacacaucgcuacccuuccagaauauucauccuaucaccaucgggaagugcccaaaguauguaaaaucuacuaagcuccgccuggcuacaggacuuagaaacgugcccuccauucagucaaggggccuguuuggcgccauagcgggguucaucgagggagguuggaccggcauggucgacgggugguacggauaucaccaucaaaaugaacagggcagugguuacgccgcagauuugaaaagcacgcagaacgcuauugacaagaucaccaauaaagugaacuccguuauagagaagaugaauacacaguuuacugccguggggaaggaguucaaccaccucgaaaaacggauugagaaucugaacaagaaagucgaugacggcuucuuagauaucuggaccuacaaugcugaacugcucgugcuucuggagaacgaacgcacauuggacuaucacgauucuaauguaaagaaccuauacgagaaaguucgaagccaacugaagaacaaugccaaggagaucggaaacggcuguuuugaguucuaucauaaaugcgacaauacuuguauggaaucagugaagaacgggaccuacgauuauccuaaauacagugaagaggcaaagcucaauagagaagagauugacggagucaaacuggaguccacaaggaucuaucagauucuugccauauacagcaccguggcuucuucacuggucuuggugguuagucucggugcgaucagcuuuuggaugugcuccaacggcucucugcagugccggauuuguaucuga

SEQ ID NO: 137667 - RNA, 1701 nt, Artificial Sequence
  derived and/or modified CDS sequence (opt3) from hemagglutinin__InfluenzaA__AFN87936
augaaggccauccuggugguccuccuuuacaccuucgcuacagcaaacgccgacacucugugcauuggcuaucacgcgaauaacagcacggauaccguugacacaguguuggagaagaauguaacugugacccauuccgucaacuuacuggaagauaagcacaaugggaaacuauguaagcucagaggaguggcuccccugcaucuugguaaaugcaacauagccggcuggauccuggggaauccugagugugaaucuuugucaacagcaaguagcugguccuacauuguugagaccucuaucucggacaacggaacuugcuauccaggcgauuuuauugacuacgaggagcucagggagcagcugucaagcgugaguuccuucgaacgguuugagaucuucccgaagacaucuagcuggcccaaucacgauccuaacaagggugucaccgccgcuuguccacaugcaggggccaaauccuuuuauaagaaucugauauggcucgugaaaaagggaaacucauaccccaaauuaaguacgagcuauaucaaugacaagggcaaggaaguacugguucuuuggggcauucaccacccuucuacuuccgcugaucaacagucauuguaccagaacgccgacgcguacgcauucguggggaccagccgcuauaguaaaaaguuuaaaccagagaucgccauucgacccaagguccgugaucaggagggaagaaugaauuacuauuggacacugguggaaccuggugacaaaaucacuuucgaggcuaccggcaaccuaguggucccaagguacgccuuugcaauggaacggaacgcugggucuggaauaauuaucuccgauacaagcguucaugacugcaauaccacgugucaaacuccgaagggcgccauuaacacaucgcuccccuuccagaaugugcacccuaucaccaucgguaaaugcccaaaguauguaaagucuacuaaacugcgccuugcgacagggcugagaauugugcccuccauacagucaaggggauuguuuggcgccaucgcaggcuucauugaagggggauggaccgguauggucgacggcugguacggguaucaucaccagaacgaacaaggaaguggcuacgcugccgaucucaagagcacgcagaaugcuuuugacaaaaucaccaacaagguaaauuccguuauagagaaaaugaacacacaguucacugccguggguaaggaguucaaucaccuggaaaagcggauugagaacuuaaauaaaaaggucgaugacggguuucuggauaucuggaccuacaacgcagaacuccuugugcuguuggagaaugaacgcacacuagacuaucaugauucuaacgugaaaaaucuguacgagaagguucgaagccagcucaaaaacaacgccaaggagaucggcaauggauguuucgaauuuuaucacaagugcgacaacacuuguauggagucagugaaaaauggcaccuacgauuauccuaaguacagugaagaggcuaaacugaacagagaagagauugacggggucaaacuugaguccacaaggaucuaucaaauucuggcgauauacagcaccguggcaucuucauugguccucgugguuagucugggagccaucagcuucuggaugugcuccaaugguucuuuacagugccggauuuguaucuga

SEQ ID NO: 137668 - RNA, 1701 nt, Artificial Sequence
  derived and/or modified CDS sequence (opt3) from hemagglutinin__InfluenzaA__AFN87938
augaaggccauccuggugguccuccuuuacaccuucgcuacagcaaacgccgacacucugugcauuggcuaucacgcgaauaacagcacggauaccguugacacaguguuggagaaaaauguaacugugacccauuccgucaacuuacuggaagauaagcacaaugggaaacuauguaagcucagaggaguggcuccccugcaucuugguaaaugcaacauagccggcuggauccuggggaauccugagugugaaucuuugucaacagcaaguagcugguccuacauuguugagaccucuucgucagacaacggaacuugcuauccaggcgauuuuaucgacuacgaggagcucagggagcagcugagcaguguguccucuuucgaacgguuugagauuuucccgaagacaagcuccuggcccaaucacgauccuaacaagggugucaccgccgcuuguccacaugcaggggccaaaucauuuuauaagaaucugaucuggcucgugaaaaagggaaacaguuaccccaaauuaagcaagucuuauauaaaugacaagggcaaagaaguacugguucuuuggggcauccaccacccuuccacgucagcugaucaacagagcuuguaccagaacgccgacgcguacguguucgucgggaccagucgcuauucuaagaaauuuaagccagagauugcaauccgacccaaagugcgugaucaggagggaagaaugaauuacuauuggacucugguggaaccuggugacaagauuacauucgaggccacuggcaaccuagucguuccaagguacgcuuuugccauggaacggaacgcaggguccggaaucauaauuagcgauaccccggugcaugacugcaauacaaccugucaaacgucgaaaggcgcuaucaacacuucucuccccuuccagaauauucacccuaucacaaucgguaagugcccaaaguauguaaaauccaccaagcugcgccuugccacugggcugagaaacgugcccucaauucagaguaggggauuguuuggcgcgauagccggcuucaucgaagggggauggacagguauggucgacggcugguacggguaucaucaccagaaugaacaaggaagcggcuacgcagcugaucucaaauccacccagaacgccauugacgagaucacgaauaaggugaacucuguuauagagaaaaugaauacccaguuuacagcuguggguaaggaguucaaccaccuggaaaagcggauugaaaauuuaaacaaaaaggucgaugacggguuccuggauaucuggacuuacaaugccgagcuccuugugcuguuggaaaacgagcgcacccuagacuaucaugauagcaauguaaagaaccuguacgagaagguucgaaaccagcucaaaaauaacgcaaaggaaaucggcaauggauguuuugaguucuaucacaagugcgacaacacauguauggaaucagugaaaaauggcacuuacgauuauccuaaguacagugaggaagccaaacugaacagagaggagauugacggggucaaacuugaauccaccaggaucuaucaaauucuggcuauauacagcacaguggcgucuucauugguccucgugguuagucugggagcaaucagcuuuuggaugugcuccaaugguucuuuacagugccggauuuguaucuga

SEQ ID NO: 137669 - RNA, 1701 nt, Artificial Sequence
  derived and/or modified CDS sequence (opt3) from hemagglutinin__InfluenzaA__AFN87939
augaaggccauccuggugguccuccuuuacaccuucgcuacagcaaacgccgacacucugugcauuggcuaucacgcgaauaacagcacggauaccguugacacaguguuggagaaaaauguaacugugacccauuccgucaacuuacuggaagauaagcacaaugggaaacuauguaagcucagaggaguggcuccccugcaucuugguaaaugcaacauagccggcuggauccuggggaauccugagugugaaucuuugucaacagcaaguagcugguccuacauuguugagaccucuucgucagacaacggaacuugcuauccaggcgauuuuaucgacuacgaggagcucagggagcagcugagcaguguguccucuuucgaacgguuugagauuuucccgaagacaagcuccuggcccaaucacgauccuaacaagggugucaccgccgcuuguccacaugcaggggccaaaucauuuuauaagaaucugaucuggcucgugaaaaagggaaacaguuaccccaaauuaagcacgucuuauauaaaugacaagggcaaggaaguacugguucuuuggggcauccaccacccuuccacuucagcugaucaacagagcuuguaccagaacgccgacgcguacgcauucguggggaccagucgcuauucuaaaaaguuuaaaccagagauugccauccgacccaagguccgugaucaggagggaagaaugaauuacuauuggacacugguggaaccuggugacaaaauuacuuucgaggcuaccggcaaccuaguggucccaagguacgccuuugcaauggaacggaacgcuggguccggaaucauaauuagcgauacaucgguucaugacugcaauaccacgugucaaacuccgaagggcgccaucaacacaucucuccccuuccagaaugugcacccuauuaccaucgguaaaugcccaaaguauguaaaguccacuaaacugcgccuugcgacagggcugagaaacgugcccucaauccagaguaggggauuguuuggcgccauugcaggcuucauagaagggggauggaccgguauggucgacggcugguacggguaucaucaccagaaugaacaaggaagcggcuacgcugccgaucucaaguccacgcagaacgcuaucgacgagauuaccaauaaagugaacucuguuaucgagaagaugaauacacaguuuacugccguggguaaagaguucaaccaccuggaaaagcggauagaaaauuuaaacaagaaagucgaugacggguuccuggauauuuggaccuacaaugcagagcuccuugugcuguuggaaaacgagcgcacacuagacuaucaugauagcaauguaaagaaccuguacgagaaaguucgaucacagcucaagaacaaugccaaagaaaucggcaacggauguuuugaguucuaucacaagugcgacaauacuuguauggaaagugugaagaacggcaccuacgauuauccuaaauacuccgaggaagcuaagcugaauagagaggagaucgacggggucaaacuugaaagcacaaggauuuaucaaauccuggcgauuuacucuaccguggcaucaaguuugguccucgugguuagccugggagccauauccuuuuggaugugcucuaacgguucguuacagugccggaucuguauuuga

SEQ ID NO: 137670 - RNA, 1701 nt, Artificial Sequence
  derived and/or modified CDS sequence (opt3) from hemagglutinin__InfluenzaA__AFN87941
augaaggccauccuggugguccuccuuuacaccuucgcuacagcaaacgccgacacucugugcauuggcuaucacgcgaauaacagcacggauaccguugacacaguguuggagaaaaauguaacugugacccauuccgucaacuuacuggaagauaagcacaaugggaaacuauguaagcucagaggaguggcuccccugcaucuugguaaaugcaacauagccggcuggauccuggggaauccugagugugaaucuuugucaacagcaaguagcugguccuacauuguugagaccucuucgucagacaacggaacuugcuauccaggcgauuuuaucgacuacgaggagcucagggagcagcugagcaguguguccucuuucgaacgguuugagauuuucccgaagacaagcuccuggcccaaucacgauccuaacaagggugucaccgccgcuuguccacaugcaggggccaaaucauuuuauaagaaucugaucuggcucgugaaaaagggaaacaguuaccccaaauuaagcaagucuuauauaaaugacaagggcaaagaaguacugguucuuuggggcauccaccacccuuccacgucagcugaucaacagagcuuguaccagaacgccgacgcguacguguucgucgggaccagucgcuauucuaagaaauuuaagccagagauugcaauccgacccaaagugcgugaucaggagggaagaaugaauuacuauuggacucugguggaaccuggugacaagauuacauucgaggccacuggcaaccuagucguuccaagguacgcuuuugccauggaacggaacgcaggguccggaaucauaauuagcgauaccccggugcaugacugcaauacaaccugucaaacgcccaaaggcgcuaucaacacuucgcucccuuuccagaauauucacccaaucacaaucgguaagugccccaaguauguaaaaucuaccaagcugcgccuugccacugggcugagaaacgugccuuccauucagucaaggggauuguuuggcgcgauagccggcuucaucgaagggggauggacagguauggucgacggcugguacggguaucaucaccagaaugaacaaggaaguggcuacgcagcugaucucaaaagcacccagaacgccauugacgagaucacgaauaaggugaacuccguuauagagaaaaugaauacccaguuuacagcuguggguaaggaguucaaccaccuggaaaagcggauugaaaauuuaaacaaaaaggucgaugacggguuccuggauaucuggacuuacaaugccgagcuccuugugcuguuggaaaacgagcgcacccuagacuaucaugauucuaauguaaagaaccuguacgagaagguucgaaaccagcucaaaaauaacgcaaaggaaaucggcaauggauguuuugaguucuaucacaagugcgacaacacauguauggaaagcgugaaaaauggcacuuacgauuauccaaaguacucagaggaagccaaacugaacagagaggagauugacggggucaaacuugaaaguaccaggaucuaucaaauucuggcuauauacuccacaguggcgagcucuuugguccucgugguuucacugggagcaaucaguuuuuggaugugcagcaaugguuccuuacagugccggauuuguaucuga

SEQ ID NO: 137671 - RNA, 1701 nt, Artificial Sequence
  derived and/or modified CDS sequence (opt3) from hemagglutinin__InfluenzaA__AFN87943
augaaggccauccuggugguccuccuuuacaccuucgcuacagcaaacgccgacacucugugcauuggcuaucacgcgaauaacagcacggauaccguugacacaguguuggagaaaaauguaacugugacccauuccgucaacuuacuggaagauaagcacaaugggaaacuauguaagcucagaggaguggcuccccugcaucuugguaaaugcaacauagccggcuggauccuggggaauccugagugugaaucuuugucaacagcaaguagcugguccuacauuguugagaccucuaucucggacaacggaacuugcuauccaggcgauuuuauugacuacgaggagcucagggagcagcugucaagcgugaguuccuucgaacgguuugagaucuucccgaagacaucuagcuggcccaaucacgauccuaacaagggugucaccgccgcuuguccacaugcaggggccaaauccuuuuauaagaaucugauauggcucgugaaaaagggaaacucauaccccaaauuaaguacgagcuauaucaaugacaagggcaaggaaguacugguucuuuggggcauucaccacccuucuacuuccgcugaucaacagucauuguaccagaacgccgacgcguacgcauucguggggaccagccgcuauaguaaaaaguuuaaaccagagaucgccauucgacccaagguccgugaucaggagggaagaaugaauuacuauuggacacugguggaaccuggugacaaaaucacuuucgaggcuaccggcaaccuaguggucccaagguacgccuuugcaauggaacggaacgcugggucuggaauaauuaucuccgauacaagcguucaugacugcaauaccacgugucaaacuccgaagggcgccauuaacacaucgcuccccuuccagaaugugcacccuaucaccaucgguaaaugcccaaaguauguaaagucuacuaaacugcgccuugcgacagggcugagaaacgugcccuccauucagucaaggggauuguuuggcgccauagcaggcuucaucgaagggggauggaccgguauggucgacggcugguacggguaucaucaccagaaugaacaaggaaguggcuacgcugccgaucucaagagcacgcagaacgcuauugacgagaucaccaauaaagugaacuccguuauagagaagaugaauacacaguuuacugccguggguaaagaguucaaccaccuggaaaagcggauugaaaauuuaaacaagaaagucgaugacggguuccuggauaucuggaccuacaaugcagagcuccuugugcuguuggaaaacgagcgcacacuagacuaucaugauucuaauguaaagaaccuguacgagaaaguucgaagccagcucaagaacaaugccaaagaaaucggcaacggauguuuugaguucuaucacaagugcgacaauacuuguauggaaucagugaagaacggcaccuacgauuauccuaaauacagugaggaagcuaagcugaauagagaggagauugacggggucaaacuugaauccacaaggaucuaucaaauucuggcgauauacagcaccguggcaucuucauugguccucgugguuagucugggagccaucagcuuuuggaugugcuccaacgguucuuuacagugccggauuuguaucuga

SEQ ID NO: 137672 - RNA, 1701 nt, Artificial Sequence
  derived and/or modified CDS sequence (opt3) from hemagglutinin__InfluenzaA__AFN87945
augaaggccauccuggugguccuccuuuacaccuucgcuacagcaaacgccgacacucugugcauuggcuaucacgcgaauaacagcacggauaccguugacacaguguuggagaagaauguaacugugacccauuccgucaacuuacuggaagauaagcacgacgggaaacuauguaagcucagaggaguggcuccccugcaucuugguaaaugcaauauagccggcuggauccuggggaacccugagugugaaucuuugucaacagcaaguagcugguccuacauuguugagaccucuucgucagauaauggaacuugcuauccaggcgacuuuaucgauuacgaggagcucagggagcagcugagcaguguguccucuuucgaacgguuugagauuuucccgaagacaagcuccuggcccaaccacgacucaaauaagggugucaccgccgcuuguccucaugcaggggccaaaaguuuuuauaagaaccugaucuggcucgugaaaaagggaaauagcuacccaaaauuaucucaauccuauauaaacgauaagggcaaggaaguacugguucuuuggggcauccaccaccccucaacgagcgcugaccagcagaguuuguaccagaaugccgaugcguacguguucgucgggacuucucgcuauuccaaaaaguuuaaaccugagauugcaauccgaccaaaggugcgugaccaagagggaagaaugaacuacuauuggacccugguggaacccggugauaaaauuacauucgaggccacuggcaaucuagucguuccuagguacgcuuuugccauggaacggaacgcagggagcggaaucauaauuucggacaccccagugcaugacugcaacacaaccugucagacgccgaagggcgcuaucaauacuucucuccccuuccagaacauucacccuaucacaaucgguaaaugcccaaaguauguaaaguccaccaaacugcgccuugccacugggcugagaaaugugcccucaauucagaguaggggauuguuuggcgcgauagccggcuucaucgaagggggauggacagguauggucgauggcugguacggguaucaucaccaaaacgaacagggaagcggcuacgcagcugaccucaaguccacccagaaugccauugauaaaaucacgaacaagguaaauucuguuauagagaaaaugaacacccaguuuacagcuguggguaaggaguucaaucaccuggaaaagcggauugagaacuuaaauaaaaaggucgacgauggguuccuggacaucuggacuuacaacgccgaacuccuugugcuguuggagaaugaacgcacccuagauuaucaugacagcaacgugaaaaaucuguacgagaagguucgaucacaacucaaaaacaacgcaaaggagaucggcaauggauguuuugaguucuaucacaagugcgauaacacauguauggaaagugugaaaaauggcacuuacgacuauccuaaguacuccgaagaggccaaacugaacagagaagagauugauggggucaaacuugagagcaccaggaucuaucagauucuggcuauauacucuacaguggcgucaaguuugguccucgugguuagccugggagcaaucuccuuuuggaugugcucuaaugguucguuacagugccggauuuguaucuga

SEQ ID NO: 137673 - RNA, 1701 nt, Artificial Sequence
  derived and/or modified CDS sequence (opt3) from hemagglutinin__InfluenzaA__AFN87947
augaaggccauccuggugguccuccuuuacaccuucgcuacagcaaacgccgacacucugugcauuggcuaucacgcgaauaacagcacggauaccguugacacaguguuggagaaaaauguaacugugacccauuccgucaacuuacuggaagauaagcacaaugggaaacuauguaagcucagaggaguggcuccccugcaucuugguaaaugcaacauagccggcuggauccuggggaauccugagugugaaucuuugucaacagcaaguagcugguccuacauuguugagaccucuucgucagacaacggaacuugcuauccaggcgauuuuaucgacuacgaggagcucagggagcagcugagcaguguguccucuuucgaacgguuugagauuuucccgaagacaagcuccuggcccaaucacgauccuaacaagggugucaccgccgcuuguccacaugcaggggccaaaucauuuuauaagaaucugaucuggcucgugaaaaagggaaacaguuaccccaaauuaagcacgucuuauauaaaugacaagggcaaggaaguacugguucuuuggggcauccaccacccuuccacuucagcugaucaacagagcuuguaccagaacgccgacgcguacgcauucguggggaccagucgcuauucuaaaaaguuuaaaccagagauugccauccgacccaagguccgugaucaggagggaagaaugaauuacuauuggacacugguggaaccuggugacaaaauuacuuucgaggcuaccggcaaccuaguggucccaagguacgccuuugcaauggaacggaacgcuggguccggaaucauaauuagcgauacaucgguucaugacugcaauaccacgugucaaacuccgaagggcgccaucaacacaucucuccccuuccagaaugugcacccuauuaccaucgguaaaugcccaaaguauguaaaguccacuaaacugcgccuugcgacagggcugagaaacgugcccucaauccagaguaggggauuguuuggcgccauugcaggcuucauagaagggggauggaccgguauggucgacggcugguacggguaucaucaccagaaugaacaaggaagcggcuacgcugccgaucucaaguccacgcagaacgcuuuugacgagaucaccaauaaagugaacucuguuauugagaagaugaauacacaguucacugccguggguaaagaguucaaccaccuggaaaagcggaucgaaaauuuaaacaagaaagucgaugacggguuucuggauauauggaccuacaaugcagagcuccuugugcuguuggaaaacgagcgcacacuagacuaucaugauagcaauguaaagaaccuguacgagaaaguucgaucacagcucaagaacaaugccaaagaaauuggcaacggauguuucgaguuuuaucacaagugcgacaauacuuguauggaaagugugaagaacggcaccuacgauuauccuaaauacuccgaggaagcuaagcugaauagagaggagaucgacggggucaaacuugaaagcacaaggaucuaucaaauucuggcgaucuacucuaccguggcaucaaguuugguccucgugguuagccugggagccauuuccuucuggaugugcucuaacgguucguuacagugccggauauguaucuga

SEQ ID NO: 137674 - RNA, 1701 nt, Artificial Sequence
  derived and/or modified CDS sequence (opt3) from hemagglutinin__InfluenzaA__AFN87949
augaaggccauccugguggucaugcucuacaccuucgcuacagcaaacgccgacacucuuugcauuggcuaucacgcgaauaacagcacggauaccguugacacagugcuggagaaaaauguaacugugacccauuccgucaacuuguuagaagauaagcacaaugggaaacuguguaagcuaagaggaguggcuccccuccaucuggguaaaugcaacauagccggcuggauccuugggaauccugagugugaaucucugucaacagcaaguagcugguccuacauuguugagaccucuucgucagacaacggaacuugcuauccaggcgauuuuaucgacuacgaagaguugagggagcagcucagcaguguguccucuuucgaacgguuugagauuuucccgaagacaagcuccuggcccaaucacgauucaaacaagggugucaccgccgcuuguccucaugcaggggccaaaggauuuuauaagaaucugaucuggcuggugaaaaagggcaacaguuacccaaaacucagcaagucuuauauaaaugacaagggcaaagaaguauuaguucugugggggauccaccaccccuccacgucagcugaucaacagagccuuuaccagaacgccgacacuuacguguucgucggaaccagucgcuauucuaagaaauuuaagccugagauugcgauccgaccaaaagugcgugaucaggaggguagaaugaauuacuauuggacauugguggaacccggcgacaagauuacuuucgaggcaaccgggaaccuggucguuccuagguacgccuuugcuauggaacggaacgccggauccggcaucauaauuagcgauacaccagugcaugacugcaauaccacgugucaaacuccgaaaggugcaaucaacacaucgcuacccuuccagaauauucacccuaucaccaucgggaagugcccaaaguauguaaaaucuacuaagcuccgccuggcuacaggacuuagaaacgugcccuccauucagucaaggggccuguuuggcgccauagcgggguucaucgagggagguuggaccggcauggucgacgggugguacggauaucaucaccagaaugaacaaggcagugguuacgccgcagauuugaaaagcacgcagaacgcuauugacaagaucaccaauaaagugaacuccguuauagagaagaugaauacacaguuuacugccguggggaaggaguucaaccaccucgaaaaacggauugagaaucugaacaagaaagucgaugacggcuucuuagauaucuggaccuacaaugcugaacugcucgugcuucuggagaacgaacgcacauuggacuaucaugauucuaauguaaagaaccuauacgagaaaguucgaagccagcugaagaacaaugccaaggagaucggaaacggcuguuuugaguucuaucacaaaugcgacaauacuuguauggaaucagugaagaacgggaccuacgauuauccuaaauacagugaagaggcaaagcucaauagagaagagauugacggagucaaacuggaguccacaaggaucuaucaaauucuugccauauacagcaccguggcuucuucacuggucuuggugguuagucucggugcgaucagcuuuuggaugugcuccaacggcucucugcagugccggauuuguaucuga

SEQ ID NO: 137675 - RNA, 1701 nt, Artificial Sequence; identical to SEQ ID NO: 134988
  derived and/or modified CDS sequence (opt3) from hemagglutinin__InfluenzaA__AFN87951

SEQ ID NO: 137676 - RNA, 1701 nt, Artificial Sequence
  derived and/or modified CDS sequence (opt3) from hemagglutinin__InfluenzaA__AFN87953
augaaggccauccuggugguccuccuuuacaccuucgcuacagcaaacgccgacacucugugcauuggcuaucacgcgaauaacagcacggauaccguugacacaguguuggagaaaaauguaacugugacccauuccgcuaacuuacuggaagauaagcacaaugggaaacuauguaagcucagaggagucgcaccccugcaucuugguaaaugcaacauagccggcuggauccuggggaauccugagugugaaucuuugucaacagccaguagcugguccuacauuguggagaccucuucgucagacaacggaacuugcuauccaggcgauuuuaucgacuacgaggagcucagggagcagcugagcaguguuuccucuuucgaacgguuugagauuuucccgaagacaagcuccuggcccaaucacgaucugaacaagggugugaccgcugcauguccucaugccggggcuaaaucauuuuauaagaaucucaucugguuagucaaaaagggaaacaguuacccaaaacugagcaagucuuauauaaaugacaagggcaaagaagugcuuguauuguggggcauccaccaccccuccacgucagccgaucaacagagccuguaccagaacgcggacgcauacguuuucguggggaccagucgcuauucuaagaaauuuaagccugagauugccauccgaccaaaaguccgugaucaggagggaagaaugaauuacuauuggacucuaguggaacccggugacaagauuacauucgaggcuacuggcaaccucguggucccuagguacgccuuugcaauggaacggaacgcuggguccggaaucauaauuagcgauaccccaguucaugacugcaauacaaccugucaaacgccgaaaggcgccaucaacacuucgcugcccuuccagaauauucacccuaucacaaucgguaagugcccaaaguaugugaaaucuaccaagcugcgccuugcgacuggguugagaaacguacccuccauucagucaaggggacucuuuggcgccauagcaggcuucaucgaagggggauggacagguaugguggacggcugguacggguaucaucaccagaaugaacaaggaaguggcuacgcugccgaucugaaaagcacccagaacgcuauugacgagaucacgaauaaggucaacuccgugauagagaaaaugaauacccaguuuacagccguugguaaggaguucaaccacuuagaaaagcggauugaaaaucugaacaaaaagguggaugacggguuccucgauaucuggacuuacaaugcagagcuucuggucuugcuagaaaacgagcgcacccuggacuaucaugauucuaaugugaaaaaccucuacgagaagguacgaagccagcugaaaaacaaugccaaggaaaucggcaacggauguuuugaguucuaucacaagugcgacaauacauguauggaaucaguuaaaaacggcacuuacgauuauccuaaguacagugaggaagcuaaacuuaauagagaggagauugacggggugaagcuggaauccaccaggaucuaucaaauuuuggcgauauacagcacagucgcaucuucacucgugcuggucgugaguuuaggagccaucagcuuuuggaugugcuccaacgguucucugcagugccggauuuguaucuga

SEQ ID NO: 137677 - RNA, 1701 nt, Artificial Sequence
  derived and/or modified CDS sequence (opt3) from hemagglutinin__InfluenzaA__AFN87955
augaaggccauccugguggucaugcucuacaccuucgcuacagcaaacgccgacacucuuugcauuggcuaucacgcgaauaacagcacggauaccguugacacagugcuggagaaaaauguaacugugacccauuccgucaacuuguuagaagauaagcacaaugggaaacuguguaagcuaagaggaguggcuccccuccaucuggguaaaugcaacauagccggcuggauccuugggaauccugagugugaaucucugucaacagcaaguagcugguccuacauuguugagaccucuucgucagacaacggaacuugcuauccaggcgauuuuaucgacuacgaagaguugagggagcagcucagcaguguguccucuuucgaacgguuugagauuuucccgaagacaagcuccuggcccaaucacgauucaaacaagggugucaccgccgcuuguccucaugcaggggccaaaggauuuuauaagaaucugaucuggcuggugaaaaagggcaacaguuacccaaaacucagcaagucuuauauaaaugacaagggcaaagaaguauuaguucugugggggauccaccaccccuccacgacugcugaucaacagucacuuuaccagaacgccgacaccuacguguucgucggaacaagccgcuauaguaagaaauuuaagccugagauugcgauccgaccaaaagugcgugaucaggaggguagaaugaauuacuauuggacuuugguggaacccggcgacaagauuaccuucgaggcaacagggaaccuggucguuccuagguacgccuuugcuauggaacggaacgccggaucuggcaucauaauuuccgauaccccagugcaugacugcaauacgacuugucaaacaccgaaaggugcaaucaacaccagccuacccuuccagaauauucacccuaucacuaucgggaagugcccaaaguauguaaaaucgacaaagcuccgccuggcuaccggacuuagaaacgugcccucuauucaguccaggggccuguuuggcgccauagcgggguucaucgagggagguuggacgggcauggucgacgggugguacggauaucaucaccagaaugaacaaggcucagguuacgccgcagauuugaaaaguacccagaacgcuauugacgagaucacaaauaaggugaacagcguuauagagaaaaugaauacucaguuuaccgccguggggaaggaguucaaccaccucgaaaagcggauugaaaaucugaacaaaaaggucgaugacggcuucuuagauaucuggacauacaaugcugagcugcucgugcuucuggaaaacgagcgcacuuuggacuaucaugauuccaauguuaaaaaccuauacgagaagguacgaucucagcugaaaaacaaugccaaggaaaucggaaacggcuguuuugaguucuaucacaagugcgacaauaccuguauggaaagcgugaaaaacgggacauacgauuauccuaaguacucagaggaagcaaaacucaauagagaggagauugacggagucaagcuggaaaguaccaggaucuaucaaauucuugccauauacuccacuguggcuagcucucuggucuuggugguuucacucggugcgaucaguuuuuggaugugcagcaacggcucccugcagugccggauuuguaucuga

SEQ ID NO: 137678 - RNA, 1701 nt, Artificial Sequence
  derived and/or modified CDS sequence (opt3) from hemagglutinin__InfluenzaA__AFN87957
augaaggccauccuggugguccuccuuuacaccuucgcuacagcaaacgccgacacucugugcauuggcuaucacgcgaauaacagcacggauaccguugacacaguguuggagaagaauguaacugugacccauuccgucaacuuacuggaagauaagcacaaugggaaacuauguaagcucagaggaguggcuccccugcaucuugguaaaugcaacauagccggcuggauccuggggaauccugagugugaaucuuugucaacagcaaguagcugguccuacauuguugagaccucuaucucggacaacggaacuugcuauccaggcgauuuuauugacuacgaggagcucagggagcagcugucaagcgugaguuccuucgaacgguuugagaucuucccgaagacaucuagcuggcccaaucacgauccuaacaagggugucaccgccgcuuguccacaugcaggggccaaauccuuuuauaagaaucugauauggcucgugaaaaagggaaacucauaccccaaauuaaguacgagcuauaucaaugacaagggcaaggaaguacugguucuuuggggcauucaccacccuucuacuuccgcugaucaacagucauuguaccagaacgccgacgcguacgcauucguggggaccagccgcuauaguaaaaaguuuaaaccagagaucgccauucgacccaagguccgugaucaggagggaagaaugaauuacuauuggacacugguggaaccuggugacaaaaucacuuucgaggcuaccggcaaccuaguggucccaagguacgccuuugcaauggaacggaacgcugggucuggaauaauuaucuccgauacaagcguucaugacugcaauaccacgugucaaacuccgaagggcgccauuaacacaucgcuccccuuccagaaugugcacccuaucaccaucgguaaaugcccaaaguauguaaagucuacuaaacugcgccuugcgacagggcugagaaacgugcccuccauucagucaaggggauuguuuggcgccauagcaggcuucaucgaagggggauggaccgguauggucgacggcugguacggguaucaucaccagaaugaacaaggaaguggcuacgcugccgaucucaagagcacgcagaacgcuuuugacgagauuaccaauaaagugaacuccguuaucgagaagaugaauacacaguucacugccguggguaaagaguucaaccaccuggaaaagcggauagaaaauuuaaacaagaaagucgaugacggguuucuggauauuuggaccuacaaugcagagcuccuugugcuguuggaaaacgagcgcacacuagacuaucaugauucuaauguaaagaaccuguacgagaaaguucgaagccagcucaagaacaaugccaaagaaaucggcaacggauguuucgaguuuuaucacaagugcgacaauaaguguauggaaucagugaaaaacggcacuuacgauuauccuaaguacagugaggaagcuaaacugaauagagaggagaucgacggggucaaacuugaauccaccaggauuuaucaaauccuggcgauuuacagcacaguggcaucuucauugguccucgugguuagucugggagccaucagcuucuggaugugcuccaacgguucuuuacagugccggauauguauuuga

SEQ ID NO: 137679 - RNA, 1701 nt, Artificial Sequence
  derived and/or modified CDS sequence (opt3) from hemagglutinin__InfluenzaA__AFN87959
augaaggccauccugguggucaugcucuacaccuucgcuacagcaaacgccgacacucuuugcauuggcuaucacgcgaauaacagcacggauaccguugacacagugcuggagaaaaauguaacugugacccauuccgucaacuuguuagaagauaagcacaaugggaaacuguguaagcuaagaggaguggcuccccuccaucuggguaaaugcaacauagccggcuggauccuugggaauccugagugugaaucucugucaacagcaaguagcugguccuacauuguugagaccucuucgucagacaacggaacuugcuauccaggcgauuuuaucgacuacgaagaguugagggagcagcucagcaguguguccucuuucgaacgguuugagauuuucccgaagacaagcuccuggcccaaucacgauucaaacaagggugucaccgccgcuuguccucaugcaggggccaaaggauuuuauaagaaucugaucuggcuggugaaaaagggcaacaguuacccaaaacucagcaagucuuauauaaaugacaagggcaaagaaguauuaguucugugggggauccaccaccccuccacgucagcugaucaacagagccuuuaccagaacgccgacacuuacguguucgucggaaccagucgcuauucuaagaaauuuaagccugagauugcgauccgaccaaaagugcgugaucaggaggguagaaugaauuacuauuggacauugguggaacccggcgacaagauuacuuucgaggcaaccgggaaccuggucguuccuagguacgccuuugcuauggaacggaacgccggauccggcaucauaauuagcgauacaccagugcaugacugcaauaccacgugucaaacuccgaaaggugcaaucaacacaucgcuacccuuccagaauauucacccuaucaccaucgggaagugcccaaaguauguaaaaucuacuaagcuccgccuggcuacaggacuuagaaacgugcccuccauucagucaaggggccuguuuggcgccauagcgggguucaucgagggagguuggaccggcauggucgacgggugguacggauaucaucaccagaaugaacaaggcagugguuacgccgcagauuugaaaagcacgcagaacgcuauugacaagaucaccaauaaagugaacuccguuauagagaagaugaauacacaguuuacugccguggggaaggaguucaaccaccucgaaaaacggauugagaaucugaacaagaaagucgaugacggcuucuuagauaucuggaccuacaaugcugaacugcucgugcuucuggagaacgaacgcacauuggacuaucaugauucuaauguaaagaaccuauacgagaaaguucgaaaccagcugaagaauaacgccaaggagaucggaaauggcuguuuugaguucuaucacaaaugcgacaacacuuguauggaaagcgugaagaaugggaccuacgauuauccuaaauacucagaagaggcaaagcucaacagagaagagauugacggagucaaacuggagaguacaaggaucuaucaaauucuugccauauacuccaccguggcuagcucucuggucuuggugguuucacucggugcgaucaguuuuuggaugugcagcaauggcucccugcagugccggauuuguaucuga

SEQ ID NO: 137680 - RNA, 1701 nt, Artificial Sequence; identical to SEQ ID NO: 131202
  derived and/or modified CDS sequence (opt3) from hemagglutinin__InfluenzaA__AFN87961

SEQ ID NO: 137681 - RNA, 1698 nt, Artificial Sequence
  derived and/or modified CDS sequence (opt3) from hemagglutinin__InfluenzaA__AFO64802
augaaggccaaacugcucgugcuucugugcaccuucacagcuacuuacgcagacacgaucuguauuggcuaucacgccaacaauagcaccgauacagucgacacuguuuuggagaagaacgugaccguaacacauuccgugaauuuacuggaagauucucacaacgggaaacuaugccuccugaagggaauagcgccccuucagcuggguaauuguucagucgcuggcuggaucuuggggaacccugagugcgaacuccugauuaguaaagagagcugguccuacaucguggaaaccccaaauccggagaacggaacuuguuaucccggcuacuuugccgacuaugaggaacugagagagcaacucucuucgguuagcucauucgaaagguuugagauuuucccuaaggagaguuccuggccaaaucauacagugaccggugucucugcaagcugcucccacaacgggaagucaaguuuuuaccggaauuuacuguggcuuacggugaaaaacggauuguaucccaaucugagcaagucuuacguaaacaauaaaggcaaggaaguucuagugcucuggggcguccaucacccuuccaacauccgcgaucagcgagccauauaccacacugagaacgcuuaugugucaguggucagcagucauuacucucguagauucaccccagaaaucgcaaaaaggcccaagguucgggaccaggaggggcgcauuaauuauuacuggacacugcuugaaccuggagauacuaucauuuuugaggccaacgguaaucugaucgcuccaugguaugccuucgcguuguccagaggcuuugggagcggaauaauuaccucgaacgcaccgauggacgagugugaugccaagugccagacaccccaaggcgcuaucaauucuucccucccuuuccagaacgugcacccaguaaccauuggugaaugucccaaauacgugaggucagccaagcugcggauggucacgggguuacgcaauaucccuaguauccagagccgaggacuguuuggcgcaauugcuggcuucauagaagggggauggacugguaugaucgacggcugguauggguaccaucaccagaacgaacaaggauccggcuacgccgcggaucagaaaucuacacagaaugccauuaacgguaucaccaauaaggugaacagcguuauagagaaaaugaauacucaguuuacagcaguggggaaggaguucaacaaacucgagagaaggauggagaaucuuaacaagaaggucgacgauggcuuccuggacauuuggaccuauaacgcugaauugcuagugcugcucgagaaugaacggacgcuggacuuucacgauucaaacguuaaaaaucuuuacgagaagguaaaaagucaacugaagaacaaugccaaagaaaucggaaacggcugcuucgaguuuuaucauaaguguaauaacgagugcauggaauccgugaagaaugggaccuacgacuauccaaaauacagcgaggaaucuaaguugaaccgugagaaaaucgauggagucaagcucgagucaauggguguguaucagauucuggcuaucuacaguacagucgccagcuccuuagugcugcuaguuucucucggcgcaauuucguucuggaugugcagcaaugggucccugcagugucgcauaugcaucuga

SEQ ID NO: 137682 - RNA, 1701 nt, Artificial Sequence
  derived and/or modified CDS sequence (opt3) from hemagglutinin__InfluenzaA__AFO64813
augaaggccaaacugcucgugcuucugugcgcuuucaccgcaacagacgccgauacuaucuguauuggcuaccacgcgaacaauagcacggacaccgucgauacaguuuuggagaagaacgugacuguaacccauuccgugaauuuacuggaagacucucacaacgggaaacuaugcagacucaagggaauagcuccccugcagcuugguaauuguucaaucgccggcuggauucuggggaacccugagugcgaaaguuuguuuagcaaaaaguccuggucuuauaucgcagagacaccaaauucggaaaacggaaccuguuacccgggcuauuucgccgauuacgaggagcucagggaacaacugucaagcgucaguuccuuugagcgguucgaaauuuuucccaaggagucuagcuggccuaaucauacugugacaaaagguguuaccgcuuccugcucacacaaggggcgcaguagcuucuaucgaaaccugcucugguuaacggagaaaaauggaucuuacccaaaccuguccaagucauaugugaauaacaaagaaaaggagguccuuguguuguggggcguacaucaccccagcaauauccgugaccagagagcaauauaccacacugaaaacgccuacguuaguguggucucuucccauuauaacaggcgguuuaccccugagaucgcuaagcgcccaaaagugagagaucaggaaggcaggauuaauuacuauuggacacugcuagagcccggggacacuaucauuuucgaggccaacggaaaucucaucgcgccuugguacgcauuugcccugagccgggguuucggcucggggauaauuaccucuaacgcuuccauggaugaaugugacgccaagugccagacaccacaaggagcaaucaauucaagucuuccguuucagaacgugcaccccgucaccauuggcgaguguccuaaauauguucgcagcacgaagcugcgaauggugacugguuugagaaauaucccauccauccagucuaggggacucuucggggcuauugccggcuuuauagaaggcggguggacaggaaugaucgaugguugguacggcuaucaucaccagaacgagcaagggagcggauacgcggccgaccagaaaucaacccagaaugcaauuaacggcaucacuaauaagguaaacagugugauagaaaagaugaauacacaguucaccgcugucgguaaggaguucaacaagcuggagcggcguauggaaaauuuaaacaaaaagguggaugacggguuucuggacauuuggacguacaacgccgagcuccuuguucuguuggaaaaugagcgcacccuagauuuccacgacuccaacgugaaaaaucuguaugaaaaggucaaaagccaacucaagaacaaugcuaaggagaucggcaacggaugcuuugaguucuaccauaaauguaauaacgaaugcauggagucugugaagaauggcacauaugauuaccccaaauauucagaagagaguaagcugaacagagagaaaaucgacgggguaaaacuugaaagcaugggaguuuaccagauucuggccaucuauuccacuguggcaucuucguugguccuccuggugagcuuaggugccauuuccuuuuggaugugcucaaauggcagucugcaguguaggauaugcaucuga

SEQ ID NO: 137683 - RNA, 1701 nt, Artificial Sequence
  derived and/or modified CDS sequence (opt3) from hemagglutinin__InfluenzaA__AFO64824
augaaggccauccugcucgugcuucugugcgcuuucaccgcaacagacgccgauacuauuuguauaggcuaccacgcgaacaauagcacggacaccgucgauacaguuuuggagaaaaacgugacuguaacccauuccgugaauuuacuggaagacucucacaacgggaagcuaugcagacucaaaggaaucgcuccccugcagcuugguaauuguucaauugccggcuggauccuggggaacccugagugcgaaaguuuguuuagcaagaaauccuggucuuauauugcagagacaccaaauucggaaaacggaaccuguuacccgggcuauuucgccgauuacgaggagcucagggaacaacugucaagcgucaguuccuuugagcgguucgaaaucuuucccaaggagucuagcuggccuaaucauacugugacaaaggguguuaccgcuuccugcucacacaaagggcgcaguagcuucuaucgaaaccugcucugguuaacggagaagaauggacuguacccaaaccuuucuaaauccuaugugaauaacaaggaaaaagaggucuuggugcuguggggcguacaucaccccucaaauauaggcgaccagcgugcaaucuaccacacugaaaacgccuacguuagcguggucaguucucauuauaacagaagguuuaccccugagauugcuaagcggccaaaggugcgcgggcaggaaggaagaaucaauuacuauuggacacuacucgagcccggugauacuauuaucuucgaggccaacggcaaucugauagcgccuugguacgcauuugcccuuuccaggggguucggaagcggcauuaucaccucgaacgcuucuauggacgaaugugaugccaaaugccagacaccacaaggugcaauuaauuccucacugccguuucagaacgugcaccccgucaccaucggggaguguccuaaguauguucggaguacgaaauugaagauggugacuggacuccgcaauaucccaagcauucagucccgaggccuguucggcgcuauagccggguuuaucgaaggagguuggacaggcaugauugacgggugguacggauaucaucaccagaacgagcaaggcucugguuacgcggccgaucagaaaagcacccagaaugcaaucaacgggauaacuaauaagguaaacucagugauugaaaagaugaauacacaguucaccgcugucggcaaagaguucaacaaguuagagaaaagaauggaaaaucugaacaagaaaguggacgauggauuucucgacaucuggacguacaacgccgagcuucugguuuugcuagaaaaugagaggacccuggacuuccacgauaguaacgugaagaaucucuaugaaaaagucaagaaccaacugaagaauaacgcuaaagagaucggcaaugggugcuuugaguucuaccauaaguguaacaaugaaugcauggaguccgugaaaaacggaacauaugacuaccccaaguauagcgaagagucuaaacuuaaucgggagaagauugaugguguaaagcuggaaucaaugggcguuuaccagaucuuggccauuuauaguacuguggcaagcucccucguccuguuagugucucugggggccauaucguuuuggaugugcagcaacggaucccuacagugucguaucugcauuuga

SEQ ID NO: 137684 - RNA, 1701 nt, Artificial Sequence
  derived and/or modified CDS sequence (opt3) from hemagglutinin__InfluenzaA__AFO64835
augaaggccaaacugcucgugcuucugugcgcuuucaccgcaacauacgccgacacuaucuguauuggcuaucacgcgaacaauagcacggauaccgucgacacaguuuuggagaagaacgugacuguaacccauuccgugaauuuacuggaagauucucacaacgggaaacuaugcagacucaagggaauagcuccccugcagcuugguaauuguucagucgccggcuggauccuggggaacccugagugcgaaaguuuguuuagcaaagaguccuggucuuacauugcagaaacaccagacccggagaauggaaccuguuaucccggcuacuucgccgauuaugaggaacucagggagcaacugucgucagugagcaguuuugaacgguucgagaucuuuccuaaggaguccucuuggccaaaccauacuguuacaaagggugugaccgcuagcugcucccacaaugggaaaucaaguuucuaccgcaaccugcucugguuaacgaagaaaaauggacuguaucccaaccuuagcaagucuuacgucaauaacaaagaaaaggagguguugguacuguggggcguucaucacccuuccaauauuggcgaacagcgagcaaucuaccacacugagaacgccuaugugucagucgugagcagucauuacucucguagauuuaccccagaaauagcuaagaggcccaaagugcgggaccaggaggggcgcaucaacuauuacuggacacuacucgagccuggagauacuauuaucuucgaagccaaugguaaccugauugcgccaugguaugcauuugcccuuuccagaggcuucgggagcggaaucauaaccucgaaugcuucuauggacgagugugaugccaagugccagacaccgcaaggcgcaauuaacuccucacugcccuuucagaauguccacccuguuaccaucggugaauguccaaaauacgugaggaguacgaaguugcggaugguaacugggcuccgcaacauucccagcauccagucccgaggacuguucggcgcuaucgccggcuuuauugaagggggauggacagguaugauagacggcugguauggguaccaucaccagaaugaacaaggaucuggcuacgcggccgaucagaaaagcacccagaacgcaaucaaugguauuacuaacaaggucaauucagugaucgagaaaaugaacacacaguucaccgcuguggggaaggaguucaauaaguuagaaagaaggauggagaaccugaauaaaaagguugacgauggcuuucucgacauauggacguauaacgccgaacuucugguguugcuagagaacgaacggacccuggacuuccacgauaguaaugucaaaaaccucuacgagaaggugaaaaaucaacugaagaacaaugcuaaggagauuggaaacggcugcuuugaguucuaucauaaauguaauaacgagugcauggaauccguaaagaaugggacauacgacuauccuaaauacagcgaggagucuaaacuuaaccgugaaaagaucgauggaguuaagcuggagucaauggguguguaucagaucuuggccauuuacaguacugucgcaagcucccucgugcuguuagucucucugggcgccaucucguuuuggaugugcagcaaugggucccuacagugucgcauuugcauauga

SEQ ID NO: 137685 - RNA, 1701 nt, Artificial Sequence
  derived and/or modified CDS sequence (opt3) from hemagglutinin__InfluenzaA__AFO64846
augaaggccaaacugcucgugcuucugugcgcuuucaccgcaacauacgccgacacuaucuguauuggcuaucacgcgaacaauagcacggauaccgucgacacaguuuuggagaagaacgugacuguaacccauuccgugaauuuacuggaagauucucacaacgggaaacuaugcagacucaagggaauagcuccccugcagcuugguaauuguucagucgccggcuggauccuggggaacccugagugcgaaaguuuguuuacaaaagagagcugguccuacauugcagaaaccccaaauccggagaacggaacuuguuaucccggcuacuucgccgacuaugaggaacucagggagcaacugucuucggugagcucauuugaacgguucgagaucuuuccuaaggagaguuccuggccaaaucauacaguuaccaagggugugacggcuucuugcagccacaacgggaaauccucauucuaccgcaaucugcucugguuaacugaaaagaacggacuguaucccaaucuuaguaaaagcuacgucaacaauaaggagaaagaaguguugguacuguggggcguucaucacccuucuaacaugggcgaucagcgagcaauuuaccacaccgagaacgccuauguguccgucgugucaagccauuacagucguagauuuacaccagaaaucgcuaagaggcccaaggugcgggggcaggagggacgcauaaauuauuacuggacucuacucgagccuggugacaccaucauuuucgaagccaacggcaaucugaucgcgccaagauaugcauuugcccuuucuaggggguucggauccggcauuaucacaagcaacgcuucgauggaugagugugacgccaaaugccagaccccgcaaggugcaauaaauucuucccugcccuuucagaacguccacccuguuacgauuggggaauguccaaaguacgugcggucaacuaaauugcgcaugguaacaggacuccgaaauauccccaguauucagagcagaggccuguucggcgcuaucgccggguuuaucgagggagguuggaccggcaugauugaugggugguauggauaccaucaccagaacgaacaaggcuccgguuacgcggccgaccagaagucuacucagaaugcaauaaacgggaucacaaauaaagugaacagcgucauugagaagaugaauacccaguucacggcugugggcaaagaguucaacaaguuagaaaggcggauggagaaucugaacaagaaaguugaugacggauuucucgauaucuggaccuauaacgccgaacuucugguguugcuagagaaugaacguacacuggacuuccacgacucaaacgucaagaaucucuacgagaaagugaagagucaacugaaaaacaaugcuaaggagauaggcaacgggugcuuugaguucuaucauaaguguaauaacgaaugcauggaauccguuaaaaauggaacuuacgauuauccuaaguacagcgaggagucuaaacuuaaccgcgaaaagauugacgguguaaaacuggagucaaugggcguguaucagaucuuggccaucuacaguaccgucgcaagcucccucgugcuguuagucucucugggggccauuucguuuuggaugugcagcaauggaucccuacaguguagaaucugcauuuga

SEQ ID NO: 137686 - RNA, 1701 nt, Artificial Sequence
  derived and/or modified CDS sequence (opt3) from hemagglutinin__InfluenzaA__AFO64857
augaaggccaaacugcucgugcuucugugcgcuuucaccgcaacauacgccgacacuaucuguauuggcuaucacgcgaacaauagcacggauaccgucgacacaguuuuggagaagaacgugacuguaacccauuccgugaauuuacuggaagauucucacaacgggaaacuaugcagacucaagggaacagcuccccugcagcuugguaauuguucagucgccggcuggauacuggggaacccugagugcgaaaguuuguuuagcaaagaguccuggucuuacaucgcagaaaccccaaauccggagaacggaacuuguuaucccggcuacuucgccgacuaugaggaacucagggagcaacugucgucagugagcaguuuugaacgguucgagauuuuuccuaaggaguccucuuggccaaaucauacaguuaccaagggugugacggcuagcugcucccacaacgggaaaucaaguuucuacaagaaucugcucugguuaacugaaaagaacggacuguaucccaaucuuagcaagucuuacgucaacaauaaagagaaggaaguguugguacuguggggcguucaucacccuuccaacaucggcgaucagcgcgcaauuuaccacaccgagaacgccuaugugucagucgugagcagucauuacucucgacguuuuacaccagaaaucgcuaagagacccaaagugagggggcaggagggacggauaaauuauuacuggacucuacucgagccuggugacaccaucauuuucgaagccaacggcaaucugaucgcgccaugguaugcauuugcccuuucccgcggguucggaagcggcauuaucacaucgaccgcuucuaugggugagugugaugccaagugccagacgccgcaaggggcaauaaacuccucacugcccuuucagaauguccacccuguuacuauuggagaauguccaaaauacgugagaaguacaaaguugaggaugguaaccggccuccggaacauccccagcauucagucccgcggccuguucggggcuaucgccggauuuaucgaggguggcuggacugggaugauugacggaugguauggcuaccaucaccagaaugaacaagguucuggguacgcggccgaucagaaaagcacacagaacgcaauagacggcaucaccaauaaggugaacucagucauugagaaaaugaauacgcaguucaccgcugugggaaaggaguucaacaaguuagaacgaagaauggagaaucugaacaaaaagguugaugacggcuuucucgauaucuggacauauaaugccgaacuucugguguugcuagagaacgggaggacucuggacuuccacgacaguaacgucaaaaaucucuacgaaaaggugaaaaaccaacugaagaauaacgcuaaggagauaggaaaugguugcuuugaguucuaucauaaauguaacaaugaaugcauggaguccguaaagaacggcaccuacgauuauccuaaauacagcgaagagucuaaacuuaaucgggagaaaauugacgggguuaagcuggaaucaaugggaguguaucagaucuuggccaucuacaguacagucgcaagcucccucgugcuguuagucucucugggcgccauuucguuuuggaugugcagcaacgguucccuacagugucguaucugcauuuga

SEQ ID NO: 137687 - RNA, 1701 nt, Artificial Sequence
  derived and/or modified CDS sequence (opt3) from hemagglutinin__InfluenzaA__AFO64868
augaaggugaaacugcucguccuucugugcgccuucaccgcuacauacgcagacacuaucuguauuggcuaucacgccaacaauagcacggauaccguugacacaguguuggagaagaacguaacugugacccauuccgucaauuuacuggaagauucucacaacgggaaacuaugcagacucaagggaacagcgccccugcagcuugguaauuguucaguggcuggcuggauacuggggaacccugagugcgaaaguuuguuuagcaaagaguccuggucuuacaucgccgaaaccccaaauccggagaacggaacuuguuaucccggcugcuucgcagacuacgaggaacucagggagcaacugucgucaguuagcaguuuugaacgguucgagauuuuuccuaaggaguccucuuggccaaaucauacagugaccaagggugucacggccagcuguucccacaacgggaaaucaaguuucuauaagaaucugcucugguuaacugaaaagaacggacuguaccccaaucuuagcaagucuuaugugaacaauaaagagaaggaaguauugguucuguggggcgugcaucacccuuccaacauccgcgaucagcgagcuauuuaccacaccgagaacgcauacgucucaguggugagcagucauuauucucguagauuuacaccagaaaucgccaagaggcccaaaguccggggccaggaggggcgcauaaauuacuauuggacucuacucgagccuggagacaccaucauuuucgaagcuaacgguaaucugaucgccccaugguacgcguuugcacuuuccagaggcuucgggagcggaauuaucacaucgaacgccucuaugggcgagugcgaugcuaagugucagaccccgcaaggugccauaaauuccucacugcccuuucagaacguucacccugugacgauuggggaaugcccaaaauauguaaggaguacuaaguugcggauggugacaggacuccgcaauauccccagcauucagucccgaggccuguucggcgcaaucgcuggguuuaucgagggagguuggaccggcaugauugacgggugguacggauaucaucaccagaacgaacaaggcucugguuacgccgcggaucagaaaagcacucagaaugccauagacgggaucacaaacaaggucaauucagugauugagaaaaugaacacccaguucacggcaguuggcaaggaguucaauaaguuagaaagaaggauggagaaccugaauaaaaagguggaugacggauuucucgauaucuggaccuacaacgcugaacuucuggucuugcuagagaacgaacggacacuggacuuccacgacaguaaugugaaaaaccucuaugagaagguuaaaaaucaacugaagaacaaugccaaggagauaggcaacggguguuuugaguucuaccauaaaugcaauaacgaaugcauggaauccguaaagaauggaacuuaugauuacccuaaauauagcgaggagucuaaacuuaaccgugagaaaauugacggugugaagcuggaaucaaugggcgucuaccagaucuuggcuaucuauaguaccguggccagcucccucguccuguuagugucucugggggcaauuucguuuuggauguguagcaauggaucccuacagugccgcaucuguauuuga

SEQ ID NO: 137688 - RNA, 1698 nt, Artificial Sequence
  derived and/or modified CDS sequence (opt3) from hemagglutinin__InfluenzaA__AFO64879
augaaggccaaacugcucgugcuucugugcaccuucacagcuacuuacgcagacacgaucuguauuggcuaucacgccaacaauagcaccgauacagucgacacuguuuuggagaagaacgugaccguaacacauuccgugaauuuacuggaagauucucacaacgggaaacuaugccuccugaagggaauagcgccccuucagcuggguaauuguucagucgcuggcuggaucuuggggaacccugagugcgaaagucucauuuuuaaagagagcugguccuacaucguggaaaccccaaauccggagaacggaacuuguuaucccggcuacuucgccgacuaugaggaacugagagagcaacugucuucgguuagcucauuugaaagguucgagauuuuuccuaaggagaguuccuggccaaaucauacagugaccggugucucugcaagcugcucccacaacgggaagucaaguuucuaccggaaucucuuauggcugacggagaaaaacggacuuuaucccaauuugagcaagucuuacgugaacaauaaagagaaggaaguacugguucuauggggcgugcaucacccuuccaacauccgcgaucagcgagccauauaccacacugagaacgcuuaugucucaguggugagcagucauuacucucguagauuuaccccagaaaucgcaaaaaggcccaagguccggggccaggaggggcgcauuaauuauuacuggacacuccuggagccuggagacacuaucauuuucgaagccaacgguaaucuuaucgcuccaugguaugccuuugcgcuguccagaggcuucgggagcggaauaauuaccucgaacgcaccgauggaugagugugacgccaagugccagacaccccaaggcgcuaucaauucuuccuugccuuuucagaacguucacccagugaccauuggugaaugucccaaauacguaaggucagccaagcuccggauggugacggggcugcgcaauaucccuaguauccagagccgaggauuauucggcgcaauugcuggcuuuauagaagggggauggacugguaugaucgauggcugguauggguaccaucaccagaacgaacaaggauccggcuacgccgcggaccagaaaucuacacagaaugccauuaacgguaucaccaauaaggucaacagcgugauagagaaaaugaauacucaguucacagcaguugggaaggaguucaacaaacuggaaagaaggauggagaaucucaacaagaagguggaugacggcuuucuugauauuuggaccuauaacgcugaacuguugguccuacuggagaaugaacggacgcucgacuuccacgacucaaacgugaaaaaucuguacgagaagguaaaaagucaacuuaagaacaaugccaaagagaucggaaacggcugcuuugaguucuaucauaaguguaauaacgaaugcauggaauccguuaagaaugggaccuacgauuauccaaaauacagcgaggagucuaagcugaaccgugagaaaaucgacggagugaaguuggaaucaaugggugucuaucagauucucgcuaucuacaguacaguggccagcucccuggucuuacuggugucucuaggcgcaauuucguuuuggaugugcagcaaugggucccuccagugucgcauaugcaucuga

SEQ ID NO: 137689 - RNA, 1698 nt, Artificial Sequence
  derived and/or modified CDS sequence (opt3) from hemagglutinin__InfluenzaA__AFO64890
augaaggccaaacugcucgugcuucugugcaccuucacagcuacuuacgcagacacgaucuguauuggcuaucacgccaacaauagcaccgauacagucgacacuguuuuggagaagaacgugaccguaacacauuccgugaauuuacuggaagauucucacaacgggaaacuaugccuccugaagggaauagcgccccuucagcuggguaauuguucagucgcuggcuggaucuuggggaacccugagugcgaaagucucauuagcaaagaguccuggucuuacaucguggaaaccccaaauccggagaacggaacuuguuaucccggcuacuuugccgacuaugaggaacugagagagcaacugucgucaguuagcaguuucgaaagguuugagauuuucccuaaggaguccucuuggccaaaucauacagugaccggugucagcgcauccugcucacacaacgggaagaguagcuuuuaccggaaucucuuauggcugacggagaaaaacggacuuuaucccaauuugucuaaguccuacgugaacaauaaagagaaggaaguacugguucuauggggcgugcaucacccuucaaacauccgcgaucagcgagccauauaccacacugagaacgcuuaugucagcguggugaguucucauuacucccguagauucaccccagaaaucgcaaaaaggcccaagguccggggccaggaggggcgcauuaauuauuacuggacacuccuggagccuggagacacuaucauuuuugaagccaacgguaaucuuaucgcuccaugguaugccuucgcgcugagcagaggcuuugggucgggaauaauuaccucuaacgcaccgauggaugagugugacguuaagugccagacaccccaaggcgccaucaauuccucauugccuuuccagaacgugcacccaguaaccauuggugaaugucccaaauacgugaggagugcuaagcuccggauggucacggggcugcgcaauaucccuagcauccagucccgaggauuauuuggcgccauugcaggcuucauagaagggggauggacugguaugaucgauggcugguauggguaccaucaccagaacgaacaaggaucuggcuacgcugccgaccagaaaagcacacagaaugcgauuaacgguaucaccaauaaggugaacucaguuauagagaaaaugaauacucaguuuacagccguggggaaggaguucaacaaacuggaaagaaggauggagaaucucaacaagaaggucgaugacggcuuccuugauauuuggaccuauaacgcagaacuguuggugcuacuggagaaugaacggacgcucgacuuucacgacaguaacguuaaaaaucuguacgagaagguaaaaucccaacuuaagaacaaugcuaaagagaucggaaacggcugcuucgaauuuuaucauaaguguaauaacgagugcauggaaagcgugaagaaugggaccuacgauuauccaaaauacucugaggagucaaagcugaaccgugagaaaaucgacggagucaaguuggaaaguauggguguguaucagauucucgccaucuacagcacagucgcuuccucucugguguuacugguuucgcuaggcgccauuagcuucuggaugugcuccaaugggucacuccagugucgcauaugcaucuga

SEQ ID NO: 137690 - RNA, 1701 nt, Artificial Sequence
  derived and/or modified CDS sequence (opt3) from hemagglutinin__InfluenzaA__AFO64901
augaaggccaaacugcucgugcuucugugcgcuuucaccgcaacauacgccgacacuaucuguauuggcuaucacgcgaacaauagcacggauaccgucgacacaguuuuggagaagaacgugacuguaacccauuccgugaauuuacuggaagauucucacaacgggaaacuaugcagacucaagggaacagcuccccugcagcuugguaauuguucaauagccggcuggauccuggggaacccugagugcgaaaguuuguuuagcaaagaguccuggucuuacauugcagaaaccccaaauccggagaacggaacuuguuaucccggcuacuucgccgacuaugaggaacucagggagcaacugucgucagucagcaguuuugaacgguucgagaucuuuccuaaggaguccucuuggccaaaucauacagugaccaaggguguuacggcuagcugcucccacaacgggaaaucaaguuucuacaagaaucugcucugguuaacugaaaagaacggacuguaucccaaucuuagcaagucuuacgugaacaauaaaaagaaggaggucuuggugcuguggggcguacaucacccuuccaacauuggcgaucagcgcgcaaucuaccacaccgaaaacgccuauguuucaguggucagcagucauuacucucgacguuuuacaccagagauagcuaaaagacccaaggugaggaaucaggaagggcggaucaacuauuacuggacucuacucgagccuggagacaccauuaucuucgaggccaaugguaaccugauugcgccaugguaugcauuugcccuuucccgcggcuucgaaagcgggaucauaacaucgaaugcuucuaugggagagugugaugccaaaugccagaccccgcaaggcgcaauuaacuccucacugcccuuucagaaugugcacccugucacgaucggugaauguccaaaguacguuagaaguacuaaauugaggauggugacagggcuccggaacauucccagcauccagucccgcggacuguucggcgcuaucgccggcuuuauugaagggggauggaccgguaugauagacggcugguauggguaccaucaccagaaugaacaaggaucuggcuacgcggccgaucaaaagagcacucagaacgcaaucaaugguauuacaaacaaaguaaauucaaucauagagaagaugaacacccaguucacggcuguggggaaggaguucaauaaauuagaacgaagaauggagaaccugaacaagaaagucgacgauggcuuucucgacauuuggaccuauaaugccgaacuucugguguugcuagagaacgaaaggacacuggauuuccacgacaguaauguuaagaaccucuacgagaaagugaagaaucagcugaagaacaaugcuaaagagaucggaaacggcugcuuugaguucuaucauaaguguaauaacgagugcauggaauccgucaaaaaugggacuuacgacuauccuaaguacagcaaagagucuaaacuuaaccgggagaagaucgauggagugaaacuggaaucaauggguguauaucagauuuuggccaucuacaguaccguugcaagcucccucgugcuguuagucucucugggcgccauuucguuuuggaugugcagcaaugggucccuacagugucguauaugcaucuga

SEQ ID NO: 137691 - RNA, 1698 nt, Artificial Sequence
  derived and/or modified CDS sequence (opt3) from hemagglutinin__InfluenzaA__AFO65016
augaaggccaaacugcucgugcuucugugcaccuucacagcuacuuacgcagacacgaucuguauuggcuaucacgccaacaauagcaccgauacagucgacacuguuuuggagaagaacgugaccguaacacauuccgugaauuuacuggaagauucucacaacgggaaacuaugccuccugaagggaauagcgccccuucagcuggguaauuguucagucgcuggcuggaucuuggggaacccugagugcgaaagucucauuagcaaagaguccuggucuuacaucguggaaaccccaaauccggagaacggaacuuguuaucccggcuacuuugccgacuaugaggaacugagagagcaacugucgucaguuagcaguuucgaaagguuugagauuuucccuaaggaguccucuuggccaaaucauacagugaccggugucagcgcauccugcucacacaacgggaagaguagcuuuuaccggaaucucuuauggcugacgaaaaagaacggacuuuaucccaauuugucuaaauccuacgugaacaauaaggaaaaagagguacugguucuauggggcgugcaucacccuucaaacaucggcgaucagcgcacuauauaccacaccgaaaacgccuaugucagcguggugaguucucauuacucccgacguuucacaccagagaucgcuaagagacccaaggucagggaccaggaagggcggauuaauuauuacuggacucuccuggagccuggagauaccaucauuuuugaggcaaacgguaaucuuaucgccccaugguaugcuuucgcccugagccgcggcuuugggucgggaauaauuacaucuaacgcgccgauggacgaaugugaugcaaaaugccagacgccccaaggcgccaucaauuccucauugccuuuccagaacguucacccaauuaccaucggugagugucccaaguacgugagaagugcuaaacucaggaugguaacugggcugcggaauaucccuagcauucagucccgcggauuauuuggcgccauagcaggcuucaucgaagggggauggacagguaugauugacggcugguauggguaccaucaccagaacgagcaaggaucuggcuacgcugccgaucaaaagagcacccagaaugcgaucaacgguauaacuaauaaagugaacucagucauugaaaagaugaauacacaguuuaccgccguggggaaagaguucaacaaucuggagcgaagaauggaaaaccucaacaagaagguugacgauggcuuccuugacaucuggacguauaaugcagagcuguuggugcuacuggaaaacgagaggacccucgacuuucacgauaguaaugucaaaaaccuguacgaaaaggugaaaucccagcuuaagaauaacgcuaaagagaucggaaauggcugcuucgaguuuuaucauaaguguaacaaugaaugcauggagagcguaaagaacgggacauacgacuauccaaaauacucugaagagucaaagcugaaucgggagaaaauugauggaguuaaguuggaaaguauggguguguaucagauccucgccauuuacagcacugucgcuuccucucugguguuacuggucucgcuaggcgccaucagcuucuggaugugcuccaacgggucacuccagugucguauaugcauuuga

SEQ ID NO: 137692 - RNA, 1698 nt, Artificial Sequence; identical to SEQ ID NO: 130163
  derived and/or modified CDS sequence (opt3) from hemagglutinin__InfluenzaA__AFO65027

SEQ ID NO: 137693 - RNA, 1698 nt, Artificial Sequence
  derived and/or modified CDS sequence (opt3) from hemagglutinin__InfluenzaA__AFO65038
augaaggccaaacugcucgugcuucugugcaccuucacagcuacuuacgcagacacgaucuguauuggcuaucacgccaacaauagcaccgauacagucgacacuguuuuggagaagaacgugaccguaacacauuccgugaauuuacuggaagauucucacaacgggaaacuaugccuccugaagggaauagcgccccuucagcuggguaauuguucagucgcuggcuggaucuuggggaacccugagugcgaacuccugauuaguaaagagagcugguccuacaucguggaaaccccaaauccggagaacggaacuuguuaucccggcuacuuugccgacuaugaggaacugagagagcaacucucuucgguuagcucauucgaaagguuugagauuuucccuaaggagaguuccuggccaaaucauacagugaccggugucucugcaagcugcucccacaacgggaagucaaguuuuuaccggaauuuacuguggcuuacgggaaagaacggcuuguaucccaaucugagcaugucuuacgugaacaauaaggaaaaagaggugcuaguucucuggggcgugcaucacccuccaaacaucgggaaccagcgcgcccuguaccacacugaaaaugcuuaugucuccguggugucaagccauuacagucgacguuucacccccgagauagcaaagagaccuaaagucagggaucaggaaggacggaucaacuauuacuggacacuucuggagccaggugacacuauuaucuuugaggccaauggcaacuugauugcuccgugguaugccuucgcgcucucucgcggguuuggauccggcaucauaaccagcaaugcacccauggaugaaugugacgccaagugccagacaccucaaggugcuauuaacucgucucugccauuccagaauguucaccccgugaccaucggggaguguccuaaguacguaagauccgccaaauuaaggauggugacgggacugcggaacauuccaucaauccagagucgcggccucuuuggcgcaaucgcuggguucauugaaggagguuggacuggcauggucgaugggugguauggauaccaucaccagaaugagcaaggcagcgguuacgccgcggaccagaaguccacacagaacgccauaaaugggaucaccaacaaaguaaauucuguuauugaaaagaugaacacucaguuuacagcagugggcaaagaguucaauaaacuugagcgaagaauggaaaaccugaacaaaaaggucgaugacggauucuuggauaucuggaccuauaaugcugagcuacuggugcuccuggaaaacgagaggacgcuugacuuucacgacagcaauguaaagaaccuguacgaaaaaguuaagucacaauugaaaaauaacgccaaggagauaggcaaugggugcuucgaguuuuaucauaaauguaacaaugaaugcauggagagugugaagaacggaaccuacgauuaucccaaguacuccgaagagagcaaacucaaucgggagaagauugacggugucaaacuggaaucuaugggcguguaucagaucuuagcuaucuacucaacagucgccaguagccuggugcuacucguuucccugggggcaauuucuuucuggaugugcucgaacggaagccuucagugucguaucugcauuuga

SEQ ID NO: 137694 - RNA, 1698 nt, Artificial Sequence
  derived and/or modified CDS sequence (opt3) from hemagglutinin__InfluenzaA__AFO66136
augaaggugaaacugcucguccuucugugcaccuucacagccacuuacgcugacacgaucuguauuggcuaucacgcaaacaauagcaccgauacaguugacacuguguuggagaagaacguaaccgugacacauuccgucaauuuacuggaagauucucacaacgggaaacuaugccuccugaagggaauagcgccccuucagcuggguaauuguucaguggccggcuggaucuuggggaacccugagugcgaacuccugauuaguaaagagagcugguccuacaucguugaaaccccaaauccggagaacggaacuuguuaucccggcuacuuugcugacuaugaggaacugagagagcaacucucuucggugagcucauucgaaagguuugagauuuucccuaaggagaguuccuggccaaaucauacagucaccggugugucugccagcugcucccacaacgggaagucaaguuuuuaccggaauuuacuguggcuuacgggcaaaaacggauuguaucccaaucugagcaagucuuacgcaaacaauaaagaaaaggaggugcuaguucucuggggcgugcaucacccuccaaacaucgggaaccagcgcgcccuguaccacacugaaaaugcuuaugucuccguggugucaagccauuacagucgacguuucacccccgagauagcaaaaagaccuaaggucagggaucaggaaggacggaucaacuauuacuggacacuucuggagccaggugacacuauuaucuuugaggccaauggcaacuugauugcuccgcgcuaugccuucgcgcucucuagaggguuuggauccggcaucauaaccagcaaugcacccauggaugaaugugacgccaagugccagacaccucaaggugcuauuaacucgucucugccauuccagaauguucaccccgugaccaucggggaguguccuaaauacguaagguccgccaaguuacggauggugacgggacugcgcaacauuccaucaauccagagucgaggccucuuuggcgcaaucgcuggguucauugaaggagguuggacuggcauggucgaugggugguauggauaccaucaccagaaugagcaaggcagcgguuacgccgcggaccagaaauccacacagaacgccauaaaugggaucaccaacaagguaaauucuguuauugaaaagaugaacacucaguuuacagcagugggcaaagaguucaauaaacuugagagaaggauggaaaaccugaacaagaaggucgaugacggauucuuggauaucuggaccuauaaugcugagcuacuggugcuccuggaaaacgagcggacgcuugacuuucacgacagcaauguuaaaaaccuguacgaaaagguaaaaucacaauugaagaauaacgccaaagagauaggcaaugggugcuucgaguuuuaucauaaguguaacaaugaaugcauggagagugugaagaacggaaccuacgauuaucccaaauacuccgaagagagcaagcucaaucgugagaaaauugacggugucaagcuggaaucuaugggcguguaucagaucuuagcuaucuacucaacagucgccaguagccuggugcuacucguuucccugggggcaauuucuuucuggaugugcucgaacggaagccuucagugucgcaucugcauuuga

SEQ ID NO: 137695 - RNA, 1701 nt, Artificial Sequence
  derived and/or modified CDS sequence (opt3) from hemagglutinin__InfluenzaA__AFO66147
augaaggccaaacugcucgugcuucugugcgcuuucaccacaacuuacgcagacacgaucuguauuggcuaucacgccaacaauagcaccgauacagucgacacuguuuuggagaagaacgugaccguaacacauuccgugaauuuacuggaagauucucacaacgggaaacuaugcagacucaagggaaccgcgccccugcagcuugguaauuguucaauagcuggcuggauccuggggaacccugagugcgaaaguuuguuuagcaaagaguccuggucuuacauugccgaaacuccaaauccgaagaacggaacauguuaucccggcuacuucgcagacuaugaggagcucagggaacaacugucgucagucagcaguuuugagcgguucgaaaucuuuccuaaggauuccucuuggccaaaucauaccgugacgaaagguguuacugccagcugcucccacaacgggaagucaaguuucuacaaaaaucugcucugguuaaccggaaagaacggccuguaucccaaucuuagcaaaucuuacgugaacaagaagggcaaagaggucuuggugcuguggggaguacaucacccuuccaauaugggggaccagcgcgcuauuuaccacaaggagaacgcauauguuucagugcuaagcagucauuacucucgacguuuuacaccagaaaucgccaaaagacccaaggucagggaucaggagggucggauaaacuauuacuggacucuccuggaaccuggcgacaccaucauuuucgaggcuaaugggaaccuuaucgccccaugguaugcguuugcacugucccgcggauucggcagcgguauuaucauaucgaaugccucuaugggggaaugugaugcuaaaugccagacaccgcaaggagccauuaacuccucauugcccuuucagaaugugcacccugugaccaucggcgaguguccaaaguacgucagaaguacgaaacucaggaugguuacuggccugcggaacgugcccagcauucagucccgcggguuauucggagcaaucgcugguuuuaucgagggcggguggacaggaaugauugacggcugguaugguuaccaucaccagaaugaacaagggucuggcuacgccgcggaucaaaagagcacccagaacgccauaaauggaaucacuaacaagguaaauucaauuaucgagaaaaugaacacacaguucaccgcagugggcaaggaguucaauaaacuggaacgaagaauggaaaaccucaauaagaaagucgacgauggguuucuugacauauggacguauaacgcugagcuguuggugcuacuggagaacgaaaggacccucgacuuccacgauaguaauguuaagaaccuguacgagaaggugaaaaaucagcuuaagaacaaugccaaagaaauuggaaacgguugcuuugaguucuaucauaaguguaauaacgaaugcauggaguccgucaaaaauggcacauacgacuauccuaaguacagcaaggagucuaaacugaaccgggaaaagaucgauggggugaaauuggagucaaugggaguauaucagauccucgcuauuuacaguacuguugccagcucccugguguuacuggucucucuaggcgcaaucucguuuuggaugugcagcaaugguucccuccagugucguauuugcauauga

SEQ ID NO: 137696 - RNA, 1698 nt, Artificial Sequence
  derived and/or modified CDS sequence (opt3) from hemagglutinin__InfluenzaA__AFO66158
augaaggccaaacugcucgugcuucugugcaccuucacagcuacuuacgcagacacgaucuguauuggcuaucacgccaacaauagcaccgauacagucgacacuguuuuggagaagaacgugaccguaacacauuccgugaauuuacuggaagauucucacaacgggaaacuaugccuccugaagggaauagcgccccuucagcuggguaauuguucagucgcuggcuggaucuuggggaacccugagugcgaacuccugauuaguaaaggaagcugguccuacaucguggagaccccaaauccggaaaacggcacuuguuaucccgguuacuuugccgacuaugaggagcugagagaacaacucucuucgguuucaucuuucgagagguuugaaauuuucccuaaggggaguuccuggccaaaucauacagugaccggagucucugcaagcugcucccacaacggcaagucaaguuuuuaccggaauuuacuguggcuuacgggcaaaaacggguuguaucccaaucugagcaugucuuacgugaacaauaaggagaaagagguacuuguucucuggggagugcaucacccuccaaacaucgguaaccagcgcgcccuguaccacacugaaaaugcuuaugucuccguggugucaagccauuacagucgacguuucacccccgagauagcaaagagaccuaaagucagggaucaggaaggccggaucaacuauuacuggacacuucuggagccaggggacacuauuaucuuugaagccaauggaaacuugauugcuccgugguaugccuucgcgcucucucgcggcuuugguuccgggaucauaaccagcaaugcacccaugggagagugugaugccaagugccagacaccucaaggcgcuauuaacucgucucugccauuccagaauguucaccccgugaccaucggcgaguguccuaaguacguaagauccgccaaauuaaggauggugacggggcugcggaacauuccaucaauccagagucgcggacucuuuggugcaaucgcuggcuucauugaagggggauggacuggcauggucgacgguugguauggguaccaucaccagaaugagcaaggcagcggauacgccgcggaucagaaguccacacagaacgccauaaauggcaucaccaacaaagugaauagcguuauugaaaagaugaacacucaguuuacagcaguggggaaagaguucaauaagcuagaacgaagaauggagaaccugaacaaaaaggucgacgauggauucuuggacaucuggaccuauaaugcugagcuacuggugcuccuggaaaacgagaggacgcuugauuuucacgacagcaauguaaagaaccuguacgaaaaaguuaagucacaauugaaaaauaacgccaaggagauagguaauggcugcuucgaauuuuaucauaaauguaacaaugagugcauggagagugugaagaacgggaccuacgacuaucccaaguacuccgaagagagcaaacucaaucgggaaaagauugauggagucaaacuggagucuaugggcguguaucagaucuuagcuaucuacucaacagucgccaguagccuggugcuacucguuucccugggugcaauuucuuucuggaugugcucgaacgggagccuucagugucguaucugcauuuga

SEQ ID NO: 137697 - RNA, 1698 nt, Artificial Sequence
  derived and/or modified CDS sequence (opt3) from hemagglutinin__InfluenzaA__AFO66169
augaaggugaaacugcucguccuucugugcaccuucacagccacuuacgcugacacgaucuguauuggcuaucacgcaaacaauagcaccgauacaguugacacuguguuggagaagaacguaaccgugacacauuccgucaauuuacuggaagauucucacaacgggaaacuaugccuccugaagggaauagcgccccuucagcuggguaauuguucaguggccggcuggaucuuggggaacccugagugcgaacuccugauuaguaaagagagcugguccuacaucguugaaaccucuaauccagagaacggaacuuguuauccgggcuacuuuacagacuaugaggaacugagagagcaacucucgucagugagcaguuucgaaagguuugagauuuuccccaaggaguccucuuggccuaaucauaccgucacgggugugagcgcuuccugcucacacaacgggaagaguagcuuuuacaaaaauuuacuguggcuuacuggaaagaacggcuuguauccaaaucugucuaaauccuacgccaacaauaaggaaaaagagguacuuguucucuggggcgugcaucaucccccuaacaucggggaucagcgggcacuguaccacaccgaaaacgccuaugucucaguggugagcagucacuacucucgccgauucacaccagagauagcuaagcgucccaaggucagagaccaggaaggaaggaucaauuauuacuggacucuucuggagccuggugauaccauuaucuuugaggcaaacggcaauuugauugccccacgguaugcuuucgcccucucccgcggguuuggaagcggcaucauaacaucgaacgcgccgauggacgaaugugaugcaaaaugccagacgccccacggugccauuaauucuucccugccuuuccaaaacguucauccagugaccaucggggagugucccaaguacguaagaucagcuaaauuaaggauggugacuggacugcggaauauuccuaguauccagagccgcggccucuuuggcgccaucgcaggguucauugaaggagguuggacaggcauggucgacgggugguauggauaccaccaccagaacgagcagggcuccgguuacgcugccgaucaaaagucuacccagaaugcgauaaacgggaucacuaauaaagugaacagcguuauugaaaagaugaauacacaguuuaccgccgugggcaaagaguucaacaagcuagagcgaagaauggaaaaucugaacaagaaagucgacgauggauucaucgacauauggacguauaacgcagaguugcuagugcugcucgaaaaugagaggacccuggacuuucaugauucaaacguaaagaaucuuuacgaaaaaguuaagagucagcugaaaaacaaugcuaaggagauuggcaacgggugcuucgaguuuuaucacaaguguaaugacgaaugcauggaguccgugaaaaacggaacauacgauuauccaaaguacagcgaagagucuaaauugaaucgggagaagaucgacggugucaaacucgaaucaaugggcguguaucaaauccuggccauuuacaguacugucgcuagcuccuuagugcugcuaguuucucucggggccaucucguucuggaugugcagcaacggaucccugcagugucguauuugcauauga

SEQ ID NO: 137698 - RNA, 1698 nt, Artificial Sequence
  derived and/or modified CDS sequence (opt3) from hemagglutinin__InfluenzaA__AFO66180
augaaggccaaacugcucgugcuucugugcaccuucacagcuacuuacgcagacacgaucuguauuggcuaucacgccaacaauagcaccgauacagucgacacuguuuuggagaagaacgugaccguaacacauuccgugaauuuacuggaagauucucacaacgggaaacuaugccuccugaagggaauagcgccccuucagcuggguaauuguucagucgcuggcuggaucuuggggaacccugagugcgaacuccugauuaguaaagagagcugguccuacaucguggaaaccccaaauccggagaacggaacuuguuaucccggcuacuuugccgacuaugaggaacugagagagcaacucucuucgguuucaucuuucgaaagguuugagauuuucccuaaggguaguuccuggccaaaucauacagugaccggggucucugcaagcugcucccacaacggaaagucaaguuuuuaccggaauuuacuguggcuuacgggcaaaaacggcuuguaucccaaucugagcaugucuuacgugaacaauaaggagaaagaaguacuuguucucuggggagugcaucacccuccaaacaucggggaucagcgcgcccuguaccacacugagaacgcuuaugucuccguggugucaagccauuacagucgacguuucacccccgaaauagcaaagagaccuaaagucaggaaucaggagggucggaucaacuauuacuggacacuucuggaaccaggcgacacuauuaucuuugaggccaaugggaacuugauugcuccgugguaugccuucgcgcucucucgcggauuuggcuccgguaucauaaccagcaaugcacccaugggggagugugaugccaagugccagacaccucaaggagcuauuaacucgucucugccauuccagaauguucaccccgugaccaucggcgaauguccuaaguacguaagauccgccaaauuaaggauggugacgggccugcggaacauuccaucaauccagagucgcgggcucuuuggagcaaucgcugguuucauugagggcggguggacuggaauggucgacggcugguaugguuaccaucaccagaaugaacaagggagcggcuacgccgcggaucagaaguccacacagaacgccauaaauggaaucaccaacaaagugaauagcguuauugagaagaugaacacucaguuuacagcagugggcaaagaguucaauaagcuagaacgaagaauggagaaccugaacaaaaaggucgacgauggguucuuggacaucuggaccuauaaugcugaacuacuggugcuccuggagaacgaaaggacgcuugauuuucacgacagcaauguaaagaaccuguacgagaaaguuaagucacaauugaaaaauaacgccaaggaaauaggaaaugguugcuucgaguuuuaucauaaauguaacaaugagugcauggaaagugugaagaacggcaccuacgacuaucccaaguacuccgaggaaagcaaacucaaucgggagaagauugauggggucaaacuggagucuaugggaguguaucagaucuuagcuaucuacucaacagucgccaguagccuggugcuacucguuucccugggcgcaauuucuuucuggaugugcucgaacgguagccuucagugucguaucugcauuuga

SEQ ID NO: 137699 - RNA, 1698 nt, Artificial Sequence
  derived and/or modified CDS sequence (opt3) from hemagglutinin__InfluenzaA__AFO66191
augaaggccaaacugcucgugcuucugugcaccuucacagcuacuuacgcagacacgaucuguauuggcuaucacgccaacaauagcaccgauacagucgacacuguuuuggagaagaacgugaccguaacacauuccgugaauuuacuggaagauucucacaacgggaaacuaugccuccugaagggaauagcgccccuucagcuggguaauuguucagucgcuggcuggaucuuggggaacccugagugcgaacuccugauuaguaaagagagcugguccuacaucguggaaaccccaaauccggagaacggaacuuguuaucccggcuacuuugccgacuaugaggaacugagagagcaacucucuucgguuucaucuuucgaaagguuugagauuuucccuaaggguaguuccuggccaaaucauacagugaccggggucucugcaagcugcucccacaacggaaagucaaguuuuuaccggaauuuacuguggcuuacgggcaaaaacggcuuguaucccaaucugagcaugucuuacgugaacaauaaggagaaagaaguacuuguucucuggggagugcaucacccuccaaacaucgggaaccagcgcgcccuguaccacacugagaaugcuuaugucuccguggugucaagccauuacagucgacguuucacccccgaaauagcaaagagaccuaaagucagggaucaggagggucggaucaacuauuacuggacacuucuggaaccaggcgacacuauuaucuuugaggccaaugggaacuugauugcuccgugguaugccuucgcgcucucucgcggauuuggcuccgguaucauaaccagcaaugcacccauggaugagugugacgccaagugccagacaccucaaggggcuauuaacucgucucugccauuccagaauguucaccccgugaccaucggagaauguccuaaguacguaagauccgccaaauuaaggauggugacgggccugcggaacauuccaucaauccagagucgcggccucuuuggggcaaucgcuggauucauugaggguggcuggacugggauggucgauggaugguauggcuaccaucaccagaaugaacaagguagcggguacgccgcggaccagaaguccacacagaacgccauaaauggcaucaccaacaaagugaauagcguuauugagaagaugaacacucaguuuacagcagugggaaaagaguucaauaagcuagaacgaagaauggagaaccugaacaaaaaggucgaugacggcuucuuggauaucuggaccuauaaugcugaacuacuggugcuccuggagaacgaaaggacgcuugacuuucacgacagcaauguaaagaaccuguacgagaaaguuaagucacaauugaaaaauaacgccaaggaaauagggaauggaugcuucgaguuuuaucauaaauguaacaaugagugcauggaaagugugaagaacgguaccuacgauuaucccaaguacuccgaggaaagcaaacucaaucgggagaagauugacggcgucaaacuggagucuauggggguguaucagaucuuagcuaucuacucaacagucgccaguagccuggugcuacucguuucccugggagcaauuucuuucuggaugugcucgaacggcagccuucagugucguaucugcauuuga

SEQ ID NO: 137700 - RNA, 1698 nt, Artificial Sequence; identical to SEQ ID NO: 128560
  derived and/or modified CDS sequence (opt3) from hemagglutinin__InfluenzaA__AFO66202

SEQ ID NO: 137701 - RNA, 1698 nt, Artificial Sequence
  derived and/or modified CDS sequence (opt3) from hemagglutinin__InfluenzaA__AFO66213
augaaggugaaacugcucguccuucugugcaccuucacagccacuuacgcugacacgaucuguauuggcuaucacgcaaacaauagcaccgauacaguugacacuguguuggagaagaacguaaccgugacacauuccgucaauuuacuggaagauucucacaacgggaaacuaugccuccugaagggaauagcgccccuucagcuggguaauuguucaguggccggcuggaucuuggggaacccugagugcgaacuccugauuaguaaagagagcugguccuacaucguugaaaccccaaauccggagaacggaacuuguuaucccggcuacuuugcugacuaugaggaacugagagagcaacucucuucggugagcucauucgaaagguuugagauuuucccuaaggagaguuccuggccaaaucauacagucaccggugugucugccagcugcucccacaacgggaagucaaguuuuuaccggaauuuacuguggcuuacgggaaagaacggcuuguaucccaaucugagcaagucuuacgcaaacaauaaaaagaaagaagugcuaguucucuggggcgugcaucacccuccaaacaucgggaaccagcgcgcccuguaccacacugagaaugcuuaugucuccguggugucaagccauuacagucgacguuucacccccgaaauagcaaagagaccuaaggucagggaucaggagggacggaucaacuauuacuggacacuucuggaaccaggugacacuauuaucuuugaggccaauggcaacuugauugcuccgcgcuaugccuucgcgcucucuagaggguuuggauccggcaucauaaccagcaaugcacccauggaugagugugacgccaaaugccagacaccucaaggugcuauuaacucgucucugccauuccagaauguucaccccgugaccaucggggaauguccuaaguacguaagguccgccaaauuacggauggugacgggacugcgcaacauuccaucaauccagagucgaggccucuuuggcgcaaucgcuggguucauugagggagguuggacuggcauggucgaugggugguauggauaccaucaccagaaugaacaaggcagcgguuacgccgcggaccagaaguccacacagaacgccauaaaugggaucaccaacaaaguaaauucuguuauugagaagaugaacacucaguuuacagcagugggcaaagaguucaauaaacuugaaagaaggauggagaaccugaacaagaaagucgaugacggauucuuggauaucuggaccuauaaugcugaacuacuggugcuccuggagaacgaacggacgcuugacuuucacgacagcaauguaaagaaccuguacgagaaaguuaagucacaauugaaaaauaacgccaaggaaauaggcaaugggugcuucgaguuuuaucauaaguguaacgaugagugcauggaaagugugaaaaauggaaccuacgacuaucccaaguacuccgaggaaagcaaacucaaccgugagaagauugauggugucaaacuggagucuaugggcguguaucagaucuuagcuaucuacucaacagucgccaguagccuggugcuacucguuucccugggggcaauuucuuucuggaugugcucgaauggaagccuucagugucgcaucugcauuuga

SEQ ID NO: 137702 - RNA, 1698 nt, Artificial Sequence
  derived and/or modified CDS sequence (opt3) from hemagglutinin__InfluenzaA__AFO66224
augaaggugaaacugcucguccuucugugcaccuucacagccacuuacgcugacacgaucuguauuggcuaucacgcaaacaauagcaccgauacaguugacacuguguuggagaagaacguaaccgugacacauuccgucaauuuacuggaagauucucacaacgggaaacuaugccuccugaagggaauagcgccccuucagcuggguaauuguucaguggccggcuggaucuuggggaacccugagugcgaacuccugauuaguaaagagagcugguccuacaucguugaaaccccaaauccggagaacggaacuuguuaucccggcuacuuugcugacuaugaggaacugagagagcaacucucuucggugagcucauucgaaagguuugagauuuucccuaaggagaguuccuggccaaaucauacagucaccggugugucugccagcugcucccacaacgggaagucaaguuuuuaccggaauuuacuguggcuuacgggcaaaaacggauuguaucccaaucugagcaagucuuacgcaaacaauaaagaaaaggaggugcuaguucucuggggcgugcaucacccuccaaacaucgggaaccagcgcgcccuguaccacacugaaaaugcuuaugucuccguggugucaagccauuacagucgacguuucacccccgagauagcaaaaagaccuaaggucagggaucaggaaggacggaucaacuauuacuggacacuucuggagccaggugacacuauuaucuuugaggccaauggcaacuugauugcuccgcgcuaugccuucgcgcucucuagaggguuuggauccggcaucauaaccagcaaugcacccauggaugaaugugacgccaagugccagacaccucaaggugcuauuaacucgucucugccauuccagaauguucaccccgugaccaucggggaguguccuaaauacguaagguccgccaaguuacggauggugacgggacugcgcaacauuccaucaauccagagucgaggccucuuuggcgcaaucgcuggguucauugaaggagguuggacuggcauggucgaugggugguauggauaccaucaccagaaugagcaaggcagcgguuacgccgcggaccagaaauccacacagaacgccauaaaugggaucaccaacaagguaaauucuguuauugaaaagaugaacacucaguuuacagcagugggcaaagaguucaauaaacuugagagaaggauggaaaaccugaacaagaaggucgaugacggauucuuggauaucuggaccuauaaugcugagcuacuggugcuccuggaaaacgagcggacgcuugacuuucacgacagcaauguuaaaaaccuguacgaaaagguaaaaucacaauugaagaauaacgccaaagagauaggcaaugggugcuucgaguuuuaucauaaguguaacgaugaaugcauggagagugugaagaauggaaccuacgacuaucccaaauacuccgaagagagcaagcucaaccgugagaaaauugauggugucaagcuggaaucuaugggcguguaucagaucuuagcuaucuacucaacagucgccaguagccuggugcuacucguuucccugggggcaauuucuuucuggaugugcucgaauggaagccuucagugucgcaucugcauuuga

SEQ ID NO: 137703 - RNA, 1698 nt, Artificial Sequence
  derived and/or modified CDS sequence (opt3) from hemagglutinin__InfluenzaA__AFO66235
augaaggugaaacugcucguccuucugugcaccuucacagccacuuacgcugacacgaucuguauuggcuaucacgcaaacaauagcaccgauacaguugacacuguguuggagaagaacguaaccgugacacauuccgucaauuuacuggaagauucucacaacgggaaacuaugccuccugaagggaauagcgccccuucagcuggguaauuguucaguggccggcuggaucuuggggaacccugagugcgaacuccugauuaguaaagagagcugguccuacaucguugaaaagccaaauccggagaacggaaccuguuaucccggccauuuugcugacuacgaggaacugagagagcaacucucuucggugagcucauucgaaagguuugagauuuucccuaaggagaguuccuggccaaaucacacugucacaggugugucugccagcugcucccauaacgggaaaucaaguuuuuauaagaauuuacuguggcuuaccggcaaaaacggauuguaccccaaucugagcaagucuuaugcaaacaauaaagaaaaggagguucuaguacucuggggcgugcaccacccuccaaacaucgggguccagcgggcccuguaccauacggaaaacgcuuacguguccguggucucaagccacuauagucgcaaguucacucccgagauagcaaaacgaccuaagguucgugaucaggaaggaagaaucaauuacuauuggacccuucuggagccaggugacacaauuaucuuugaggccaacggcaauuugauugcuccgagguacgccuucgcgcucucucggggguuuggauccggcaucauaaacagcaaugcacccauggaugaaugugacgccaaaugccagacuccucaaggugcuauuaacucgucucugccauuccagaaugugcaucccguaaccaucggggaguguccuaaguaugugcgcuccgccaaauuaagaauggucacaggacugaggaacauuccaucaauccagagucggggccucuuuggcgcaaucgcuggguucauugaaggagguuggaccggcaugguggaugggugguacggauaucaccaccagaaugagcaaggcagcgguuacgccgcggaccagaaguccacgcagaacgccauaaaugggaucacuaacaaaguuaauucugugauugaaaagaugaacacacaguuuaccgcagucggcaaggaguucaauaaacuugagcgccgaauggaaaaccugaacaagaaaguggaugacggauucaucgauauauggacuuacaaugcugaguugcuaguacugcucgaaaacgagagaacacuggacuuucaugacagcaauguuaagaaccuuuaugaaaaagugaagucacaacugaagaauaacgccaaagagauuggcaaugggugcuucgaguuuuaccacaaguguaacgaugaaugcauggagagugucaaaaauggaaccuaugacuaccccaaguauuccgaagagagcaaauugaacagggagaagaucgauggugugaagcucgaaucuaugggcgucuaccagauccuggcuauuuauucaacgguggccaguagcuuaguucugcuagugucccucggggcaaucucuuucuggaugugcucgaauggaagccugcagugucggauuugcauauga

SEQ ID NO: 137704 - RNA, 1698 nt, Artificial Sequence
  derived and/or modified CDS sequence (opt3) from hemagglutinin__InfluenzaA__AFO66246
augaaggugaaacugcucguccuucugugcaccuucacagccacuuacgcugacacgaucuguauuggcuaucacgcaaacaauagcaccgauacaguugacacuguguuggagaagaacguaaccgugacacauuccgucaauuuacuggaagauucucacaacgggaaacuaugccuccugaagggaauagcgccccuucagcuggguaauuguucaguggccggcuggaucuuggggaacccugagugcgaacuccugauuaguaaagagagcugguccuacaucguugaaaagccaaauccggagaacggaaccuguuaucccggccauuuugcugacuacgaggaacugagagagcaacucucuucggugagcucauucgaaagguuugagauuuucccuaaggagaguuccuggccaaaucacacugucacaggugugucugccagcugcucccauaacgggaaaucaaguuuuuauaagaauuuacuguggcuuaccggaaagaacggcuuguaccccaaucugagcaagucuuaugcaaacaauaaagaaaaggagguucuaguacucuggggcgugcaccacccuccaaacaucgggaaccagcgggcccuguaccauacggaaaaugcuuacgucuccguggugucaagccacuauagucgcaaguucacucccgagauagcaaaacgaccuaagguccgugaucaggaaggaagaaucaacuacuauuggacccuucuggagccaggugacacaauuaucuuugaggccaauggcaacuugauugcuccgagguacgccuucgcgcucucucggggguuuggauccggcaucauaaauagcaacgcacccauggaugaaugugacgccgagugccagacuccucaaggugcuauuaauucgucucugccauuccagaacguucaucccgugaccaucggggaauguccuaaauauguacgcuccgccaaguuaagaauggugacaggacugaggaauauuccaucaauccagagucggggccucuuuggcgcaaucgcuggguucauugagggagguuggaccggcauggucgaugggugguacggauaucaccaccagaacgaacaaggcagcgguuacgccgcggaccagaaauccacgcagaaugccauaaacgggaucacuaauaaggugaacucuguuauugagaaaaugaauacacaguuuaccgcagugggcaaggaguucaacaaacuugaacgccgaauggagaaccugaauaaaaaggucgaugacggauucaucgauauauggacuuacaacgcugaauugcuagugcugcucgagaaugaaagaacacuggacuuucaugacagcaacguuaaaaaucuuuaugagaagguaaaaucacaacugaagaacaaugccaaggagauuggcaacgggugcuucgaauuuuaccacaaauguaaugaugagugcauggaaagugugaagaacggaaccuaugacuaccccaaauauuccgaggagagcaaguugaauagggagaaaaucgauggugucaagcucgaaucuaugggcguguaccagauccuggcuauuuauucaacggucgccaguagcuuagugcugcuaguuucccucggggcaaucucuuucuggaugugcucgaacggaagccugcagugucggauuugcauauga

SEQ ID NO: 137705 - RNA, 1701 nt, Artificial Sequence
  derived and/or modified CDS sequence (opt3) from hemagglutinin__InfluenzaA__AFP33324
augaaggccaaacugcucgugcuucugugcaccuucacagcuacuuacgcagacacgaucuguauuggcuaucacgccaacaauagcaccgauacagucgacacuguuuuggagaagaacgugaccguaacacauuccgugaauuuacuggaagauucucacaacgggaaacuaugcagacucaagggaaccgcgccccugcagcuugguaauuguucaauagcuggcuggauccuggggaacccugagugcgaaaguuuguuuagcaaagaguccuggucuuacauugccgaaacuccaaauccgaagaacggaacauguuaucccggcuacuucgcagacuaugaggagcucagggaacaacugucgucagucagcaguuuugagcgguucgaaaucuuuccuaaggauuccucuuggccaaaucauaccgugacgaaagguguuacugccagcugcucccacaacgggaagucaaguuucuacaaaaaucugcucugguuaaccggaaagaacggccuguaucccaaucuuagcaaaucuuacgugaacaagaagggcaaagaggucuuggugcuguggggaguacaucacccuuccaauaugggggaccagcgcgcuauuuaccacaaggagaacgcauauguuucagugcuaagcagucauuacucucgacguuuuacaccagaaaucgccaaaagacccaaggucagggaucaggagggucggauaaacuauuacuggacucuccuggaaccuggcgacaccaucauuuucgaggcuaaugggaaccuuaucgccccaugguaugcguuugcacugucccgcggauucggcagcgguauuaucauaucgaaugccucuaugggggaaugugaugcuaaaugccagacaccgcaaggagccauuaacuccucauugcccuuucagaaugugcacccugugaccaucggcgaguguccaaaguacgucagaaguacgaaacucaggaugguuacuggccugcggaacgugcccagcauucagucccgcggguuauucggagcaaucgcugguuuuaucgagggcggguggacaggaaugauugacggcugguaugguuaccaucaccagaaugaacaagggucuggcuacgccgcggaucaaaagagcacccagaacgccauaaauggaaucacuaacaagguaaauucaauuaucgagaaaaugaacacacaguucaccgcagugggcaaggaguucaauaaacuggaacgaagaauggaaaaccucaauaagaaagucgacgauggguuucuugacauauggacguauaacgcugagcuguuggugcuacuggagaacgaaaggacccucgacuuccacgauaguaauguuaagaaccuguacgagaaggugaaaacacagcuuaagaauaacgccaaagaaauuggaaaugguugcuuugaguucuaucauaaguguaacaaugaaugcauggaguccgucaaaaacggcacuuacgacuauccuaaguacagcaaggagucuaaacugaaucgggaaaagaucgauggggugaaauuggagucaaugggaguauaucagauccucgcuauuuacaguaccguugccagcucccugguguuacuggucucucuaggcgcaaucucguuuuggaugugcagcaacgguucccuccagugucguauuugcauauga

SEQ ID NO: 137706 - RNA, 1698 nt, Artificial Sequence
  derived and/or modified CDS sequence (opt3) from hemagglutinin__InfluenzaA__AFP33325
augaaggugaaacugcucguccuucugugcaccuucacagccacuuacgcugacacgaucuguauuggcuaucacgcaaacaauagcaccgauacaguugacacuguguuggagaagaacguaaccgugacacauuccgucaauuuacuggaagauucucacaacgggaaacuaugccuccugaagggaauagcgccccuucagcuggguaauuguucaguggccggcuggaucuuggggaacccugagugcgaacuccugauuccaaaagagaguuggagcuacaucguugaaaccccgaaucccgagaacggaacuuguuauccuggcuacuuugcugacuaugaggaacugagagagcaacucuccucugugucgucauucgaaagguuugagauuuucccaaaggagagcaguuggcccucccauacagucaccggugugucugccagcugcucccacaaugggaagucaaguuuuuaccggaacuuacuguggcuuacgggcaaaaauggauuguauccuaaccugagcaagucuuacuccaauaacaaagaaaaggagguucuaguacucuggggcgugcaucacccacccaauaucggggaucagcgcgcacuguaccacacugaaaacgccuaugucucaguggugagcagucauuacucucgacguuucaccccugagauagcuaaaagaccaaaggucaggggacaggaaggucggaucaacuauuacuggacacuucuggagccgggcgacacuauuaucuuugaggcaaaugggaacuugauugcccccugguaugcuuucgcccucucccgcggauuuggcagcgguaucauaaccucgaaugcgccuauggaugaaugugacgcaaagugccagacaccacaaggggccauuaacucuucccugcccuuccagaauguucacccugugaccaucggagaguguccaaaauacguaagaucagcuaaguuaaggauggugacgggccugcggaacauucccaguauccagagccgcggccucuuuggggccaucgcaggauucauugaagguggcuggacugggauggucgauggaugguauggcuaccaucaccagaaugagcaagguuccggguacgcugccgaccagaaaucuacacagaacgcgauaaauggcaucaccaacaaggugaauagcguuauugaaaagaugaacacucaguuuacagccgugggaaaagaguucaauaaacuugagcgaagaauggaaaaccugaauaagaaggucgaugacggcuucuuggauaucuggaccuauaacgcagagcuacuggugcuccuggaaaacgagaggacgcuugacuuucacgacucaaauguuaaaaaccuguacgaaaagguaaaaagucaauugaagaauaacgcuaaagagauagggaauggaugcuucgaguuuuaucauaaguguaacgaugaaugcauggaguccgugaagaaugguaccuacgacuauccgaaauacagcgaagagucuaagcucaaccgggagaaaauugauggcgucaagcuggaaucaauggggguguaucagaucuuagccaucuacaguacagucgcuagcucccuggugcuacucguuucucugggagccauuucguucuggaugugcagcaauggcucccuucagugucguaucugcauuuga

SEQ ID NO: 137707 - RNA, 1701 nt, Artificial Sequence
  derived and/or modified CDS sequence (opt3) from hemagglutinin__InfluenzaA__AFQ32573
augaagaccaucauugcccugagcuacauacucugccuuguguucgcucagaaacugcccggcaacgacaauuccacagcaacuuuguguuuagggcaccaugccgucccuaacggaacgaucguuaagaccauuacaaaugaucaaaucgaggugacuaacgcgaccgaacugguacagucuucaaguacaggugagauuugcaauagcccacaccagauccuagacggcgaaaacuguacccucauagaugcucugcuuggggacccgcagugcgauggauuucaaaauaaaaagugggaccuguucguggagagauccaaagcccauucuaacuguuaucccuacgaugucccugacuaugcaucguugaggucacucguggccagcaguggcacucuggaauuuaauaacgaguccuucaauuggacagguguuacccagaacgggacgucuagcgcuugcauccggcgcuccaauaacucauuuuucagucgacugaauuggcucacucacuuaaacuuuaaguacccagcacugaacgugaccaugcccaauaacgagcaguucgauaagcuguauauuuggggaguccaucacccuggcacagacaaagaucagaucuuuuuguacgcccaagcuagcggccguauuacugugucuaccaagagaucccagcaggccguaaucccaaauauagggucaaggccccggguucgcaacauuccuagcagagugaguaucuauuggacaauugucaaaccaggagacauccugcuaaucaauucuaccgguaaccucauugcgccgaggggcuacuucaagauacgguccgggaaaagcucgaucaugcgcucugaugcacccauuggaaaguguaauuccgccugcaucacgccuaacggcucaauaccaaaugacaagcccuuucagaacgugaaucgaauuacuuacggugcuuguccuagauaugugaaacaaaacacacugaaacuugccaccgggaugaggaaugucccagaaaagcagacucggggaaucuucggcgcaaucgcuggcuuuauugagaacgggugggaaggaaugguugacgguugguacggcuuccgucaccagaauagugaggggcgcggacaagccgcggaucuuaagagcacacaggccgcaaucgaccagauuaacggcaaauugaacagacucauagguaagaccaaugagaaauuccaucagaucgaaaaggaguuuuccgaaguggaggggaggauucaagaucuggaaaaguauguaggcgacacgaaaaucgauuuauggucuuacaacgcugagcugcucguggcccuugagaaucagcacaccaucgaccugacagauagcgaaaugaacaaguuguucgagaaaacuaagaaacagcuacgggaaaaugcugaggacaugggaaacggcugcuuuaagauuuaucauaagugugauaaugccugcauagggucaauccgaaacggaaccuacgaccacgaugucuaucgcgacgaagcacugaauaacagauuccagauuaaagguguggagcucaagaguggcuacaaagacuggauccuguggauuuccuuugccaucagcugcuuccuucuguguguugcuuugcucggguuuauaaugugggcgugccaaaagggaaauaucagguguaacauuugcaucuga

SEQ ID NO: 137708 - RNA, 1701 nt, Artificial Sequence
  derived and/or modified CDS sequence (opt3) from hemagglutinin__InfluenzaA__AFQ37281
augaaggccauccuggugguccuccuuuacaccuucgcuacaacuaacgcagacacgcugugcauuggcuaucacgccaauaacagcaccgauacaguugacacuguguuggagaagaauguaaccgugacacauuccgucaacuuacuggaagauaagcacaaugggaaacuauguaagcucagaggaguggcgccccugcaucuugguaaaugcaacauagcuggcuggauccuggggaauccugagugugaaucuuugucaaccgccaguagcugguccuacauuguugagacuucuucgucagacaacggaacaugcuauccaggcgauuuuaucgacuacgaggagcucagggagcagcugagcaguguguccucuuucgaacgguuugagauuuucccgaagaccagcuccuggcccaaucacgauucaaacaagggugucacggcagccuguccucaugcuggggcaaaaaguuuuuauaagaaucugaucuggcucgugaaaaagggaaacagcuacccaaaauuaucuaaguccuauauaaaugacaagggcaaagaaguacugguucuuuggggcauccaccaccccucaacuagcaccgaucaacagaguuuguaccagaacgccgacgcuuacguguucgucgggacaucucgcuauuccaagaaauuuaagccugagauugccauccgaccaaaagugcgugauagagagggaaggaugaauuacuauuggacucugguggaacccggugacaagauuaccuucgaggcgacaggcaaccuagucguuccucgguacgcauuugccauggaacgcaacgcugggagcggaaucauaauuucggauaccccagcccaugacugcaauacgacuugucagacaccgaaaggcgcaaucaacaccucucuccccuuccaaaaugugcacccuauuacuaucgguaagugcccaaaguauguaaaauccacaaagcugagacuugcuaccgggcugaggaacgugcccucaauccagagucggggauuguuuggcgccauugcgggcuucauagaagggggauggacggguauggucgacggcugguacggguaucaucaccagaaugaacagggaagcggcuacgccgcagaucucaaauccacccaaaacgcuaucgacaagauuacaaauaaagugaacucuguuaucgagaagaugaauacucaguuuaccgccguggguaaggaguucaaccaccuggaaaaacgcauagagaauuuaaacaagaaagucgaugacggguuccuggauauuuggacauacaaugcugaacuccuugugcuguuggagaacgaacgaacucuagacuaucaugauagcaauguaaagaaccuguacgagaaaguuagaucacagcucaagaacaaugccaaggagaucggcaacggauguuuugaguucuaucacaaaugcgacgauaaguguauggaaagugugaaaaauggcaccuacgacuauccuaaguacuccgaagaggcaaaacugaacagggaagagaucgauggggucaaacuugagagcacacggauuuaucagauccuggccauuuacucuaccgcugcgucaaguuuggugcucgucgugagccugggagcaauauccuuuuggaugugcucuaaugguucguuacaaugccguaucuguauuuga

SEQ ID NO: 137709 - RNA, 1707 nt, Artificial Sequence
  derived and/or modified CDS sequence (opt3) from hemagglutinin__InfluenzaA__AFQ55689
augaacacccagauccuggcccucauugcuugcaugcuuauaggcgcaaagggggacaaaaucugucugggacaccaugccguggcgaaugguacaaaggucaacacuuugacggagagaggcauugaaguugugaaugcuaccgagacaguagaaacugccaacaccaaaaagaucugcacacaagggaaaaggcccaccgauuuaggacaguguggccugcuagguacucucauugggccuccacagugcgaccaguuccuggaguuugaugcagaccuuaucauagaacggcgcgagggaacagauguguguuacccgggcaaguucaccaaugaggaaagccugcgacaaaucuugcguggcuccgggggaauugacaaggagucuauggguuuuacguauucaggcaucagaacuaacggggccaccagugcuugcaggcggagcggauccucuuucuacgcagaaaugaaauggcuccugucuaauucagauaacgccgcuuuuccccagaugacaaagagcuaucgcaauccuagaaacaaaccagcccugauuaucuggggcguccaccauagugguuccgcgacugagcagaccaagcucuacgggucuggaaauaaauuaauaacagugggcagcuccaaguaucagcaaucauucacccccaguccuggcgcaaggccacagguuaacgggcagagcggacggauugacuuucacuggcugcuuuuggaucccaaugacacggugacuuucacauuuaacggugccuucaucgcuccugaucgcgccucguuuuuccgaggcgaguccauugggguccagucagacgugccacuggauagcggaugugaaggcgacugcuuucauaauggugggaccaucguaaguucucuaccguuccaaaacaucaaccccagaacuguuggcaaguguccuagguacgugaaacagacaucccuccugcuugcaaccggaaugcggaaugucccagagaaccccaaggaccguaaaagccgccacagaaggacgcggggccuguucggggcuauugccggauuuauagaaaaugguugggagggcuugaucgaugggugguauggauuccgacaccagaacgcgcaaggcgaagguaccgccgcagacuacaagucgacacagucugcuauugaucagaucacugggaaacucaaucgccugauagacaagaccaaccagcaauuugaguuaauugauaaugaguucuccgaaaucgagcagcagaucggcaacgugauuaauuggacaagagacucaaugacugaaguguggaguuacaacgccgagcugcucgucgcuauggaaaaucagcauaccaucgaucuugccgacagcgagaugaacaaacuguaugagaggguucggaagcaauugcgcgaaaaugcagaggaagauggaacaggcugcuuugagauuuuccacaagugugacgaucagugcauggaauccauaagaaacaauaccuacgaccauacucaguauagggccgagucucuacagaaccguauccaaauugacccugugaaacugagcucaggguacaaggauaucauccucugguuuaguuucggagcuuccugcuuucugcuucuggcgauugcaauggguuugguauucauauguaucaaaaacggcaauaugcggugcacgauuuguaucuga

SEQ ID NO: 137710 - RNA, 1701 nt, Artificial Sequence; identical to SEQ ID NO: 136234
  derived and/or modified CDS sequence (opt3) from hemagglutinin__InfluenzaA__AFR68153

SEQ ID NO: 137711 - RNA, 1701 nt, Artificial Sequence
  derived and/or modified CDS sequence (opt3) from hemagglutinin__InfluenzaA__AFR68163
augaaggccacccuggugguccuccuuuacacauucgcuacugcaaacgccgacacgcugugcaucggcuaucacgcgaauaacagcaccgauacaguugacacuguguuggagaaaaauguaaccgugacacauuccgcuaacuuacuggaagauaagcacaaugggaaacuauguaagcucagaggagucgcaccccugcaucuugguaaaugcaacauugccggcuggauacuggggaauccugagugugaaaccuugucuacugccucaaguuggagcuacaucguggagacauccucuucggacaacggaaccugcuauccaggcgauuuuauugacuacgaagaacucagggagcagcugucaagcguuaguuccuucgaacgguuugagaucuucccgaagacgucuagcuggcccaaucacgauuccaacaagggugugacugcugcauguccucaugccggggcuaaaggauuuuauaagaaucugauuuggcucgucaaaaagggcaacucauacccaaaauuaaguaagagcuauaucaaugacaagggcaaagaagugcugguacuuugggggauacaccaccccucuaccacagccgaucaacaguccuuguaccagaacgcggacacuuacguuuucgugggaaccucacgcuauagcaagaaauuuaagccugagaucgcaauucgaccaaaaguccgugaucaggaggguagaaugaauuacuauuggacacugguggaacccggcgacaagaucaccuucgaggccacggggaaccuaguggucccuagguacgcuuuugccauggaacgggaugcaggaaguggcauuaucauaucugacacuccaguucaugacugcaacacaaccugucaaacuccgaaaggugcuauuaauacaucccuccccuuccagaacauccacccuauuaccaucgggaagugcccaaaguaugugaaaagcacgaagcugcgccuugccaccggacugagaaauguacccucgauccagucuaggggcuuguuuggcgcgauugccggguucauagagggagguuggacaggcaugguggaugggugguacggauaucaucaccagaacgaacaaggcuccgguuacgcagcugaccucaaaucaacucagaaugccaucgauaagauuaccaacaaagucaauagugugaucgagaagaugaacacacaguuuacugcuguugggaaggaguucaaucaccuggaaaaacggauagagaacuuaaauaagaaaguggacgauggcuuccuggacauuuggaccuacaacgccgaacuccuuguccuguuggagaaugaacgcacacuagauuaucaugacagcaacgugaagaaucuguacgagaaaguacgaaaccagcucaagaacaaugcaaaggagaucggaaacggcuguuuugaguucuaucacaaaugcgauaauaccuguauggaguccguuaagaacgggacuuacgacuauccuaaauacucugaagaggccaagcugaauagagaagagaucgauggagugaaacuugagagcacgaggauuuaucaaauccuggcuauuuacucaacagcggcaaguuccuugguccucguggucagccugggugccauaucuuuuuggaugugcucaaacggcaguuuacagugccggaucuguauuuga

SEQ ID NO: 137712 - RNA, 1701 nt, Artificial Sequence
  derived and/or modified CDS sequence (opt3) from hemagglutinin__InfluenzaA__AFR68173
augaagaccaucauugcccugagcuacauacucugccuuguguucgcucagaaacugcccggcaacgacaauuccacagcaacuuuguguuuagggcaccaugccgucccuaacggaacgaucguuaagaccauuacaaaugaucaaaucgaggugacuaacgcgaccgaacugguacagucuucaaguacaggugagauuugcgacagcccacaccagauccuagauggcgaaaauuguacccucauagacgcucugcuuggggauccgcagugcgacggauuucaaaacaaaaagugggaucuguucguggagagauccaaagccuauucuaauuguuaccccuaugacgucccugauuacgcaucguugaggucacucguggccagcaguggcacucuggaauuuaacaaugaguccuucaacuggacagguguuacccagaaugggacgucuagcgcuugcauccggcgcuccaacucaaguuucuuuagccgacugaauuggcucacucauuuaaacuuuaaguauccagcacugaaugugaccaugcccaacaacgagcaguucgacaaacuuuacauuuggggaguccaccauccuggcacagauaaggaccagaucuuuuuguaugcccaggcuucuggccguauuacuguguccaccaagagaucacagcagagcguaaucccaaauauagggaguaggccccggauucgcaacaucccuucuagaauuuccaucuacuggacaaucguuaaaccaggagauauucugcuaauaaauagcaccgguaaccucaucgccccgaggggcuacuucaagauucggucggggaaaucuuccaucaugcgcucagacgcgcccauaggaaaguguaauagugaaugcauuacgccuaacggcagcaucccaaaugacaagcccuuucagaacgugaaucgaaucacuuauggugcauguccuagauacgucaaacaaaacacacugaaacuugccaccgggaugaggaaugugccagagaagcagacucggggaauuuucggcgcuaucgccggcuuuauugaaaacgggugggagggaaugguggaugguugguauggcuuccgucaccaaaauuccgaggggcgcggacaagcagcugaccugaagucuacacaggccgcgauagaucagaucaacggcaaauugaauagacucauugguaagaccaacgaaaaauuccaccagaucgagaaggaauuuagcgaggucgaagggaggauccaagaccuggagaaguacguugaggauacgaaaauugacuuauggucauauaacgccgaacugcucguggcacuugagaaucagcauaccauagaucugacagacagugaaaugaacaaguuguucgagaaaacuaagaaacagcuacgggaaaaugcugaggauaugggcaacggaugcuuuaagaucuaccacaagugugacaaugccugcauuggcuccauccgaaacgggaccuauaaucaugauguauaccgcgacgaggcucugaacaauagauuccagauuaaaggaguggaacucaagagcgguuacaaagacuggauccuguggauaucuuuugccaucucaugcuuccuucugugugucgcauugcucggcuuuauuaugugggccugccaaaaggggaacaucagguguaauauuugcaucuga

SEQ ID NO: 137713 - RNA, 1701 nt, Artificial Sequence; identical to SEQ ID NO: 130717
  derived and/or modified CDS sequence (opt3) from hemagglutinin__InfluenzaA__AFR84675

SEQ ID NO: 137714 - RNA, 1701 nt, Artificial Sequence; identical to SEQ ID NO: 131070
  derived and/or modified CDS sequence (opt3) from hemagglutinin__InfluenzaA__AFR84685

SEQ ID NO: 137715 - RNA, 1701 nt, Artificial Sequence; identical to SEQ ID NO: 130897
  derived and/or modified CDS sequence (opt3) from hemagglutinin__InfluenzaA__AFR84694

SEQ ID NO: 137716 - RNA, 1701 nt, Artificial Sequence; identical to SEQ ID NO: 130704
  derived and/or modified CDS sequence (opt3) from hemagglutinin__InfluenzaA__AFR84704

SEQ ID NO: 137717 - RNA, 1701 nt, Artificial Sequence
  derived and/or modified CDS sequence (opt3) from hemagglutinin__InfluenzaA__AFR84714
augaaggccauccuggugguccuccuuuacaccuucgcuacagcaaacgccgacacucugugcauuggcuauagagcgaauaacagcacggauaccguugacacaguguuggagaaaaauguaacugugacccacuccgucaacauauuagaagauaagcauaaugggaaacuguguaagcuaaggggaguggcuccccuccaccuggguaaaugcaacaucgccggcuggauucuugggaauccugagugugaaucucugucaacagcaaguagcugguccuacaucguugagaccucuucgucagacaacggaacuugcuauccaggcgauuuuauugacuacgaagaguugcgggagcagcucagcaguguguccucuuucgaacgcuuugagaucuucccgaagacaagcuccuggcccaaucaugauucaaacaagggugucaccgccgcuuguccucacgcaggggccaaaaguuuuuauaagaaucugauauggcuggugaaaaagggaaacagcuacccaaaacucucuaaguccuauaucaaugacaagggcaaagaaguauuaguucuguggggcauucaucaccccucaacgagcgcugaucaacagagucuuuaccagaacgccgacgcguacguguucgucgggucuucccgauauagcaagaaauuuaagccugagaucgcaauucguccaaaagugagagaucaggagggaaggaugaauuacuauuggacuuugguggaacccggugacaagaucaccuucgaggccacaggcaaccuggucguuccucgguacgcuuuugccauggaacgcaacgcagggucgggaauaauuaucucugauacuccagugcacgacugcaauaccacaugucaaaccccgaaaggcgcuauuaacacgucccuacccuuccagaauauccauccuaucacuauugguaagugcccaaaguauguaaaaucaacaaagcucagacuggccaccgggcuuaggaacgugcccaguauacagagccggggacuguuuggcgcgaucgccggcuucauugaagggggauggacugguauggucgacggcugguacggguaucaccaucagaaugaacaaggauccggcuacgcagcugauuugaaaucuacacagaacgccaucgacgagauaaccaauaaggugaacagcguuauugagaaaaugaauacgcaguuuaccgcuguggguaaggaguucaaccaccucgagaagcgcaucgaaaaucugaacaaaaaggucgaugacggguucuuagauaucuggacauacaaugccgagcugcucgugcuucuggaaaacgagcgaacuuuggacuaucacgauucaaauguuaaaaaccuauacgagaagguaagaagucagcugaaaaacaaugcaaaggaaauuggcaacggauguuuugaguucuaucauaagugcgacaauaccuguauggaauccgugaaaaacggcacauacgauuauccuaaguacagcgaggaagccaaacucaauagggaggagaucgacggggucaagcuggaaucuacucggauuuaucaaauacuugcuaucuacucaaccguggcgaguagccuggucuuggugguuucccucggagcaauuucuuuuuggaugugcucgaacgguagccugcagugccguaucuguaucuga

SEQ ID NO: 137718 - RNA, 1701 nt, Artificial Sequence; identical to SEQ ID NO: 130897
  derived and/or modified CDS sequence (opt3) from hemagglutinin__InfluenzaA__AFR84724

SEQ ID NO: 137719 - RNA, 1701 nt, Artificial Sequence; identical to SEQ ID NO: 130897
  derived and/or modified CDS sequence (opt3) from hemagglutinin__InfluenzaA__AFR84734

SEQ ID NO: 137720 - RNA, 1701 nt, Artificial Sequence; identical to SEQ ID NO: 130897
  derived and/or modified CDS sequence (opt3) from hemagglutinin__InfluenzaA__AFR84754

SEQ ID NO: 137721 - RNA, 1701 nt, Artificial Sequence; identical to SEQ ID NO: 130897
  derived and/or modified CDS sequence (opt3) from hemagglutinin__InfluenzaA__AFR84764

SEQ ID NO: 137722 - RNA, 1701 nt, Artificial Sequence; identical to SEQ ID NO: 130897
  derived and/or modified CDS sequence (opt3) from hemagglutinin__InfluenzaA__AFR84774

SEQ ID NO: 137723 - RNA, 1701 nt, Artificial Sequence
  derived and/or modified CDS sequence (opt3) from hemagglutinin__InfluenzaA__AFR84784
augaaggccauccuggugggccuccuuuacaccuucgcuacagcaaacgccgacacucugugcauuggguaucacgcgaauaacagcacggauaccgucgacacaguuuuggagaaaaaugugacuguaacccauuccgugaacauauuagaagauaagcacaauggaaaacuguguaagcuaagaggugucgcuccccuccaucugggcaaaugcaacaucgccggguggauucuuggaaauccugagugugaaucucugucaacagcaaguagcugguccuacaucguggagaccucuucgucagacaacggcacuugcuauccaggugauuuuauugacuacgaagaguugagggagcagcucagcaguguuuccucuuucgaacgguuugagaucuucccgaagacaagcuccuggcccaaucacgauucaaacaagggggugaccgccgcuuguccucaugcaggagccaaaaguuuuuauaagaaucugauauggcuggucaaaaagggcaacagcuacccaaaacucucuaaguccuauaucaaugacaagggcaaagaaguguuaguacugugggggauucaccaccccucaacgagcgcugaucaacagagucuuuaccagaacgccgacgcguacguuuucgugggaucuucccgcuauagcaagaaauuuaagccugagaucgcaauucgaccaaaaguccgugaucaggaggguagaaugaauuacuauuggacuuugguggaacccggcgacaagaucaccuucgaggccacagggaaccugguggucccuagguacgcuuuugccauggaacggaacgcaggaucgggcauaauuaucucugauacuccaguucaugacugcaauaccacaugucaaaccccgaaaggugcuauuaacacgucccuacccuuccagaauauccacccuaucacuauugggaagugcccaaaguaugugaaaucaacaaagcuccgccuggccaccggacuuagaaacguacccaguauacagagcaggggccuguuuggcgcgaucgccggguucauugagggagguuggacuggcaugguggacgggugguacggauaucaucaccagaaugaacaaggcuccgguuacgcagcugauuugaaaucuacacagaacgccaucgacgagauaaccaauaaggucaacagcgugauugagaaaaugaauacgcaguuuaccgcuguugggaaggaguucaaccaccucgaaaagcggaucgaaaaucugaacaaaaagguggaugacggcuucuuagauaucuggacauacaaugccgagcugcucguccuucuggaaaacgagcgcacuuuggacuaucaugauucaaaugugaaaaaccuauacgagaagguacgaagucagcugaaaaacaaugcaaaggaaauuggaaacggcuguuuugaguucuaucacaagugcgacaauaccuguauggaauccguuaaaaacgggacauacgauuauccuaaguacagcgaggaagccaaacucaauagagaggagaucgacggagugaagcuggaaucuacuaggauuuaucaaauacuugcuaucuacucaaccgucgcgaguagccuggcauugguggucucccucggugccauuucuuuuuggaugugcucgaacggcagccugcagugccggaucuguaucuga

SEQ ID NO: 137724 - RNA, 1701 nt, Artificial Sequence; identical to SEQ ID NO: 130897
  derived and/or modified CDS sequence (opt3) from hemagglutinin__InfluenzaA__AFR84794

SEQ ID NO: 137725 - RNA, 1701 nt, Artificial Sequence; identical to SEQ ID NO: 130717
  derived and/or modified CDS sequence (opt3) from hemagglutinin__InfluenzaA__AFR84804

SEQ ID NO: 137726 - RNA, 1701 nt, Artificial Sequence; identical to SEQ ID NO: 130897
  derived and/or modified CDS sequence (opt3) from hemagglutinin__InfluenzaA__AFR84814

SEQ ID NO: 137727 - RNA, 1701 nt, Artificial Sequence; identical to SEQ ID NO: 130717
  derived and/or modified CDS sequence (opt3) from hemagglutinin__InfluenzaA__AFR84824

SEQ ID NO: 137728 - RNA, 1701 nt, Artificial Sequence; identical to SEQ ID NO: 130743
  derived and/or modified CDS sequence (opt3) from hemagglutinin__InfluenzaA__AFR84834

SEQ ID NO: 137729 - RNA, 1701 nt, Artificial Sequence; identical to SEQ ID NO: 135917
  derived and/or modified CDS sequence (opt3) from hemagglutinin__InfluenzaA__AFR84844

SEQ ID NO: 137730 - RNA, 1701 nt, Artificial Sequence; identical to SEQ ID NO: 130959
  derived and/or modified CDS sequence (opt3) from hemagglutinin__InfluenzaA__AFR84854

SEQ ID NO: 137731 - RNA, 1701 nt, Artificial Sequence; identical to SEQ ID NO: 130717
  derived and/or modified CDS sequence (opt3) from hemagglutinin__InfluenzaA__AFR84864

SEQ ID NO: 137732 - RNA, 1701 nt, Artificial Sequence; identical to SEQ ID NO: 130897
  derived and/or modified CDS sequence (opt3) from hemagglutinin__InfluenzaA__AFR84874

SEQ ID NO: 137733 - RNA, 1701 nt, Artificial Sequence; identical to SEQ ID NO: 130704
  derived and/or modified CDS sequence (opt3) from hemagglutinin__InfluenzaA__AFR84893

SEQ ID NO: 137734 - RNA, 1701 nt, Artificial Sequence; identical to SEQ ID NO: 130704
  derived and/or modified CDS sequence (opt3) from hemagglutinin__InfluenzaA__AFR84903

SEQ ID NO: 137735 - RNA, 1701 nt, Artificial Sequence; identical to SEQ ID NO: 130704
  derived and/or modified CDS sequence (opt3) from hemagglutinin__InfluenzaA__AFR84913

SEQ ID NO: 137736 - RNA, 1701 nt, Artificial Sequence; identical to SEQ ID NO: 130704
  derived and/or modified CDS sequence (opt3) from hemagglutinin__InfluenzaA__AFR84923

SEQ ID NO: 137737 - RNA, 1689 nt, Artificial Sequence
  derived and/or modified CDS sequence (opt3) from hemagglutinin__InfluenzaA__AFV53205
auggccaucauuuaccugauacuccuuuucgcuaccgugagaggcgaccagaucugcauuggguaucacgcaaacaauagcacagagaaggucgauacuauccuggaaaggaacguuacggugacccaugccaaagacauuuuggagaagacacacaauggaaaauuauguaagcugaacgguauacccccucuagaacucggcgauugcuccauagcgggguggcugcuuggaaauccagagugugaccggcuguugcgcguaccggaauggucuuacaucauggagaaagagaacccccgauauucacucugcuacccuggcagucugaaugauuaugaagaacugaagcaucucuuaagcuccgugcgucacuuugaaaaggucaggauucugccaaaagacagauggacucaacauaccacaaccggugauucuaaggcuugugccgugucggggaaacccucauucuuucggaacaugguuuggcuuacuaagaaaggaccugacuacccaguggcaaagggcagcuauaauaacacaaguggcgagcagauguugaucauuuggggaguccaccaccccaucgaugaggccgaacagcgcgagcuguaccagaagguggggaccuacguauccgcuucuacgagcacucuaaauaaaagauccauaccugaaauugcagccaggccagagguuaacggucuccggucacgcauggaguucaguuggacccugcuugacgugugggauacaaucaauuuugagagcacuggcaaccugauugcuccggaguauggguucaagaucucuaaacgaggauccucaggcaucaugaagaccgaagguacauuggggaauugcgagaccaaaugucaaacgccccucggagccauuaacacuacacugccuuuucauaacguccacccauuaaccauaggcgaaugccccaaguacgugaaaagcgagaagcuggugcucgcgacuggccuuagaaaugucccucagaucgaaaguagggggcuguucggagcaauugccgguuuuaucgagggcggguggcagggaaugguugacggcugguaugguuaccaucacucuaacgaucagggguccggcuaugcugccgacaaggagagcacacaaaaagcauucgacgaaauaaccaauaaggugaacucgguaauugagaaaaugaauacgcaguuugaagcugugggaaaggaguucaacaauuuggaaaaacggcuagagaaccugaauaagaagauggaggauggcuuucucgacgucuggaccuacaacgccgaacugcuugugcugauggagaaugaacguacauuggauuuccacgacucuaacguuaaaaaucucuaugagaaggugcgcaugcagcugagagauaacgucaaagaguuagggaauggauguuucgaauuuuaccauaagugcgacgaugaguguaucaacuccgugaaaaacgguacuuacgacuauccaaaguacgaagaggaaucaaagcugaaaaggaaugagaucaagggcguaaaacuaaguagcauggggguuuaucagauucucgcgaucuacgccaccguggcaggaucccugucucuugcuauuaugauggccggcaucagcuucuggaugugcucaaacgguaguuugcaaugccggaucuguauuuga

SEQ ID NO: 137738 - RNA, 1689 nt, Artificial Sequence
  derived and/or modified CDS sequence (opt3) from hemagglutinin__InfluenzaA__AFV53216
auggccaucauuuaccugauacuccuuuucaccgcugugagaggcgaccagaucugcauuggguaucacgcaaacaauagcacagagaaggucgauacuauccuggaaaggaacguuacggugacccaugccaaagacauuuuggagaagacacacaauggaaaauuauguaagcugaacgguauacccccucuagaacucggcgauugcuccaucgcgggguggcugcuuggaaauccagagugugaccggcuguugucuguaccggaauggucauacaucauggagaaagagaacccccgcgauggccucugcuauccugguaguuuuaaugacuacgaagaacugaagcaucugcucagcuccgugaagcacuucgaaaaagucaagauuuuaccaaaagaucgauggacucaacauaccacaaccgggggaucucgugcuugugccgugucgggcaaccccucauuuuucagaaauaugguuuggcugacugagaagggcagcaacuauccuguggcaaaagggaguuacaauaacacauccggagagcagaugcuuaucauuugggguguccaccacccaaaugacgaaaccgagcagaggacguuguaucagaacgugggcacuuacguaucuguugggaccagcacacugaauaagcgguccacucccgauaucgccacccgcccuaaggugaacggacaaggcgguagaauggaauuuucauggacacuacucgacaugugggauaccauaaacuucgagaguacggggaaucugauugcuccagaauacggauuuaaaaucagcaagagggggucuuccggcauuaugaaaacugaggggacacuuggaaacugcgagaccaagugucagacuccgcugggugcaaucaauacaaccuugcccuuccauaacguccacccucucacgaucggcgaaugcccaaaauaugugaagucagagaaacugguguuagccaccgggcugcggaaugucccccagauugaaagccgcggacucuuuggcgcuauagccgguuucaucgagggcggcuggcagggaaugguugacggcugguacggguaucaucacaguaacgaucaaggaucugguuacgcggcagacaaggaauccacacagaaggccuuugacggcauuacuaauaaagugaacagcguaaucgagaagaugaauacccaguucgaggcuguggaaaaagaguuuucgaaccuugaacgaagacuggagaauuugaacaagaaaauggaagauggguuccuagacgucuggacauauaaugccgagcugcucgugcugauggagaacgaaaggacucuugauuuccacgacucuaauguuaagaaccuguacgauaaggugcggaugcaguugcgugacaacgucaaagagcucggaaauggcuguuuugaguucuaucauaagugcgaugacgaguguaugaacuccgugaaaaaugguaccuacgauuacccuaaguaugaggaagagucaaaacugaaccgcaaugaaauaaaggggguaaaguuaaguagcaugggcauuuaccaaauccuggcaaucuaugcuacaguugccggaucccuaucucucgcgauuaugauggccggcaucagcuuuuggaugugcucaaacgggagucugcagugcagaauuuguauauga

SEQ ID NO: 137739 - RNA, 1689 nt, Artificial Sequence
  derived and/or modified CDS sequence (opt3) from hemagglutinin__InfluenzaA__AFV53227
augaucauuauauaccugauccuccuuuucaccgccgugagaggcgaccagauuugcaucggguaucacgcuaacaauagcacagagaaggucgauacuauucuggaaaggaacguuacggugacccaugcaaaagacaucuuggagaagacacacaauggaaaauuauguaagcugaacgguauacccccucuagaacucggcgauugcuccaucgccggguggcugcuuggaaauccagagugugaccggcuguugcgcguaccggaauggucuuacauuauggagaaagagaacccccgauauucacucugcuacccuggcaguuuuaaugauuaugaggaacugaagcaucugcucagcuccgugaagcacuucgaaaaagucaagaucuuaccaaaagacgguuggacucaacauaagaccgaugggggaucuaaagcgugugcugugucgggcaaggccucauuuuuccguaacaugguuuggcugacaaaggagggccccaauuaccagguggcaaaaagaagcuauaacaauaccaguggggagcagaugcuuauuaucuggggaguccaccacccuaaggacgaagccgagcagauagcuuuguaccaaaaaguggguacuuacguauccgcaucuacaagcacccugaacaagagguccacgccagaaauugccgcucggcccgagguuaauggccuagggucacgcauggaauuuaguuggacucuccuggaugugugggacaccaucaacuucgagagcacaggaaaucuugucgccccugaguauggcuuuaaaauuucuaagagagguuccucagggaucaugaaaacugaaggaacccugggcaacugcgagacaaagugucagaccccauugggcgcgaucaacacgacucucccguuccauaaugugcacccccugacaauuggggaaugcccuaaguacgugaaaagcgagaaguuaguccuggcaaccggacucaggaacguuccacagauagaaagucggggucuuuuuggcgccaucgcuggguucauugagggaggcuggcaggguaugguggaugggugguauggcuaccaucacucuaaugaccaaggauccggcuaugccgcagauaaagagagcacucagaaggcuuuugaccgcaucacaaacaaaguaaauucggugauagaaaagaugaacauucaguucgaggccgucgggaaggaauuuucuaaucuggagaaacgauuggaaaaccuaaauaagaaaauggaggacggauuccuggauguguggaccuacaacgcggagcuccugguucuuauggaaaaugagagaacgcuggacuuccacgauuccaacgugaagaauuuguaugacaaagucaggaugcagcuccgggauaacgugaaggaacuggguaauggcuguuuugaguucuaccauaagugcgacgaugaguguaugaacucaguuaaaaacgggaccuacgacuaucccaaguacgaagaggaaaguaaauuaaagcguaaugagaucaaaggaguaaagcugagcuccaugggcguguaucaaauccuagccauuuacgcaacagucgcugguucucucagccuggccaucaugauugcugggauaucauuuuggaugugcaguaacggcucccuucagugccgcguguguaucuga

SEQ ID NO: 137740 - RNA, 1689 nt, Artificial Sequence
  derived and/or modified CDS sequence (opt3) from hemagglutinin__InfluenzaA__AFV53238
auggccaucauuuaccugauacuccuuuucaccgcugugagaggcgaccagaucugcauuggguaucacgcaaacaauagcacagagaaggucgauacuauccuggaaaggaacguuacggugacccaugccaaagacauuuuggagaagacacacaauggaaaauuauguaagcugaacgguauacccccucuagaacucggcgauugcuccaucgcgggguggcugcuuggaaauccagagugugaccggcuguugcgcguaccggaauggucuuacaucauggagaaagagaacccccgauauucacucugcuacccuggcaguuuuaaugauuaugaagaacugaagcaucugcucagcuccgugaagcacuucgaaaaagucaagauuuuaccaaaagaccguuggacucaacauaccacaaccggugggucuauggcuugugccgugucgggaaagcccucauuuuucagaaacaugguuuggcugacuacaaaaggcccuaauuacccaguggcacagggcagcuauaacaauaccaguggggagcagaugcuuaucauuuggggaguccaccaccccaacgaugaggccgaacagagggcuuuguaccaaaagguggguacguacguauccgcaucuacuagcacccuguauaagcgguccaucccugagauagccgcucgcccaaaaguuaauggccuagggucaagaauggaauuuaguuggacacuccuggacaugugggauacuauuaacuucgagagcaccggaaaucuuguggccccggaauacggcuuuaagaucucuaaaagggguuccucagggauuaugaagacagagggaacccuggagaacugcgaaacgaaaugucagacucccuugggcgcgaucaacacaacccucccuuuccauaauguccacccacugacuaucggcgagugccccaaguaugugaaaagcgaaaaguuagugcuggcaacagggcuccggaacgucccucagauugagagucgcggacuuuuuggugccauagcuggcuucaucgaagggggauggcagggcaugguugacgguugguacggguaucaucacucuaaugaucaaggcuccggauacgccgcagacaaggagagcacccagaaggcuuuugauggcauuacgaacaaaguaaauucggugaucgagaaaaugaacacccaguucgaagccguggggaaggaguuuucuaaucuggaaaaacgauuggagaaccuaaauaagaagauggaagacggauuccuggacgucuggacauauaacgcggagcuccuggugcuuauggagaaugaaagaacucuggauuuccacgacuccaacguuaaaaauuuguacgauaaggugaggaugcagcuccgggacaacgucaaagagcuggguaauggcuguuuugaguucuaccauaagugcgauaacgaguguauggacucagugaaaaacgggaccuaugauuacccaaaguaugaggaagagaguaaguuaaaucguaacgaaauaaaaggaguaaagcugagcuccaugggcguuuaccaaauucuagccaucuaugcaacaguggcugguucucucagccuggccaucaugauggcugggauuucauuuuggaugugcaguaauggcucccuucagugccgcaucuguauuuga

SEQ ID NO: 137741 - RNA, 1689 nt, Artificial Sequence
  derived and/or modified CDS sequence (opt3) from hemagglutinin__InfluenzaA__AFV53249
auggccaucauuuaccugauacuccuuuucgcuaccgugagaggcgaccagaucugcauuggguaucacgcaaacaauagcacagagacugucgauacgauccuggaaaggaacguuaccgugacacaugccaaggacauuuuggagaaaacucacaauggaaaguuauguaaacugaacgguauacccccucuagaacucggcgauugcuccaucgcgggguggcugcuuggaaauccagagugugaccggcuguugcgcguaccggaauggucuuacaucauggagaaggagaacccccgauauucacucugcuacccuggcagucugaaugauuaugaagaacugaaacaucucuuaagcuccgugaagcacuuugaaaagguccguauucugccaaaagacagauggaccaaccauacaaccacuggugggucuaaggcuugugccgugucgggagagcccucauucuuuaggaauaugguuuggcuuaccaaaaagggcccuaacuacccaguggcaaaaggcagcuauaauaacacaaguggggagcaaauguugaucauuuggggaguccaccaccccaaugaugaagccgagcagcgggcucuguaccagaagguggguacguacguauccgcaucuacuagcacccuauauaagcgcuccaucccugaaauagccgcuagaccaaaaguuaacggccucgggucaaggauggaguucaguuggacacugcuuaaugugugggacacuauuaacuuugaaagcaccggaaaccuggucgccccggaguacggcuucaagaucucuaaacggggucgcuccgggauuaugaagacagagggaaccuugggcaauugcgaaacgaaaugucagacuccccucggcgcgaucaacacaacccugccuuuucauaaugugcacccauuaacuaucggggagugccccaaguaugugaaaucagaaaagcugguccucgcaacaggacuucgaaacguuccucaaauugagagcagaggucuguucggcgccauagcuggguuuaucgaaggaggcuggcaggguaugguggaugggugguacggcuaucaucacaguaaugaccagggaucuggcuacgccgcagauaaggaguccacccagaaggcuuucgacgggauuacgaacaaaguaaauagcgugaucgagaaaaugaacacccaauuugaagccgucggaaaggaguucaauaacuuggagaaaaggcuagagaaucugaacaagaagauggaagaugguuuucucgacguguggacauauaaugcggagcugcuuguucugauggagaacgaacggacuuuggacuuccacgauucgaaugugaaaaaccucuacgagaagguccguaugcagcugcgcgacaacgugaaagaauuaggcaauggguguuucgaguuuuaccauaagugcgaugacgaguguaugaacucuguuaaaaauggaaccuaugauuacccaaaguaugaagaggaauccaagcugaaaagaaacgagauaaagggcguaaaacuaucaaguauggguguguaccagauucucgccaucuaugcaacagucgcugggagccugucccuugccaucaugguggcuggcauuucuuucuggaugugcagcaauggaucauugcagugcaggaucuguauuuga

SEQ ID NO: 137742 - RNA, 1698 nt, Artificial Sequence
  derived and/or modified CDS sequence (opt3) from hemagglutinin__InfluenzaA__AFV53260
augaaggccaaacugcucauccuucugugcgcuuugagcgcaaccgacgccgauacaauuuguauaggcuaccacgcgaacaauuccacugacacgguggauaccgucuuagagaagaacguuacagugacucauucuguaaaucugcuagaagacucacacaacgggaaacucugcagacugaagggaaaagcuccccuucagcuggguaauuguaacaucgccggcuggguguuggggaauccugagugcgaaagucuccugagcaacagguccuggucuuauauugcagagaccccaaauucggaaaacggaacauguuacccgggcgauuucgccgacuaugaggagcugcgggaacaacucucaagcgucaguuccuuugagcgcuucgaaaucuuucccaaggagcgaucuuggccuaaucauaccacucguggugugacagcugcaugcccacacgccaugaaaagcuccuucuacaagaacuuaguuuggcugaccgaggcuaaugggucauaucccaaccuuaguagaagcuacgugaauaaccaggaaaaggaggucuuggugcuguggggaguacaucacccuucuaacauugaagaucagaggacgcuauaucggaaagacaaugccuacguuuccguggucucaagcaacuacaaucgcagauuuacuccagagaucgcgaagaggcccaaagugcggggccagaguggccgcauaaacuauuacuggacccuccuggaaccuggggauacaaucauuuucgaggcaacuggaaaucuuaucgccccaugguaugcuuuugcccugucucgagguccgggcuccgggauuaucaccagcaacgcacccuuggacgagugugauacaaagugccaaaccccucagggagcuauaaauucgucucucccauuccagaacauucaccccgugacgaucggcgaauguccuaaguacgucagauccacuaaacugaggaugguuacagguuuacggaauauuccaucauuucagagucgugggcuguucggagccaucgcgggcuuuaucgagggcggguggaccggaaugauggacgguugguauggcuaccaucaccaaaacgaacaggggagcggauaugccgcagaucagaaguccacucagaaugcuauuaacggcauaacaaauaaagugaacucuguaaucgagaagaugaauacccaauucacggccguggguaaagaauuuaacaagcucgagaaacgcauggagaaccuuaauaagaaggucgacgacggguuccuggauauuuggaccuacaacgcugaauugcuagugcugcucgagaaugaaagaacacuggacuuccaugauagcaacguuaaaaaucuuuacgagaaggugaaaaaccagcugaggaauaacgccaaggaauugggcaauggaugcuuugaguucuaucacaaaugugacaacgagugcauggaaucagucaagaauggcacuuacgauuaucccaaguacagugaggaauccaaacucaaccgggagaagaucgacggggugaaacuggagagcaugggaguauaucgaauauuagcaauuuacucuaccguugccucaagucuggugcuacucgucagccugggugcuaucuccuuuuggaugugcucuaauggcucgcuucagugucgcaucugcauuuga

SEQ ID NO: 137743 - RNA, 1689 nt, Artificial Sequence
  derived and/or modified CDS sequence (opt3) from hemagglutinin__InfluenzaA__AFV53271
auggccaucaccuaccugauucuccuuuucacagcugugagaggcgaccagauaugcaucggguaucacgcaaacaauagcacugagaaggucgauacgauucuggaaaggaacguuaccgugacacaugccaaagacaucuuggagaagacucacaauggaaaauuauguaagcugaacgguauucccccucuagaacucggcgauugcuccaucgcgggguggcugcuuggaaauccagagugugaccgguuucugcgcguaccggaauggucuuacauaauggagaaagagaacccccgauauucauugugcuacccuggcaguuucaaugauuaugaagaacucaagcaucugcugagcuccgugaagcacuuugaaaaagucaagauccucccaaaagacgguuggacccaacauacaaccacugggggaucuauggcuugugccgugucgggcaagcccucauucuuucguaacaugguuugguuaacagagaaaggccagaauuacccuguggcaaaggggagcuauaacaauaccaguggagagcagaugcugauuaucugggguguccaccacccaaacgaugaagccgagcagagagcucuuuaccaaaaggugggcacguacguauccgcaucuacuagcaccuugaauaaaagguccacacccgaaauugccgcucggccuaagguuaacgggcugggaucacgcauggaguucaguuggacucuacucgacaugugggauaccaucaauuuugaaagcacaggcaaccugguggccccagaguaugguuucaaaauaucuaagagaggguccucaggaauuaugaaaaccgagggcacgcuugaaaacugcgagacuaagugucagacaccgcugggcgcgaucaauaccacuuugcccuuucauaacguccacccucucacaauuggggaaugcccaaaauacgucaagagcgagaagcugguguuagcaaccggacugaggaauaucccccagaucgaaagucggggucucuucggcgccauugcuggguuuauagagggaggcuggcaggguaugguggacgggugguauggcuaccaucacucuaacgaucaaggauccggcuaugccgcagacaaagagagcacgcagaaggcuuucgaugggaucaccaauaaaguuaacucggugauugaaaagaugaauacacaguuugaggccguaggaaaagaguucucuaaccuugagaagcgccuggaaaauuugaacaagaaaauggaggacgguuuccuagacguguggacuuacaaugcggagcugcucguccugauggaaaacgagcgaacccuugauuuucacgacuccaaugugaagaaccuguaugauaaaguuagaaugcaguugagggacaaugugaaggaacucggcaacggguguuucgaguuuuaccauaaaugcgauaacgaguguauggacucagucaagaauggaacauacgauuauccuaaguacgaagaggaaaguaaacugaaccggaaugagaucaagggcgugaaauuaagcuccauggguguauaucaaauacuggccauuuacgcaacuguugcugggucucuaagccucgccaucaugauggcuggcaucucauucuggaugugcaguaacggaucccugcagugccguauuuguaucuga

SEQ ID NO: 137744 - RNA, 1689 nt, Artificial Sequence
  derived and/or modified CDS sequence (opt3) from hemagglutinin__InfluenzaA__AFV53282
auggccaucauuuaccugauacuccuuuucaccgcugugagaggcgaccagaucugcauuggguaucacgcaaacaauagcacagagaaggucgauacuauccuggaaaggaacguuacggugacccaugccaaagacauuuuggagaagacacacaauggaaaauuauguaagcugaacgguauacccccucuagaacucggcgauugcuccaucgcgggguggcugcuuggaaauccagagugugaccggcuguugucuguaccggaauggucauacaucauggagaaagagaacccccgcgauggccucugcuauccugguaguuuuaaugacuacgaagaacugaagcaucugcucagcuccgugaagcacuucgaaaaagucaagauuuuaccaaaagaucgauggacucaacauaccacaaccgggggaucucgugcuugugccgugucgggcaaccccucauuuuucagaaauaugguuuggcugacuaagaaaggcacaaacuauccuguggcaaaggggagcuacaauaacaccaguggagagcagaugcuuaucauuugggguguccaccacccaaaugacgagacggaacagaggacuuuguaucagaacgugggcaccuacguauccguugggacaucuacucugaauaagcggagcacccccgagaucgccacacgcccuaaagugaacggacuaggcuccagaauggaauuuucauggacccuccuggauaugugggacacgauaaacuucgagaguacugguaaucuuauugcuccagaauacggguuuaagaucagcaaaaggggaucuuccggcauuaugaagacagagggcacccuggagaacugcgaaacuaaaugucaaacaccguugggggcaaucaauaccacgcuccccuuccauaacguccacccucugaccaucggagagugcccaaaguaugugaaauuagaaaagcuggugcucgccacaggucuucggaaugucccccagauugagucacgcggccuguuuggggcuauagccggauucaucgaaggcgguuggcaggggaugguugauggcugguacggauaucaucacagcaacgaccagggcaguggguacgcggcagauaaggagucuacucaaaaagccuuugacgugauuaccaauaagguaaacuccgugaucgagaaaaugaauacacaguucgaagcugucggaaaggaguuuagcaacuuggaacgaagacuagagaaucugaacaaaaagauggaagacgguuuccucgauguguggacuuauaaugccgagcugcuuguucugauggagaacgaaaggaccuuggacuuccacgauucgaaugugaagaaccucuacgacaaaguccggaugcagcugcgugauaacgugaaggaguuaggcaauggguguuuugaguucuaucauaaaugcgacgaugaguguaugaacucuguaaagaauggaacauacgacuacccuaaauaugaggaagaguccaagcugaaccgcaaugaaauaaagggcguuaaacuaucaaguauggguguguaccagauucucgcaaucuaugcuaccgucgccgggagccugucccuugcgaucaugauggccggcauuucuuuuuggaugugcagcaacggaucauugcaaugcagaaucuguauuuga

SEQ ID NO: 137745 - RNA, 1689 nt, Artificial Sequence
  derived and/or modified CDS sequence (opt3) from hemagglutinin__InfluenzaA__AFV53293
auggccaucauuuaccugauacuccuuuucaccagcgugagaggcgaccagaucugcauuggguaucacgcuaacaauuccacagagaaggucgauacuauccuggaaaggaacguuacggugacccaugccaaaaauauuuuggagaagacacacaacggaaaauuauguaagcugaaugguauacccccucuagaacucggcgacugcucuaucgcaggguggcugcuuggaaacccagagugugaucggcuguugcgcguaccggaauggucauacaucauggagaaagagaaucccaaguauagucucugcuacccuggcagcuuuaacgacuaugaggaacugaagcaucugcucuccucugugaaacacuucgaaaaggucaaaauuuuaccaaaggaugguuggacucaacauaccacaaaugggggaucgcgagcgugugcugugucaggcaaccccagcuuuuuccguaauaugguuuggcugaccaaaaagggcccuaacuacccaguggccaaggggaguuauaauaacacuuccggagagcagaugcuuaucauuugggguguccaccaccccaaugacgaggcagaacagagagccuuguaccaggaggugggcacauacguaucugcuagcaccuccacgcugaacaaaaggucaacuccugaaaucgcagcccggccaaagguuaacgggcuaggaagucgcauggaguuuagcuggacccuccuggauaugugggacacaauaaauuucgaaucuacuggcaaccuuguggcuccggaguaugguuuuaaaauuuccaagagagggucaagcggagucaugaaaaccgagggcacacuggaaaauugcgagaccaagugucaaacgcccuugggcgccaucaacacuacacucccuuuccauaaugugcacccacugaccauuggggaaugccccaaauacgugaagagugagaaguuaguccuggcgacuggacucaggaacguuccucagaucgaaucucggggucuuuuuggcgcaaucgccggguucauugagggaggcuggcaggguaugguggaugggugguauggcuaccaucacuccaaugaccagggaagcggcuaugcugccgauaaagagucgacacaaaaggcauuugacgggauaaccaacaaaguaaauucugugaucgaaaagaugaacacgcaguucgaggcugucggaaaagaauuuuccaaucuggagaagcgcuuggaaaaccuaaauaagaaaauggaggaugguuuccuggacguguggaccuacaacgccgagcuccugguucuuauggaaaaugagcgaacacuggacuuccacgauucaaacgugaagaacuuguaugacaaagucagaaugcagcucagggauaaugugaaggaacugggcaacggguguuuugaguucuaccauaaaugcgacgaugaguguauggacaguguaaagaauggaacuuacgauuauccaaaguacgaagaggaaagcaaauuaaaccggaaugagauuaagggcguuaaacuguccucuauggguguguaucagauccuagcgauauacgccaccgucgcagggagccucucacuggcuauuaugauggccggcaucaguuuuuggaugugcuccaacggaagccuucaaugccguaucuguauuuga

SEQ ID NO: 137746 - RNA, 1689 nt, Artificial Sequence
  derived and/or modified CDS sequence (opt3) from hemagglutinin__InfluenzaA__AFV53304
auggccaucauuuaccugauacuccuuuucaccgcugugagaggcgaccagaucugcauuggguaucacgcaaacaauagcacagagaaggucgauacuauccuggaacaaaacguuacggugacccaugccaaagacauuuuggagaagacacacaauggaaaauuauguaagcugaacgguauacccccucuagaacucggcgauugcuccaucgcgggguggcugcuuggaaauccagagugugacaggcuguugucuguaccggaauggucauacaucauggagaaagagaacccccgggauggccucugcuauccugguaguuuuaaugacuacgaagaacugaagcaucugcucagcuccgugaagcacuucgaaaaagucaagauuuuaccaaaagaucgcuggacucagcauaccacaaccgggggaucucgagcuugugccgugucgggcaaccccucauuuuuccguaauaugguuuggcugacuaagaaagagagcaacuauccuguggcaaagggcaguuacaauaacacauccggggagcagaugcuuaucauuuggggaguccaccacccaaaugacgaaaccgagcagagaacguuguaucaaaacguggguacuuacguaucuguuggcaccagcacacugaauaagagguccacucccaacaucgccacccggccuaaagugaacgggcuaggaucacgcauggaauuuaguuggacacuccuggauaugugggacaccauaaauuucgagagcacgggcaaccuuauugcuccagaauacgguuuuaagaucucuaaaagaggguccucaggaauuaugaagacugagggcacacuggagaauugcgaaaccaaaugucagacuccguugggcgcaaucaacacaacccuccccuuccauaauguccacccucugacgaucggggagugcccaaaguaugugaaaagcgaaaaguuagugcuggccaccggacucaggaacgucccccagauugagagucggggucuuuuuggcgcuauagccggguucaucgaaggaggcuggcaggguaugguugaugggugguacggcuaucaucacucuaaugaccaaggauccggcuacgcggcagauaaggagagcacacagaaagccuuugacgggauuacuaacaagguaaauucggugaucgagaaaaugaacacccaguucgaagcugugggaaaggaguuuucuaaucuggaacgccgauuggagaaccuaaauaaaaagauggaagacgguuuccuggaugucuggacauauaacgccgagcuccuggugcuuauggagaaugaaagaacucuggacuuccacgauuccaacguuaagaacuuguacgacaaagugaggaugcagcuccgggauaaugucaaggagcugggcaacggguguuuugaguucuaucauaaaugcgacgaugaguguaugaacucagugaagaauggaaccuacgacuacccuaaauaugaggaagagaguaaguuaaaucguaacgaaauaaagggcguaaaacugagcuccauggguguuuaccaaauucuagcaaucuaugcuacaguggccgggucucucagccuggcgaucaugauggccggcauuucauuuuggaugugcaguaauggaucccuucagugccgcaucuguauuuga

SEQ ID NO: 137747 - RNA, 1689 nt, Artificial Sequence
  derived and/or modified CDS sequence (opt3) from hemagglutinin__InfluenzaA__AFV53314
auggccaucauuuaccugauacuccuuuucaccgcugugagaggcgacaagaucugcauuggguaucacgcaaacaauagcacagagacugucgauacgauccuggaaaggaacguuaccgugacacaugccaaagacauuuuggagaagacucacaauggaaaauuauguaagcugaacgguauacccccucuagaacucggcgauugcuccaucgcgggguggcugcuuggaaauccagagugugaccggcuguugucuguaccggaauggucauacaucauggagaaagagaacccccgcaauggccucugcuauccugguaacuuuaaugauuacgaggaacugaagcaucugcucaguagcgugaagcacuucgaaaaagucaagauuuuaccaaaagaccgauggacccagcauacaaccacugggggaucccaggcuugugccgugucuggcaaccccucguuuuuccguaauaugguuuggcugacagagaaggagucaaacuauccuguggcaaaaggcagcuacaauaacaccaguggggaacaaaugcuuaucauuuggggaguccaccacccaaucgaugagacggaacagagaacuuuguaucagaauguggguaccuacguauccguuggcacaucuacucugaacaagaggagcacccccgagauagccaagcggccuaaagugaacgggcuaggaucccgcauggaauuuucauggacacuccuggacaugugggauaccauuacguucgagaguacuggcaaucuuaucgcuccagaguacgguuuuaagauuagcaaaagagggucuuccggaaucaugaagacagaaggcacccuggagaacugcgaaacuaaaugucaaacaccguugggcgcaaucaauaccacgcuccccuuccauaacguccacccucugaccauuggggagugcccaaaguaugugaaaucagaaaaguuagugcuggccacaggacucaggaaugucccccagauagagagccggggucuuuuuggcgcuaucgccggguucauugagggaggcuggcaggguaugguugacgggugguacggcuaucaucacaguaacgaucagggaucuggcuacgcggcagacaaggaauccacucaaaaagccuuugaugggaucaccaauaaggugaacgcuguaauagagaaaauuaauacacaguucgaagccgugggaaaggaguuuagcaaccuggaacgccgauuggagaaucuaaacaaaaagauggaggacgguuuccuggacgucuggacuuauaaugcagaacuccuggugcuuauggagaacgaaagaacccuggauuuccacgacucgaauguuaagaacuuguacgauaaagugaggaugcagcuccgggacaacgucaaggagcugggcaauggguguuuugaguucuaucauaaaugcgaugacgaauguaugaacucugugaagaauggaacauacgauuacccuaaauaugaggaagaguccaaguuaaaccguaaugaaaucaagggcguaaaacugucaaguauggguguuuaccagauccuagcuauuuaugccaccguggcggggagccucucccuggccaucaugauggcaggcauuucuuuuuggaugugcagcaacggaucacuucaaugccgcauauguaucuga

SEQ ID NO: 137748 - RNA, 1689 nt, Artificial Sequence
  derived and/or modified CDS sequence (opt3) from hemagglutinin__InfluenzaA__AFV53325
auggccaucauuuaccugauacuccuuuucaccgcugugagaggcgaccagaucugcauuggguaucacgcaaacaauagcacagagaaggucgauacuauccuggaaaggaacguuacggugacccaugccaaagacauuuuggagaagacacacaauggaaaauuauguaagcugaacgguauacccccucuagaacucggcgauugcuccaucgcgggguggcugcuuggaaauccagagugugaccggcuguugucuguaccggaauggucauacaucauggagaaagagaacccccgcgauggccucugcuauccugguaguuuuaaugacuacgaagaacugaagcaucugcucagcuccgugaagcacuucgaaaaagucaagauuuuaccaaaagaucgauggacucaacauaccacaaccgggggaucucgugcuugugccgugucgggcaaccccucauuuuucagaaauaugguuuggcugacuaagaaaggcagcaacuauacaguggcaaaggggaguuacaauaacaccuccggagagcagaugcuuaucauuugggguguccaccacccuaaugacgagacggaacagaggacuuuguaucagaacgugggcaccuacguaucuguuagcacauccacucugaauaagcggucaaccccagagaucgccacacgccccaaagugaacgggcuaggaaguagaauggaauuuagcuggacccuccuggauaugugggacacgauaaacuucgagucuacuggcaaucuuauugcuccugaauacgguuuuaagaucuccaaaagggggucaagcggaauuaugaagacagagggcacccuggagaacugcgaaacuaaaugucaaacaccauugggcgcaaucaauaccacgcucccguuccauaacguccacccccugaccaucggggagugcccuaaguaugugaaaagugaaaaguuagugcuggccacaggacuccggaaugucccacagauugagucucgcggucuuuuuggcgcuauagccggguucaucgaaggaggcuggcaggguaugguugaugggugguacggcuaucaucacuccaacgaccagggaagcggcuacgcggcagauaaggagucgacucaaaaagccuuugacgggauuaccaauaaggugaacucuguaaucgagaaaaugaauacacaguucgaagcugugggaaaggaguuuuccaaccuggaacgaagauuggagaaucuaaacaaaaagauggaagacgguuuccuggaugucuggacuuauaaugccgagcuccuggugcuuauggagaacgaaaggacccuggacuuccacgauucaaauguuaagaacuuguacgacaaagugcggaugcagcuccgugauaacgucaaggagcugggcaauggguguuuugaguucuaucauaaaugcgacgaugaguguaugaacagugugaagaauggaacauacgacuaccccaaauaugaggaagagagcaaguuaaaccgcaaugaaauaaagggcguaaaacuguccucuauggguguuuaccagauucuagcaaucuaugcuaccguggccgggagccucucacuggcgaucaugauggccggcauuaguuuuuggaugugcuccaacggaagccuucaaugcagaaucuguauuuga

SEQ ID NO: 137749 - RNA, 1689 nt, Artificial Sequence
  derived and/or modified CDS sequence (opt3) from hemagglutinin__InfluenzaA__AFV53336
auggccaucauuuaccugauacuccuuuucaccgcugugagaggcgaccagaucugcauuggguaucacgcaaacaauagcacagagaaggucgauacuauccuggaaaggaacguuacggugacccaugccaaagacauuuuggagaagacacacaauggaaaauuauguaagcugaacgguauacccccucuagaacucggcgauugcuccaucgcgggguggcugcuuggaaauccagagugugaccggcuguugcgcguaccggaauggucuuacaucauggagaaagagaacccccgauauucacucugcuacccuggcaguuuuaaugauuaugaagaacugaagcaucugcucagcuccgugaagcacuuagaaaaagucaagauucugccaaaagacgguuggacucaacaugagaccgaugggggaucuaaggcuugugccgugucgggcaaacccucauucuuucguaacaugguuuggcuuacaaagaagggcccuaauuacccaguggcaaaaagaagcuauaacaauaccaguggggagcagauguugaucauuuggggaguccaccaccccaacgacgaagccgagcagagggcucuguaccagaagguggguacuuacguauccgcaucuacaagcacccuaaauaaacgguccacgccugaaaucgccgcucgcccagagguuucaggccucgggaguagaauggaguucagcuggacucugcuugaugugugggacaccauaucuuuugaguccacaggaaaccuggucgccccggaguauggcuucaagauuucaaaaagggguagcagugggaucaugaagacugaaggaaccuugggcaauugcgagacaaaaugucaaacgccccucggcgcgauuaacaccacucugccuuuucauaacgugcacccauuaacaaucggggaaugccccaaguacgugaagucugagaaacugguccucgcaaccggacuucggaauguuccucagaucgaaucccgcggucuguucggcgccauugcuggguuuauagagggaggcuggcaggguaugguggaugggugguauggcuaccaucacagcaacgaccagggaucgggcuaugccgcagauaaggagucuacucaaaaggcuuucgaccgaaucacaaauaaaguaaacuccgugauugagaaaaugaauacccaguuugaagccgucgggaaggaguucucaaacuuggaaaagagacuagaaaaucugaacaaaaagauggaggacggauuucucgauguguggacguacaaugcggagcugcuuguucugauggaaaacgagaggaucuuggacuuccacgauaguaaugugaaaaaccucuaugacaagguccggaugcagcugcgugauaaugugaaagaauuagguaacggcuguuucgaguuuuaccauaagugcgacgaugaguguaugaauagcguaaagaacgggaccuacgacuauccaaaauacgaagaggaauccaagcugaaacgcaacgagauaaagggaguuaaacuaucuagcaugggcguguaucagauucucgccaucuacgcaacagucgcugguucacugagucuugccaucaugauugcugggaucuccuucuggaugugcagcaauggcucuuugcaaugcagaauuuguauauga

SEQ ID NO: 137750 - RNA, 1701 nt, Artificial Sequence
  derived and/or modified CDS sequence (opt3) from hemagglutinin__InfluenzaA__AFV68720
augaagaccaucauugcccugagcuacauacucugccuuguguucgcucagaaacugcccggcaacgacaauuccacagcaacuuuguguuuagggcaccaugccgucccuaacggaacgaucguuaagaccauuacaaaugaucaaaucgaggugacuaacgcgaccgaacugguacagucuucaaguacaggugagauuugcgacagcccacaccagauccuagauggcgaaaauuguacccucauagacgcucugcuuggggauccgcagugcgacggauuucaaaacaaaaagugggaucuguucguggagagauccaaagccuauucuaauuguuaccccuaugacgucccugauuacgcaucguugaggucacucguggccagcaguggcacucuggaauuuaacaaugaguccuucaacuggacagguguuacccagaaugggacgucuagcgcuugcauccggcgcuccgacucaaguuucuuuagccgacugaacuggcucacucauuuaaauuuuaaguauccagcacugaacgugaccaugcccaauaacgagcaguucgauaaacuuuacauuuggggaguccaccauccuggcacagacaaggaucagaucuuuuuguaugcccaagcuagcggccguauuacuguguccaccaagagaucacagcaggccguaaucccaaacauagggagcaggccccggauucgcaauaucccuaguagaauuucuaucuacuggacaaucguuaaaccaggagacauucugcuaauaaacuccaccgguaaucucaucgcgccgaggggcuacuucaagauucggagcgggaaaucgucuaucaugcgcuccgacgcacccauaggaaaguguaacucagaaugcauuacgccuaauggcaguaucccaaacgauaagcccuuucagaaugugaaccgaaucacuuauggugccuguccuagauacgucaaacaaaauacacugaaacuugcuaccgggaugaggaacgugccagagaagcagacucggggaauuuucggcgccaucgcaggcuuuauugaaaaugggugggagggaaugguggacgguugguauggcuuccgucaccagaacagcgaggggcgcggacaagcugccgaucugaaguccacacaggcggccauagaccagaucaauggcaaauugaacagacucauugguaagaccaaugaaaaauuccaccagaucgagaaggaauuuucugaggucgaagggaggauccaagaucuggagaaguacguugaggacacgaaaauugauuuauggagcuauaacgcagaacugcucguggcucuugagaaccagcauaccauagaccugacagauucagaaaugaauaaguuguucgagaaaacuaagaaacagcuacgggaaaacgccgaggacaugggcaauggaugcuuuaagaucuaccacaagugugauaacgcuugcauuggcaguauccgaaaugggaccuauaaccaugacguauaccgcgacgaggcccugaauaacagauuccagauuaaaggaguggaacucaaguccgguuacaaagauuggauccuguggauaucuuuugcaaucucuugcuuccuucugugugucgccuugcucggcuuuauuaugugggcuugccaaaaggggaauaucagguguaacauuugcaucuga

SEQ ID NO: 137751 - RNA, 1701 nt, Artificial Sequence; identical to SEQ ID NO: 130717
  derived and/or modified CDS sequence (opt3) from hemagglutinin__InfluenzaA__AFX96347

SEQ ID NO: 137752 - RNA, 1701 nt, Artificial Sequence
  derived and/or modified CDS sequence (opt3) from hemagglutinin__InfluenzaA__AFX96359
augaaggccauccuggugguccuccuuuacaccuucgcuacagcaaacgccgacacucugugcauuggcuaucacgcgaauaacagcacggauaccguugacacaguguuggagaagaauguaacugugacccauuccgucaacuuacuggaagauaagcacaaugggaaacuauguaagcucagaggaguggcuccccugcaucuugguaaaugcaacauagccggcuggauccuggggaauccugagugugaaucuuugucaacagcaaguagcugguccuacauuguugagaccucuucgucagacaacggaacuugcuauccaggcgauuuuaucgacuacgaggagcucagggagcagcugagcaguguguccucuuucgaacgguuugagauuuucccgaagacaagcuccuggcccaaucacgauucaaacaagggugucaccgccgcuuguccucaugcaggggccaaaaguuuuuauaagaaucugaucuggcucgugaaaaagggaaacagcuacccaaaauuaucuaaguccuauauaaaugacaagggcaaagaaguacugguucuuuggggcauccaccaccccucaacgagcgcugaucaacagaguuuguaccagaacgccgacacuuacguguucgucgggaccucucgcuauuccaagaaauuuaagccugagauugcgauccgaccaaaagugcgugaucaggagggaagaaugaauuacuauuggacacugguggaacccggugacaagauuacuuucgaggcaaccggcaaccuagucguuccuagguacgccuuugcuauggaacggaacgccgggagcggaaucauaauuucggauacaccagugcaugacugcaauaccacgugucaaacuccgaaaggcgcaaucaacacaucucuccccuuccagaauauucacccuaucaccaucgguaagugcccaaaguauguaaaauccacuaagcugcgccuugcuacagggcugagaaacgugcccucaauucagaguaggggauuguuuggcgccauagcgggcuucaucgaagggggauggaccgguauggucgacggcugguacggguaucaucaccagaaugaacaaggaagcggcuacgccgcagaucucaaauccacgcagaacgcuauugacgagaucaccaauaaggugaacucuguuauagagaaaaugaauacacaguuuacugccguggguaaggaguucaaccaccuggaaaagcggauugaaaauuuaaacaaaaagaucgaugacggguuccuggauaucuggaccuacaaugcugagcuccuuguccuguuggaaaacgagcgcacacuagacuaucaugauagcaaugugaaaaaccuguacgagaagguacgaucacagcucaaaaacaaugccaaggaaauuggcaacggauguuuugaguucuaucacaagugcgacaauacuuguauggaaaguguuaaaaacggcaccuacgauuauccuaaguacuccgaggaagcaaaacugaauagagaggagaucaacggggugaaacuugaaagcacaaggauuuaucaaauacuggccaucuacucuaccgucgcuucaaguuuggugcucgucgugagccugggagcgauuuccuuuuggaugugcucuaaugguucguuacagugccggaucuguaucuga

SEQ ID NO: 137753 - RNA, 1701 nt, Artificial Sequence
  derived and/or modified CDS sequence (opt3) from hemagglutinin__InfluenzaA__AFX96366
augaaggccauccuggugguccuccuuuacaccuucgcuacagcaaacgccgacacucugugcauuggcuaucacgcgaauaacagcacggauaccguugacacaguguuggagaaaaauguaacugugacccauuccgucaacuuacuggaagauaagcacaaugggaaacuauguaagcucagaggaguggcuccccugcaucuugguaaaugcaacauagccggcuggauccuggggaauccugagugugaaucuuugucaacagcaaguagcugguccuacauuguugagaccucuucgucagacaacggaacuugcuauccaggcgauuuuaucgacuacgaggagcucagggagcagcugagcaguguguccucuuucgaacgguuugagauuuucccgaagacaagcuccuggcccaaucacgauucaaacaagggugucaccgccgcuuguccucaugcaggggccaaaaguuuuuauaagaaucugaucuggcucgugaaaaagggaaacagcuacccaaaauuaucuaaguccuauauaaaugaccgcggcaaggaaguacugguucuuuggggcauccaccaccccucaacgagcgcugaucaacagaguuuguaccagaacgccgacgcguacguguucgucgggacuucucgauauuccaaaaaguuuaaaccugagauugcaauccguccaaaggugagagaucaggagggaaggaugaauuacuauuggacccugguggaacccggugacaaaauuacauucgaggccacuggcaaccuagucguuccucgguacgcuuuugccauggaacgcaacgcagggagcggaaucauaauuucggauaccccagugcaugacugcaauacaaccugucaaacgccgaagggcgcuaucaacacuucucuccccuuccagaauauucacccuaucacaaucgguaaaugcccaaaguauguaaaguccaccaaacugagacuugccacugggcugaggaacgugcccucaauucagagucggggauuguuuggcgcgauagccggcuucaucgaagggggauggacagguauggucgacggcugguacggguaucaucaccagaaugaacaaggaagcggcuacgcagcugaucucaaguccacccagaacgccauugacaaaaucacgaauaaggugaacucuguuauagagaaaaugaauacccaguuuacagcuguggguaaggaguucaaccagcuggaaaagcgcauugagaauuuaaacaaaaaggucgaugacggguuccuggauaucuggacuuacaaugccgaacuccuugugcuguuggagaacgaacgaacccuagacuaucacgauagcaauguaaagaaccuguacgagaagguuagaucacaacucaaaaacaaugcaaaggagaucggcaacggauguuuugaguucuaucauaagugcgacaauacauguauggaaagugugaaaaacggcacuuacgauuauccuaaguacuccgaagaggccaaacugaauagggaagagauugacggggucaaacuugagagcacccggaucuaucagauucuggcuauauacucuacaguggcgucaaguuugguccucgugguuagccugggagcaaucuccuuuuggaugugcucuaacgguucguuacagugccguauuuguaucuga

SEQ ID NO: 137754 - RNA, 1701 nt, Artificial Sequence; identical to SEQ ID NO: 132217
  derived and/or modified CDS sequence (opt3) from hemagglutinin__InfluenzaA__AFX96383

SEQ ID NO: 137755 - RNA, 1701 nt, Artificial Sequence; identical to SEQ ID NO: 130717
  derived and/or modified CDS sequence (opt3) from hemagglutinin__InfluenzaA__AFX96398

SEQ ID NO: 137756 - RNA, 1701 nt, Artificial Sequence; identical to SEQ ID NO: 130717
  derived and/or modified CDS sequence (opt3) from hemagglutinin__InfluenzaA__AFX96408

SEQ ID NO: 137757 - RNA, 1701 nt, Artificial Sequence; identical to SEQ ID NO: 130717
  derived and/or modified CDS sequence (opt3) from hemagglutinin__InfluenzaA__AFX96418

SEQ ID NO: 137758 - RNA, 1701 nt, Artificial Sequence; identical to SEQ ID NO: 130717
  derived and/or modified CDS sequence (opt3) from hemagglutinin__InfluenzaA__AFX96428

SEQ ID NO: 137759 - RNA, 1701 nt, Artificial Sequence; identical to SEQ ID NO: 130717
  derived and/or modified CDS sequence (opt3) from hemagglutinin__InfluenzaA__AFX96438

SEQ ID NO: 137760 - RNA, 1701 nt, Artificial Sequence; identical to SEQ ID NO: 130717
  derived and/or modified CDS sequence (opt3) from hemagglutinin__InfluenzaA__AFX96448

SEQ ID NO: 137761 - RNA, 1701 nt, Artificial Sequence; identical to SEQ ID NO: 130717
  derived and/or modified CDS sequence (opt3) from hemagglutinin__InfluenzaA__AFX96458

SEQ ID NO: 137762 - RNA, 1701 nt, Artificial Sequence; identical to SEQ ID NO: 130717
  derived and/or modified CDS sequence (opt3) from hemagglutinin__InfluenzaA__AFX96468

SEQ ID NO: 137763 - RNA, 1701 nt, Artificial Sequence; identical to SEQ ID NO: 130717
  derived and/or modified CDS sequence (opt3) from hemagglutinin__InfluenzaA__AFX96478

SEQ ID NO: 137764 - RNA, 1701 nt, Artificial Sequence; identical to SEQ ID NO: 130717
  derived and/or modified CDS sequence (opt3) from hemagglutinin__InfluenzaA__AFX96488

SEQ ID NO: 137765 - RNA, 1701 nt, Artificial Sequence
  derived and/or modified CDS sequence (opt3) from hemagglutinin__InfluenzaA__AFX96498
augaaggccauccuggugguccuccuuuacaccuucgcuacagcaaacgccgacacucugugcauuggcuaucacgcgaauaacagcacggauaccguugacacaguguuggagaaaaauguaacugugacccauuccgucaacuuacuggaagauaagcacaaugggaaacuauguaagcucagaggaguggcuccccugcaucuugguaaaugcaacauagccggcuggauccuggggaauccugagugugaaucuuugucaacagcaaguagcugguccuacauuguugagaccucuucgucagacaacggaacuugcuauccaggcgauuuuaucgacuacgaggagcucagggagcagcugagcaguguguccucuuucgaacgguuugagauuuucccgaagacaagcuccuggcccaaucacgauucaaacaagggugucaccgccgcuuguccucaugcaggggccaaaaguuuuuauaagaaucugaucuggcucgugaaaaagggaaacagcuacccaaaaauaucuaaguccuauaucaaugacaagggcaaagaaguauuaguucuguggggcauucaccaccccucaacgagcgcugaucaacagagucuuuaccagaacgccgacgcguacguguucgucgggacuucucgcuauuccaagaaauuuaagccugagaucgcaauucgaccaaaagugcgugaucaggagggaagaaugaauuacuauuggaccuugguggaacccggugacaagaucacauucgaggccacuggcaaccuggucguuccuagguacgcuuuugccauggaacggaacgcagggagcggaauaauuaucucggauaccccagugcaugacugcaauacaaccugucaaacgccgaaaggcgcuauuaacacuucucuacccuuccagaauauccacccuaucacaauugguaagugcccaaaguauguaaaauccaccaagcuccgccuggccacugggcuuagaaacgugcccucaauacagaguaggggacuguuuggcgcgaucgccggcuucauugaagggggauggacagguauggucgacggcugguacggguaucaucaccagaaugaacaaggaagcggcuacgcagcugauuugaaauccacccagaacgccaucgacgagauaacgaauaaggugaacucuguuauugagaaaaugaauacccaguuuacagcuguggguaaggaguucaaccaccucgaaaagcggaucgaaaaucugaacaaaaaggucgaugacggguucuuagauaucuggacuuacaaugccgagcugcucgugcuucuggaaaacgagcgcaccuuggacuaucaugauagcaauguuaaaaaccuauacgagaagguacgaucacagcugaaaaacaaugcaaaggaaauuggcaacggauguuuugaguucuaucacaagugcgacaauacauguauggaaagugugaaaaacggcacuuacgauuauccuaaguacuccgaggaagccaaacucaauagagaggagaucgacggggucaagcuggaaagcaccaggauuuaucaaauacuugcuaucuacucuacaguggcgucaagucuggucuuggugguuagccucggagcaauuuccuuuuggaugugcucuaacgguucgcugcagugccggaucuguaucuga

SEQ ID NO: 137766 - RNA, 1701 nt, Artificial Sequence; identical to SEQ ID NO: 130717
  derived and/or modified CDS sequence (opt3) from hemagglutinin__InfluenzaA__AFX96508

SEQ ID NO: 137767 - RNA, 1701 nt, Artificial Sequence; identical to SEQ ID NO: 132217
  derived and/or modified CDS sequence (opt3) from hemagglutinin__InfluenzaA__AFX96518

SEQ ID NO: 137768 - RNA, 1701 nt, Artificial Sequence; identical to SEQ ID NO: 130717
  derived and/or modified CDS sequence (opt3) from hemagglutinin__InfluenzaA__AFX96528

SEQ ID NO: 137769 - RNA, 1701 nt, Artificial Sequence; identical to SEQ ID NO: 132217
  derived and/or modified CDS sequence (opt3) from hemagglutinin__InfluenzaA__AFX96538

SEQ ID NO: 137770 - RNA, 1701 nt, Artificial Sequence
  derived and/or modified CDS sequence (opt3) from hemagglutinin__InfluenzaA__AFX96548
augaaggccauccuggugguccuccuuuacaccuucgcuacagcaaacgccgacacucugugcauuggcuaucacgcgaauaacagcacggauaccguugacacaguguuggagaaaaauguaacugugacccauuccgucaacuuacuggaagauaagcacaaugggaaacuauguaagcucagaggaguggcuccccugcaucuugguaaaugcaacauagccggcuggauccuggggaauccugagugugaaucuuugucaacagcaaguagcugguccuacauuguugagaccucuucgucagacaacggaacuugcuauccaggcgauuuuaucgacuacgaggagcucagggagcagcugagcaguguguccucuuucgaacgguuugagauuuucccgaagacaagcuccuggcccaaucacgauucaaacaagggugucaccgccgcuuguccucaugcaggggccaaaaguuuuuauaagaaucugaucuggcucgugaaaaagggaaacagcuacccaaaauuaucuaaguccuauauaaaugacaagggcaaagaaguacugguucuuuggggcauccaccaccccucaacgagcgcugaucaacagaguuuguaccagaacgccgacacuuacguguucgucgggaccucucgcuauuccaagaaauuuaagccugagauugcgauccgaccaaaagugcgugaucaggagggaagaaugaauuacuauuggacacugguggaacccggugacaagauuacuuucgaggcaaccggcaaccuagucguuccuagguacgccuuugcuauggaacggaacgccgggagcggaaucauaauuucggauacaccagugcaugacugcaauaccacgugucaaacuccgaaaggcgcaaucaacacaucucuccccuuccagaauauucacccuaucaccaucgguaagugcccaaaguauguaaaauccacuaagcugcgccuugcuacagggcugagaaacgugcccucaauucagaguaggggauuguuuggcgccauagcgggcuucaucgaagggggauggaccgguauggucgacggcugguacggguaucaucaccagaaugaacaaggaagcggcuacgccgcagaucucaaauccacgcagaacgcuauugacaagaucaccaauaaagugaacucuguuauagagaagaugaauacacaguuuacugccguggguaaggaguucaaccaccuggaaaaacggauugagaauuuaaacaagaaaaucgaugacggguuccuggauaucuggaccuacaaugcugaacuccuuguccuguuggagaacgaacgcacacuagacuaucaugauagcaaugugaagaaccuguacgagaaaguacgaucacagcucaagaacaaugccaaggagauuggcaacggauguuuugaguucuaucacaaaugcgacaauacuuguauggaaaguguuaagaacggcaccuacgauuauccuaaauacuccgaagaggcaaagcugaauagagaagagaucgacggggugaaacuugagagcacaaggauuuaucaaauacuggccaucuacucuaccgucgcuucaaguuuggugcucgucgugagccugggagcgauuuccuuuuggaugugcucuaacgguucguuacagugccggaucuguaucuga

SEQ ID NO: 137771 - RNA, 1701 nt, Artificial Sequence; identical to SEQ ID NO: 130717
  derived and/or modified CDS sequence (opt3) from hemagglutinin__InfluenzaA__AFX96558

SEQ ID NO: 137772 - RNA, 1701 nt, Artificial Sequence; identical to SEQ ID NO: 131877
  derived and/or modified CDS sequence (opt3) from hemagglutinin__InfluenzaA__AFX96568

SEQ ID NO: 137773 - RNA, 1701 nt, Artificial Sequence; identical to SEQ ID NO: 131877
  derived and/or modified CDS sequence (opt3) from hemagglutinin__InfluenzaA__AFX96578

SEQ ID NO: 137774 - RNA, 1701 nt, Artificial Sequence; identical to SEQ ID NO: 130717
  derived and/or modified CDS sequence (opt3) from hemagglutinin__InfluenzaA__AFX96588

SEQ ID NO: 137775 - RNA, 1701 nt, Artificial Sequence; identical to SEQ ID NO: 130717
  derived and/or modified CDS sequence (opt3) from hemagglutinin__InfluenzaA__AFX96598

SEQ ID NO: 137776 - RNA, 1701 nt, Artificial Sequence
  derived and/or modified CDS sequence (opt3) from hemagglutinin__InfluenzaA__AFX96608
augaaggccauccuggugguccuccuuuacaccuucgcuacagcaaacgccgacacucugugcauuggcuaucacgcgaauaacagcacggauaccguugacacaguguuggagaaaaauguaacugugacccauuccgucaacuuacuggaagauaagcacaaugggaaacuauguaagcucagaggaguggcuccccugcaucuugguaaaugcaacauagccggcuggauccuggggaauccugagugugaaucuuugucaacagcaaguagcugguccuacauuguugagaccucuucgucagacaacggaacuugcuauccaggcgauuuuaucgacuacgaggagcucagggagcagcugagcaguguguccucuuucgaacgguuugagauuuucccgaagacaagcuccuggcccaaucacgauucaaacaagggugucaccgccgcuuguccucaugcaggggccaaaaguuuuuauaagaaucugaucuggcucgugaaaaagggaaacagcuacccaaaauuaucuaaguccuauauaaaugacaagggcaaagaaguacugguucuuuggggcauccaccaccccucaacgagcgcugaucaacagaguuuguaccagaacgccgacgcguacguguucgucgggacuucucgcuauuccaagaaauuuaagccugagauugcaauccgaccaaaagugcgugaucaggagggaagaaugaauuacuauuggacccugguggaacccggugacaagauuacauucgaggccacuggcaaccuagucguuccuagguacgcuuuugccauggaacggaacgcagggagcggaaucauaauuucggauaccccagugcaugacugcaauacaaccugucaaacgccgaaaggcgcuaucaacacuucucuccccuuccagaauauucacccuaucacaaucgguaagugcccaaaguauguaaaauccaccaagcugcgccuugccacugggcugagaaacgugcccucaauucagaguaggggauuguuuggcgcgauagccggcuucaucgaagggggauggacagguauggucgacggcugguacggguaucaucaccagaaugaacaaggaagcggcuacgcagcugaucucaaauccacccagaacgccauugacgagaucacgaauaaggugaacucuguuauagagaaaaugaauacccaguuuacagcuguggguaaggaguucaaccaccuggaaaagcggauugaaaauuuaaacaaaaaggucgaugacggguuccuggauaucuggacuuacaaugccgagcuccuugugcuguuggaaaacgagcgcacccuagacuaucaugauagcaauguuaaaaaccuguacgagaagguacgaucacagcucaaaaacaaugcaaaggaaaucggcaacggauguuuugaguucuaucacaagugcgacaauacauguauggaaagugugaaaaacggcacuuacgauuauccuaaguacuccgaggaagccaaacugaauagagagaagauugacggggucaaacuugagagcaccaggaucuaucaaauucuggcuauauacucuacauuggcgucaagucucgugcuggucgugagcuuaggagcaaucuccuuuuggaugugcucuaacgguucgcugcagugccggauuuguaucuga

SEQ ID NO: 137777 - RNA, 1701 nt, Artificial Sequence; identical to SEQ ID NO: 130717
  derived and/or modified CDS sequence (opt3) from hemagglutinin__InfluenzaA__AFX96618

SEQ ID NO: 137778 - RNA, 1701 nt, Artificial Sequence; identical to SEQ ID NO: 131877
  derived and/or modified CDS sequence (opt3) from hemagglutinin__InfluenzaA__AFX96628

SEQ ID NO: 137779 - RNA, 1701 nt, Artificial Sequence
  derived and/or modified CDS sequence (opt3) from hemagglutinin__InfluenzaA__AFX96638
augaaggccauccuggugguccuccuuuacaccuucgcuacagcaaacgccgacacucugugcauuggcuaucacgcgaauaacagcacggauaccguugacacaguguuggagaaaaauguaacugugacccauuccgucaacuuacuggaagauaagcacaaugggaaacuauguaagcucagaggaguggcuccccugcaucuugguaaaugcaacauagccggcuggauccuggggaauccugagugugaaucuuugucaacagcaaguagcugguccuacauuguugagaccucuucgucagacaacggaacuugcuauccaggcgauuuuaucaauuacgaggagcucagggagcagcugagcaguguguccucuuucgaacgguuugagauuuucccgaagacaagcuccuggcccaaccacgacucaaauaagggugucaccgccgcuuguccucaugcaggggccaaaaguuuuuauaagaaccugguguggcucguaaagaagggaaauagcuacccaaaauuaucuaaguccuauaucaacgauaagggcaaagaaguucuggugcuuuggggcauacaccaccccucaacgagcgcugaccaacagaguuuguaccagaaugccgaugcguacgucuucguggggacuucucgcuauuccaagaaauuuaagccugagaucgcaauucgaccaaaagugcgugaccaggagggaagaaugaacuacuauuggacccuggucgaacccggugauaagaucacauucgaggccacuggcaaccuaaugguuccuagguacgcuuuugccauggaacggaaugcagggagcggaauuaucauaucggacaccccagugcaugauugcaacacaaccugucaaacgccgaaaggcgcuauuaauacuucucuccccuuccagaacauccacccuauuacaaucgguaagugcccaaaguauguaaaauccaccaagcugcgccuugccacugggcugagaaaugugcccucaauccagaguaggggauuguuuggcgcgauugccggcuucauagaagggggauggacagguauggucgacggcugguacggguaucaucaccagaacgaacaaggaagcggcuacgcagcugaccucaaauccacccagaaugccaucgaugagauuacgaacaagguaaauucuguuaucgagaaaaugaacacccaguuuacagcuguggguaaggaguucaaucaccuggaaaagcggauagaaaacuuaaauaaaaaggucgacgauggguuccuggacauuuggacuuacaacgccgagcuccuugugcuguuggaaaaugagcgcacccuagauuaucaugacagcaacgugaaaaaccuguacgagaagguucgaucacagcucaaaaauaacgcaaaggaaaucggcaauggauguuuugaguucuaucacaagugcgauaacacauguauggaaagugugaaaaauggcacuuacgacuauccuaaguacuccgaggaagccaaacugaacagagaggagaucgauggggucaaacuugaaagcaccaggauuuaucaaauccuggcuauuuacucuacaguggcgucaaguuugguccucgugguuagccugggagcaauauccuuuuggaugugcucuaaugguucguuacagugccggaucuguauuuga

SEQ ID NO: 137780 - RNA, 1701 nt, Artificial Sequence; identical to SEQ ID NO: 130717
  derived and/or modified CDS sequence (opt3) from hemagglutinin__InfluenzaA__AFX96648

SEQ ID NO: 137781 - RNA, 1701 nt, Artificial Sequence; identical to SEQ ID NO: 131877
  derived and/or modified CDS sequence (opt3) from hemagglutinin__InfluenzaA__AFX96658

SEQ ID NO: 137782 - RNA, 1701 nt, Artificial Sequence
  derived and/or modified CDS sequence (opt3) from hemagglutinin__InfluenzaA__AFX96668
augaaggccauccuggugguccuccuuuacaccuucgcuacagcaaacgccgacacucugugcauuggcuaucacgcgaauaacagcacggauaccguugacacaguguuggagaaaaauguaacugugacccauuccgucaacuuacuggaagauaagcacaaugggaaacuauguaagcucagaggaguggcuccccugcaucuugguaaaugcaacauagccggcuggauccuggggaauccugagugugaaucuuugucaacagcaaguagcugguccuacauuguugagaccucuucgucagacaacggaacuugcuauccaggcgauuuuaucgacuacgaggagcucagggagcagcugagcaguguguccucuuucgaacgguuugagauuuucccgaagacaagcuccuggcccaaucacgauucaaacaagggugucaccgccgcuuguccucaugcaggggccaaaaguuuuuauaagaaucugaucuggcucgugaaaaagggaaacagcuacccaaaauuaucuaaguccuauauaaaugacaagggcaaagaaguacugguucuuuggggcauccaccaccccucaacgagcgcugaucaacagaguuuguaccagaacgccgacgcguacguguucgucgggacuucucgcuauuccaagaaauuuaagccugagauugcaauccgaccaaaagugcgugaucaggagggaagaaugaauuacuauuggacccugguggaacccggugacaagauuacauucgaggccacuggcaaccuagucguuccuagguacgcuuuugccauggaacggaacgcagggagcggaaucauaauuucggauaccccagugcaugacugcaauacaaccugucaaacgccgaaaggcgcuaucaacacuucucuccccuuccagaauauucacccuaucacaaucgguaagugcuccaaguauguaaaaucaaccaagcugcgccuugccacugggcugagaaacgugccaaguauucagagcaggggauuguuuggcgcgauagccggcuucaucgaagggggauggacagguauggucgacggcugguacggguaucaucaccagaaugaacaaggauccggcuacgcagcugaucucaaaucuacccagaacgccauugacgagaucacgaauaaggugaacagcguuauagagaaaaugaauacccaguuuacagcuguggguaaggaguucaaccaccuggaaaagcggauugaaaauuuaaacaaaaaggucgaugacggguuccuggauaucuggacuuacaaugccgagcuccuugugcuguuggaaaacgagcgcacccuagacuaucaugauucaaauguaaagaaccuguacgagaagguucgaagucagcucaaaaacaaugcaaaggaaaucggcaacggauguuuugaguucuaucacaagugcgacaauacauguauggaauccgugaaaaacggcacuuacgauuaucccaaguacagcgaggaagccaaacugaauagagaggagauugacggggucaaacuugaaucuaccaggaucuaucaaauucuggcuauauacucaacaguggcgaguagcuugguccucgugguuucccugggagcaaucucuuuuuggaugugcucgaacgguagcuuacagugccggauuuguaucuga

SEQ ID NO: 137783 - RNA, 1701 nt, Artificial Sequence
  derived and/or modified CDS sequence (opt3) from hemagglutinin__InfluenzaA__AFX96678
augaaggccauccuggugguccuccuuuacaccuucgcuacagcaaacgccgacacucugugcauuggcuaucacgcgaauaacagcacggauaccguugacacaguguuggagaaaaauguaacugugacccauuccgucaacuuacuggaagauaagcacaaugggaaacuauguaagcucagaggaguggcuccccugcaucuugguaaaugcaacauagccggcuggauccuggggaauccugagugugaaucuuugucaacagcaaguagcugguccuacauuguugagaccucuucgucagacaacggaacuugcuauccaggcgauuuuaucgacuacgaggagcucagggagcagcugagcaguguguccucuuucgaacgguuugagauuuucccgaagacaagcuccuggcccaaucacgauucaaacaagggugucaccgccgcuuguagucaugcaggggccaagagcuuuuauaagaaucugaucuggcucgugaaaaagggaaacucuuacccuaaauuauccaagucauauauaaaugacaagggcaaagaaguacugguucuuuggggcauccaccacccaagcacgagugcugaucaacagucuuuguaccagaacgccgacgcguacguguucgucgggacuucccgcuauagcaagaaauuuaagcccgagauugcaauccgaccuaaagugcgugaucaggagggaagaaugaauuacuauuggacccugguggaaccaggugacaagauuacauucgaggccacuggcaaccuagucguucccagguacgcuuuugccauggaacggaacgcagggucgggaaucauaauuucugauaccccugugcaugacugcaauacaaccugucaaacgccaaaaggcgcuaucaacacuucccucccguuccagaauauucaccccaucacaaucgguaagugcccuaaguauguaaaaucaaccaagcugcgccuugccacugggcugagaaacgugccaaguauucagagcaggggauuguuuggcgcgauagccggcuucaucgaagggggauggacagguauggucgacggcugguacggguaucaucaccagaaugaacaaggauccggcuacgcagcugaucucaaaucuacccagaacgccauugacgagaucacgaauaaggugaacagcguuauagagaaaaugaauacccaguuuacagcuguggguaaggaguucaaccaccuggaaaagcggauugaaaauuuaaacaaaaaggucgaugacggguuccuggauaucuggacuuacaaugccgagcuccuugugcuguuggaaaacgagcgcacccuagacuaucaugauucaaauguuaaaaaccuguacgagaagguacgaagucagcucaaaaacaaugcaaaggaaaucggcaacggauguuuugaguucuaucacaagugcgacaauacauguauggaauccgugaaaaacggcacuuacgauuaucccaaguacagcgaggaagccaaacugaauagagaggagauugacggggucaaacuugaaucuaccaggaucuaucaaauucuggcuauauacucaacaguggcgaguagcuugguccucgugguuucccugggagcaaucucuuuuuggaugugcucgaacgguagcuuacagugccggauuuguaucuga

SEQ ID NO: 137784 - RNA, 1701 nt, Artificial Sequence
  derived and/or modified CDS sequence (opt3) from hemagglutinin__InfluenzaA__AFX96688
augaaggccauccuggugguccuccuuuacaccuucgcuacagcaaacgccgacacucugugcauuggcuaucacgcgaauaacagcacggauaccguugacacaguguuggagaaaaauguaacugugacccauuccgucaacuuacuggaagauaagcacaaugggaaacuauguaagcucagaggaguggcuccccugcaucuugguaaaugcaacauagccggcuggauccuggggaauccugacugugagucuuugucaacagcaaguagcugguccuacauuguugaaaccucuucgucagauaacggaacuugcuauccaggcgacuuuaucgauuacgaggaacucagggagcagcugagcaguguguccucuuucgagcgguuugaaauguucccgaagacaagcuccuggcccaaucacgacucaaacaagggugucaccgccgcuuguccucaugcaggggccaaaaguuuuuauaagaaucugauuuggcucgugaaaaagggaaacagcuacccaaaauuaucuaaguccuauaucaaugauaagggcaaagagguacugguucuuuggggcauacaccaccccucaacgagcgcugaccaacagaguuuguaccagaacgccgaugcguacguguucgucgggacuucucgcuauuccaagaaauuuaagccugaaaucgcaauucgaccaaaagugcgugaccaggagggaagaaugaauuacuauuggacccugguggagcccggugauaagaucacauucgaagccacuggcaaccuagucguuccuagguacgcuuuugccauggagcggaacgacgggagcggaauuaucauaucggacaccccagugcaugauugcaauacaaccugucaaacgccgaaaggcgcaauuaacacuucucuccccuuccagaauauccacccuauuacaaucgguaagugcccaaaguauguaaaauccaccaagcugcgccuugcuacugggcugagaaacgugcccucaauccagaguaggggauuguuuggcgccauugcgggcuucauagaagggggauggacagguauggucgacggcugguacggguaucaucaccagaaugagcaaggaagcggcuacgccgcagaucucaaauccacccagaacgcuaucgacgaaauuacgaauaaggugaacucuguuaucgagaaaaugaauacccaguuuacagccguggguaaggaguucaaccaccuggaaaagcggauagagaauuuaaacaaaaaggucgaugacggguuccuggauauuuggacuuacaaugcugaacuccuugugcuguuggagaacgaacgcacccuagacuaucaugauagcaauguaaagaaccuguacgagaagguucgaucacagcucaaaaacaaugccaaggagaucggcaacggauguuuugaguucuaucacaagugcgacaauacauguauggaaagugugaaaaacggcacuuacgauuauccuaaguacuccgaagaggcaaaacugaauagagaagagaucgacggggucaaacuugagagcaccaggauuuaucaaauccuggccauuuacucuacaguggcuucaaguuugguccucgugguuagccugggagcgauauccuuuuggaugugcucuaacgguucguuacagugccggaucuguauuuga

SEQ ID NO: 137785 - RNA, 1701 nt, Artificial Sequence; identical to SEQ ID NO: 130717
  derived and/or modified CDS sequence (opt3) from hemagglutinin__InfluenzaA__AFX96698

SEQ ID NO: 137786 - RNA, 1701 nt, Artificial Sequence
  derived and/or modified CDS sequence (opt3) from hemagglutinin__InfluenzaA__AFX96718
augaaggccauccuggugguccuccuuuacaccuucgcuacagcaaacgccgacacucugugcauuggcuaucacgcgaauaacagcacggauaccguugacacaguguuggagaaaaauguaacugugacccauuccgucaacuuacuggaagauaagcacaaugggaaacuauguaagcucagaggaguggcuccccugcaucuugguaaaugcaacauagccggcuggauccuggggaauccugagugugaaucuuugucaacagcaaguagcugguccuacauuguugagaccucuucgucagacaacggaacuugcuauccaggcgauuuuaucgacuacgaggagcucagggagcagcugagcaguguguccucuuucgaacgguuugagauuuucccgaagacaagcuccuggcccaaucacgauucaaacaagggugucaccgccgcuuguccucaugcaggggccaaaaguuuuuauaagaaucugaucuggcucgugaaaaagggaaacagcuacccaaaaauaucuaaguccuauaucaaugacaagggcaaagaaguauuaguucuguggggcauucaccaccccucaacgagcgcugaucaacagagucuuuaccagaacgccgacacuuacguguucgucgggaccucucgcuauuccaagaaauuuaagccugagaucgcgauucgaccaaaagugcgugaucaggagggaagaaugaauuacuauuggacauugguggaacccggugacaagaucacuuucgaggcaaccggcaaccuggucguuccuagguacgccuuugcuauggaacggaacgccgggagcggaauaauuaucucggauacaccagugcaugacugcaauaccacgugucaaacuccgaaaggcgcaauuaacacaucucuacccuuccagaauauccacccuaucaccauugguaagugcccaaaguauguaaaauccacuaagcuccgccuggcuacagggcuuagaaacgugcccucaauacagaguaggggacuguuuggcgccaucgcgggcuucauugaagggggauggaccgguauggucgacggcugguacggguaucaucaccagaaugaacaaggaagcggcuacgccgcagauuugaaauccacgcagaaggcuaucgacgagauaaccaacaaaguuaauucugugauugagaagaugaacacacaguuuacugccguggguaaggaguucaaucaccucgaaaaacggaucgaaaaccugaauaagaaaaucgaugacggguucuuagauauuuggaccuacaacgcugagcugcucguccuucuggaaaaugagcgcacauuggacuaucaugauagcaacgugaagaaucuauacgagaaaguacgaucacagcugaagaacaacgccaaggaaaucggcaauggauguuuugaguucuaucacaaaugcgacaacacuuguauggaaaguguuaagaauggcaccuacgauuauccuaaauacuccgaggaagcaaagcucaacagagaggagauugacggggugaaacuggaaagcacaaggauauaucaaauccuugccauuuacucuaccgucgcuucaagucugguguuggucgugagccucggagcgaucuccuuuuggaugugcucuaaugguucgcugcagugccggaucuguauuuga

SEQ ID NO: 137787 - RNA, 1701 nt, Artificial Sequence; identical to SEQ ID NO: 137786
  derived and/or modified CDS sequence (opt3) from hemagglutinin__InfluenzaA__AFX96728

SEQ ID NO: 137788 - RNA, 1701 nt, Artificial Sequence; identical to SEQ ID NO: 131187
  derived and/or modified CDS sequence (opt3) from hemagglutinin__InfluenzaA__AFX96738

SEQ ID NO: 137789 - RNA, 1701 nt, Artificial Sequence
  derived and/or modified CDS sequence (opt3) from hemagglutinin__InfluenzaA__AFX96748
augaaggccauccuggugguccuccuuuacaccauugcuacagcaaacgccgacacucugugcauaggcuaucacgcgaauaacagcacggauaccguugacacagugaucgagaaaaauguaacugugacccauuccgucaacuuguuagaagauaagcacaaugggaaacuguguaagcuaagaggaguggcuccccuccaucuggguaaaugcaacauugccggcuggauccuugggaauccugagugugaaucucugucaacagcaaguagcugguccuacauuguugagaccucuucgucagacaacggaacuugcuauccaggcgauuucaucgacuacgaagaguugagggagcagcucagcaguguguccucuuuugaacgguucgagauguuuccgaagacaagcuccuggcccaaucacgauucaaacaagggugucaccgccgcuuguccucaugcaggggccaaaaguuucuauaagaaucugauauggcuggugaaaaagggaaacagcuacccaaaacucucuaaguccuauaucaaugacaagggcaaagaaguauuaguucuguggggcauucaccaccccucaacgagcgcugaucaacagagucuuuaccagaacgccgacgcguacguguuugucgggacuucucgcuauuccaagaaauucaagccugagaucgcaauucgaccaaaagugcgugaucaggagggaagaaugaauuacuauuggaccuugguggaacccggugacaagaucacauuugaggccacuggcaaccuggucguuccuagguacgcuuucgccauggaacggaacgcagggagcggaauaauuaucucggauaccccagugcaugacugcaauacaaccugucaaacgccgaaaggcgcuauuaacacuucucuacccuuucagaauauccacccuaucacaauugguaagugcccaaaguauguaaaauccaccaagcuccgccuggccacugggcuuagaaacgugcccucaauacagaguaggggacuguucggcgcgaucgccggcuuuauugaagggggauggacagguauggucgacggcugguacggguaucaucaccagaaugagcaaggaagcggcuacgcagcugauuugaaauccacccagaacgccaucgacgagauaacgaauaaggugaacucuguuauugagaaaaugaauacccaguucacagcuguggguaaggaauuuaaccaccucgagaagcggaucgaaaaucugaacaaaaaggucgaugacggguucuuagauaucuggacuuacaaugccgagcugcucgugcuucuggaaaacgagcgcaccuuggacuaucaugauagcaauguuaaaaaccuauacgagaagguacgaucacagcugaaaaacaaugcaaaggaaauuggcaacggauguuucgaguuuuaucacaagugcgacaauacauguauggaaagugugaaaaacggcacuuacgauuauccuaaguacuccgaggaagccaaacucaauagagaggagaucgacggggucaagcuggaaagcaccaggauuuaucaaauacuugcuaucuacucuacaguggcgucaagucuggucuuggugguuagccucggagcaauuuccuucuggaugugcucuaacgguucgcugcagugccggaucuguaucuga

SEQ ID NO: 137790 - RNA, 1701 nt, Artificial Sequence
  derived and/or modified CDS sequence (opt3) from hemagglutinin__InfluenzaA__AFX96758
augaaggccauccuggugguccuccuuuacaccuucgcuacagcaaacgccgacacucugugcauuggcuaucacgcgaauaacagcacggauaccguugacacaguguuggagaagaauguaacugugacccauuccgucaacuuacuggaagauaagcacaaugggaaacuauguaagcucagaggaguggcuccccugcaucuugguaaaugcaacauagccggcuggauccuggggaauccugagugugaaucuuugucaacagcaaguagcugguccuacauuguugagaccucuucgucagacaacggaacuugcuauccaggcgauuuuaucgacuacgaggagcucagggagcagcugagcaguguguccucuuucgaacgguuugagauguucccgaagacaagcuccuggcccaaucacgauucaaacaagggugucaccgccgcuuguccucaugcaggggccaaaaguuuuuauaagaaucugauuuggcucgugaaaaagggaaacagcuacccaaaauuaucuaaguccuauaucaaugacaagggcaaagaaguacugguucuuuggggcauacaccaccccucaacgagcgcugaucaacagaguuuguaccagaacgccgacacuuacguguucgucgggaccucucgcuauuccaagaaauuuaagccugagaucgcgauucgaccaaaagugcgugaucaggagggaagaaugaauuacuauuggacacugguggaacccggugacaagaucacuuucgaggcaaccggcaaccuagucguuccuagguacgccuuugcuauggaacggaacgccgggagcggaauuaucauaucggauacaccagugcaugacugcaauaccacgugucaaacuccgaaaggcgcaauuaacacaucucuccccuuccagaauauccacccuauuaccaucgguaagugcccaaaguauguaaaauccacuaagcugcgccuugcuacagggcugagaaacgugcccucaauccagaguaggggauuguuuggcgccauugcgggcuucauagaagggggauggaccgguauggucgacggcugguacggguaucaucaccagaaugaacaaggaagcggcuacgccgcagaucucaaauccacgcagaacgcuaucgacgagauuaccaauaaggugaacucuguuaucgagaaaaugaauacacaguuuacugccguggguaaggaguucaaccaccuggaaaagcggauagaaaauuuaaacaaaaagauugaugacggguuccuggauaucuggaccuacaaugcugagcuccuuguccuguuggaaaacgagcgcacacuagacuaucaugauagcaaugugaaaaaccuguacgagaagguacgaucacagcucaaaaacaaugccaaggaaaucggcaacggauguuuugaguucuaucacaagugcgacaauacuuguauggaaaguguuaaaaacggcaccuacgauuauccuaaguacuccgaggaagcaaaacugaauagagaggagauugacggggugaaacuugaaagcacaaggaucuaucaaauucuggccauauacucuaccgucgcuucaaguuuggugcucgucgugagccugggagcgaucuccuuuuggaugugcucuaacgguucguuacagugccggauuuguaucuga

SEQ ID NO: 137791 - RNA, 1701 nt, Artificial Sequence
  derived and/or modified CDS sequence (opt3) from hemagglutinin__InfluenzaA__AFX96768
augaaggccauccuggugguccuccuuuacaccuucgcuacagcaaacgccgacacucugugcauuggcuaucacgcgaauaacagcacggauaccguugacacaguguuggagaaaaauguaacugugacccauuccgucaacuuacuggaagauaagcacaaugggaaacuauguaagcucagaggaguggcuccccugcaucuugguaaaugcaacauagccggcuggauccuggggaauccugagugugaaucuuugucaacagcaauuaguuggagcuacaucguugagaccuccucuucggacaacggaacuugcuauccaggcgauuuuauugacuacgaggagcucagggagcagcugucaagcgugaguuccuucgaacgguuugagaucuucccgaagacaucuagcuggcccaaucacgauuccaacaagggugucaccgccgcuuguccucaugcaggggccaaaucauuuuauaagaaucugauauggcucgugaaaaagggaaacaguuacccaaaauuaagcaagucuuauaucaaugacaagggcaaagaaguacugguucuuuggggcauucaccaccccuccacgucagcugaucaacagagcuuguaccagaacgccgacgcguacguguucgucgggaccagucgcuauucuaagaaauuuaagccugagaucgcaauucgaccaaaagugcgugaucaggagggaagaaugaauuacuauuggacucugguggaacccggugacaagaucacauucgaggccacuggcaaccuagucguuccuagguacgcuuuugccauggaacggaacgcaggguccggaauaauuaucagcgauaccccagugcaugacugcaauacaaccugucaaacgccgaaaggcgcuauuaacacuucgcuccccuuccagaauauccacccuaucacaauugguaagugcccaaaguauguaaaaucuaccaagcugcgccuugccacugggcugagaaacgugcccuccauacagucaaggggauuguuuggcgcgaucgccggcuucauugaagggggauggacagguauggucgacggcugguacggguaucaucaccagaaugaacaaggaaguggcuacgcagcugaucucaaaagcacccagaacgccaucgacgagauaacgaauaaggugaacuccguuauugagaaaaugaauacccaguuuacagcuguggguaaggaguucaaccaccuggaaaagcggaucgaaaauuuaaacaaaaaggucgaugacggguuccuggauaucuggacuuacaaugccgagcuccuugugcuguuggaaaacgagcgcacccuagacuaucaugauucuaauguaaagaaccuguacgagaagguucgaagccagcucaaaaacaaugcaaaggaaauuggcaacggauguuuugaguucuaucacaagugcgacaauacauguauggaaucagugaaaaacggcacuuacgauuauccuaaguacagugaggaagccaaacugaauagagaggagaucgacggggucaaacuugaauccaccaaaauuuaucaaauacuggcuaucuacagcacaguggcgucuucauugguccucgugguuagucugggagcaauuagcuuuuggaugugcuccaacgguucuuuacagugcaggaucuguaucuga

SEQ ID NO: 137792 - RNA, 1701 nt, Artificial Sequence
  derived and/or modified CDS sequence (opt3) from hemagglutinin__InfluenzaA__AFX96778
augaaggccauccuggugauucuccuuuacaccuucgcuacagcaaacgccgacacucugugcauaggcuaucacgcgaauaacagcacggauaccgucgacacaaucuuggagaaaaauguuacugugacccauuccguaaacuuacuggaagauaagcacaaugggaaacuauguaagcucagaggaguggcuccccugcaucuugguaaaugcaacauugccggcuggauccuggggaauccugagugugaaucuuugucaacagcaaguagcugguccuacauugucgagaccucuucgucagacaacggaacuugcuauccaggcgauuuuaucgacuacgaggagcucagggagcagcugagcaguguguccucuuucgaacgguuugagauauucccgaagacaagcuccuggcccaaucacgauucaaacaaggguguuaccgccgcuuguccucaugcaggggccaaaaguuuuuauaagaaucugaucuggcucgugaaaaagggaaacagcuacccaaaauuaucuaaguccuauauuaaugacaagggcaaagaaguccuggugcuuuggggcauccaccaccccucaacgagcgcugaucaacagaguuuguaccagaacgccgacgcguacguauucguugggacuucucgcuauuccaagaaauuuaagccugagauugcaauccgaccaaaagugcgugaucaggagggaagaaugaauuacuauuggacccuggucgaacccggugacaagauaacauucgaggccacuggcaaccuaguggugccuagguacgcuuuugccauggaacggaacgcagggagcggaauuaucauuucggauaccccaguccaugacugcaauacaaccugucaaacgccgaaaggcgcuaucaacacuucucuccccuuccagaauauccacccuauuacaauagguaagugcccaaaguauguuaaauccaccaagcugcgccuugccacugggcugagaaacgugcccucaauccagaguaggggauuguuuggcgcgauugccggcuucaucgaagggggauggacagguaugguagacggcugguacggguaucaucaccagaaugaacaaggaagcggcuacgcagcugaucucaaauccacccagaacgccauagacgagauuacgaauaaggugaacucugucaucgagaaaaugaauacccaguuuacagcuguggguaaggaguucaaccaccuggaaaagcggaucgaaaauuuaaacaaaaagguugaugacggguuccuggauauuuggacuuacaaugccgagcuccuugugcuguuggaaaacgagcgcacccuagacuaucaugauagcaaugucaaaaaccuguacgagaaggugcgaucacagcucaaaaacaaugcaaaggaaaucggcaacggauguuuugaguucuaucacaagugcgacaauacauguauggaaaguguaaagaacggcacuuacgauuauccuaaguacuccgaggaagccaaacugaauagagaggagauugacgggguuaaacuugaaagcaccaggauauaucaaauccuggcuauuuacucuacaguggcgucaaguuugguccucguggucagccugggagcaaucuccuuuuggaugugcucuaacgguucguuacagugccggaucuguauuuga

SEQ ID NO: 137793 - RNA, 1701 nt, Artificial Sequence
  derived and/or modified CDS sequence (opt3) from hemagglutinin__InfluenzaA__AFX96788
augaaggccauccuggugguccuccuuuacaccuucgcuacagcaaacgccgacacucugugcauuggcuaucacgcgaauaacagcacggauaccguugacacaguguuggagaaaaauguaacugugacccauuccgucaacuuacuggaagauaagcacaaugggaaacuauguaagcucagaggaguggcuccccugcaucuugguaaaugcaacauagccggcuggauccuggggaauccugagugugaaucuuugucaacagcaaguagcugguccuacauuguugagaccucuucgucagacaacggaacuugcuauccaggcgauuuuaucgacuacgaagaacucagggagcagcugagcaguguguccucuuucgaacgguuugagauuuucccgaagacaagcuccuggcccaaucacgauucaaacaagggugucaccgccgcuuguccucaugcaggggccaaaaguuuuuauaagaaucugaucuggcucgugaaaaagggaaacagcuacccaaaauuaucuaaguccuauauaaaugacaagggcaaagaaguacugguucuuuggggcauccaccaccccucaacgagcgcugaucaacagaguuuguaccagaacgccgacgcguacguguucgucgggacuucucgcuauuccaagaaauuuaagccugagauugcaauccgaccaaaagugcgugaucaggagggaagaaugaauuacuauuggacccugguggaacccggugacaagauuacauucgaggccacuggcaaccuagucguuccuagguacgcuuuugccauggagaaaaacgcagggagcggaaucauaauuucggauaccccagugcaugacugcaauacaaccugucaaacgccgaagggcgcuaucaacacuucucuccccuuccagaauauucacccuaucacaaucgguaagugcccaaaauauguaaaguccaccaaacugcggcuugccacugggcugcgcaacgugcccucaauucagaguagaggauuguuuggcgcgauagccggcuucaucgaagggggauggacagguauggucgacggcugguacggguaucaucaccagaaugaacaaggaagcggcuacgcagcugaucucaaguccacccagaacgccauugacaaaaucacgaauaaggugaacucuguuauagagaagaugaauacccaguuuacagcuguggguaaagaguucaaccaccuggaaaagaggauugagaauuuaaacaaaaaggucgaugacggguuccuggauaucuggacuuacaaugccgaacuccuugugcuguuggagaacgaacggacccuagacuaucaugauagcaauguaaagaaccuguacgagaagguucgcucacagcucaagaacaaugcaaaagagaucggcaacggauguuuugaguucuaucacaagugcgacaauacauguauggagagugugaaaaacggcacuuacgauuauccuaaguacuccgaagaggccaaacugaaucgagaagagauugacggggucaaacuugagagcaccagaaucuaucaaauucuggcuauauacucuacaguggcgucaaguuugguccucgugguuagccugggagcaaucuccuuuuggaugugcucuaacgguucguuacagugcaggauuuguaucuga

SEQ ID NO: 137794 - RNA, 1701 nt, Artificial Sequence; identical to SEQ ID NO: 137793
  derived and/or modified CDS sequence (opt3) from hemagglutinin__InfluenzaA__AFX96798

SEQ ID NO: 137795 - RNA, 1701 nt, Artificial Sequence; identical to SEQ ID NO: 131877
  derived and/or modified CDS sequence (opt3) from hemagglutinin__InfluenzaA__AFX96808

SEQ ID NO: 137796 - RNA, 1701 nt, Artificial Sequence; identical to SEQ ID NO: 134957
  derived and/or modified CDS sequence (opt3) from hemagglutinin__InfluenzaA__AFX96818

SEQ ID NO: 137797 - RNA, 1701 nt, Artificial Sequence; identical to SEQ ID NO: 137793
  derived and/or modified CDS sequence (opt3) from hemagglutinin__InfluenzaA__AFX96828

SEQ ID NO: 137798 - RNA, 1701 nt, Artificial Sequence; identical to SEQ ID NO: 133314
  derived and/or modified CDS sequence (opt3) from hemagglutinin__InfluenzaA__AFX96838

SEQ ID NO: 137799 - RNA, 1701 nt, Artificial Sequence
  derived and/or modified CDS sequence (opt3) from hemagglutinin__InfluenzaA__AFX96856
augaaggccauccuggugguccuccuuuacaccuucgcuacagcaaacgccgacacucugugcauuggcuaucacgcgaauaacagcacggauaccguugacacaguguuggagaaaaauguaacugugacccauuccgucaacuuacuggaagauaagcacaaugggaaacuauguaagcucagaggaguggcuccccugcaucuugguaaaugcaacauagccggcuggauccuggggaauccugagugugaaucuuugucaacagcaaguagcugguccuacauuguugagaccucuucgucagacaacggaacuugcuauccaggcgauuuuaucgacuacgaggagcucagggagcagcugagcaguguguccucuuucgaacgguuugagauuuucccgaagacaagcuccuggcccaaucacgauucaaacaagggugucaccgccgcuuguacgcaugcaggggccaaaaguuuuuauaagaaucugaucuggcucgugaaaaagggaaacagcuacccuaaauuaucuaaguccuauauaaaugacaagggcaaagaaguacugguucuuuggggcauccaccacccaucaacuagcgcugaucaacagaguuuguaccagaacgccgacgcguacguguucgucgggaccucucgcuauuccaagaaauuuaagcccgagauugcaauccgaccuaaagugcgugaucaggagggaagaaugaauuacuauuggacacugguggaaccaggugacaagauuacuuucgaggccaccggcaaccuagucguucccagguacgcuuuugccauggaacggaacgcagggagcggaaucauaauuucggauacaccugugcaugacugcaauaccacgugucaaacuccaaaaggcgcuaucaacacaucucucccguuccagaauauucaccccaucaccaucgguaagugcccuaaguauguaaaauccacuaagcugcgccuugccacagggcugagaaacgugccaucaauucagaguaggggauuguuuggcgcgauagccggcuucaucgaagggggauggaccgguauggucgacggcugguacggguaucaucaccagaaugaacaaggaagcggcuacgcagcugaucucaaauccacgcagaacgccauugacgagaucaccaauaaggugaacucuguuauagagaaaaugaauacacaguuuacugcuguggguaaggaguucaaccaccuggaaaagcggauugaaaauuuaaacaaaaaggucgaugacggguuccuggauaucuggaccuacaaugccgagcuccuugugcuguuggaaaacgagcgcacacuagacuaucaugauagcaauguaaagaaccuguacgagaagguucgaucacagcucaaaaacaaugcaaaggaaaucggcaacggauguuuugaguucuaucacaagugcgacaauacuuguauggaaagugugaaaaacggcaccuacgauuaucccaaguacuccgaggaagccaaacugaauagagaggagauugacggggucaaacuugaaagcacaaggaucuaucaaauucuggcuauauacucuaccguggcgucaaguuugguccucgugguuagccugggagcaaucuccuuuuggaugugcucuaacgguucguuacagugccggauuuguaucuga

SEQ ID NO: 137800 - RNA, 1701 nt, Artificial Sequence; identical to SEQ ID NO: 137782
  derived and/or modified CDS sequence (opt3) from hemagglutinin__InfluenzaA__AFX96904

SEQ ID NO: 137801 - RNA, 1701 nt, Artificial Sequence; identical to SEQ ID NO: 132217
  derived and/or modified CDS sequence (opt3) from hemagglutinin__InfluenzaA__AFX96914

SEQ ID NO: 137802 - RNA, 1701 nt, Artificial Sequence
  derived and/or modified CDS sequence (opt3) from hemagglutinin__InfluenzaA__AFX96924
augaaggccauccuggugguccuccuuuacaccuucgcuacagcaaacgccgacacucugugcauuggcuaucacgcgaauaacagcacggauaccguugacacaguguuggagaaaaauguaacugugacccauuccgucaacuuacuggaagauaagcacaaugggaaacuauguaagcucagaggaguggcuccccugcaucuugguaaaugcaacauagccggcuggauccuggggaauccugagugugaaucuuugucaacagcaaguagcugguccuacauuguugagaccucuucgucagacaacggaacuugcuauccaggcgauuuuaucgacuacgaggagcucagggagcagcugagcaguguguccucuuucgaacgguuugagauuuucccgaagacaagcuccuggcccaaucacgauucaaacaagggugucaccgccgcuuguccucaugcaggggccaaaaguuuuuauaagaaucugaucuggcucgugaaaaagggaaacagcuacccaaaauuaucuaaguccuauauaaaugacaagggcaaagaaguacugguucuuuggggcauccaccaccccucaacgagcgcugaucaacagaguuuguaccagaacgccgacgcguacguguucgucgggacuucucgcuauuccaagcgauuuaaaccugagauugcaauccguccaaaggugagagaucaggagggaaggaugaauuacuauuggacccugguggaacccggugacaaaauuacauucgaggccacuggcaaccuagucguuccucgguacgcuuuugccauggaacgcaacgcagggagcggaaucauaauuucggauaccccagugcaugacugcaauacaaccugucaaacgccgaagggcgcuaucaacacuucucuccccuuccagaauauucacccuaucacaaucgguaaaugcccaaaguauguaaaguccaccaaacugagacuugccacugggcugaggaacgugcccucaauucagagucggggauuguuuggcgcgauagccggcuucaucgaagggggauggacagguauggucgacggcugguacggguaucaucaccagaaugaacaaggaagcggcuacgcagcugaucucaaguccacccagaacgccauugacgagaucacgaauaaagugaacucuguuauagagaagaugaauacccaguuuacagcuguggguaaagaguucaaccaccuggaaaagcgcauugaaaauuuaaacaagaaagucgaugacggguuccuggauaucuggacuuacaaugccgagcuccuugugcuguuggaaaacgagcgaacccuagacuaucaugauagcaauguaaagaaccuguacgagaaaguuagaucacagcucaagaacaaugcaaaagaaaucggcaacggauguuuugaguucuaucacaagugcgacaauacauguauggaaagugugaagaacggcacuuacgauuauccuaaauacuccgaggaagccaagcugaauagggaggagauugacggggucaaacuugaaagcacccggaucuaucaaauucuggcuauauacucuacaguggcgucaaguuugguccucgugguuagccugggagcaaucuccuuuuggaugugcucuaacgguucguuacagugccguauuuguaucuga

SEQ ID NO: 137803 - RNA, 1701 nt, Artificial Sequence; identical to SEQ ID NO: 130717
  derived and/or modified CDS sequence (opt3) from hemagglutinin__InfluenzaA__AFX96934

SEQ ID NO: 137804 - RNA, 1701 nt, Artificial Sequence
  derived and/or modified CDS sequence (opt3) from hemagglutinin__InfluenzaA__AFY24097
augaaggccauccuggugguccuccuuuacaccuucgcuacagcaaacgccgacacucugugcauuggcuaucacgcggauaauagcacggacaccguugauacaguguuggagaagaacguaacugugacccauuccgucgacuuacuggaagauaagcacaaugggaaacuauguaagcucagaggaguggcuccccugcaucuugguaaaugcaacauagccggcuggauccuggggaauccugagugugaaucuuugucaacagcaaguagcugguccuacauuguugagaccucuucgucagacaacggaacuugcuauccaggcgauuuuaucgacuacgaggagcucagggagcagcugagcaguguguccucuuucgaacgguuugagauuuucccgaagacaagcuccuggcccaaucacgauucaaacaagggugucaccgccgcuuguccucaugcaggggccaaaaguuuuuauaagaaucugaucuggcucgugaaaaagggaaacagcuacccaaaauuaaauaagucuuauauaaacgacaagggcaaagaaguacugguucuuuggggcauccaccaccccuccacgucaacugaucaacagagcuuguaccagaaugcugacgccuacguguucgucgggaccagucgcuauucuaagaaauuuaagccugagauugcgauccgaccaaaagugcgugaucaggagggaagaaugaacuacuauuggacacugguggaacccggugacaagauuacuuucgaggcaaccggcaaucuagucguuccuagguacgccuuugcuauggaacggaacgccggguccggaaucauaauuagcgacacaccagugcaugauugcaacaccacgugucaaacuccgaaaggcgcaaucaauacaucgcuccccuuccagaacauucacccuaucaccaucgguaagugcccaaaguauguaaaaucuacuaagcugcgccuugcuacagggcugagaaaugugcccuccauucagucaaggggauuguuuggcgccauagcgggcuucaucgaagggggauggaccgguauggucgacggcugguacggguaucaucaccagaacgaacaaggaaguggcuacgccgcagaucucaaaagcacgcagaaugcuauugacgagaucaccaacaagguaaauuccguuauagagaaaaugaacacacaguuuacugccguggguaaggaguucaaucaccuggaaaagcggauugaaaacuuaaauaaaaaggucgaugacggguuccuggauaucuggaccuacaacgcugagcuccuugugcuguuggaaaaugagcgcacacuagacuaucaugauucuaacgugaaaaaucuguacgagaagguucgaagccagcucaaaaacaacgccaaggaaaucggcaauggauguuuugaguucuaucacaagugcgacaacacuuguauggaaucagugaaaaauggcaccuacgauuauccuaaguacagugaggaagcaaaacugaacagagaggagauugacggggucaaacuugaauccacaaggaucuaucaaauucuggccauauacagcaccguggcuucuucauugguccucgugguuagucugggagcgaucagcuuuuggaugugcuccaaugguucuuuacagugccggauuuguaucuga

SEQ ID NO: 137805 - RNA, 1701 nt, Artificial Sequence; identical to SEQ ID NO: 128678
  derived and/or modified CDS sequence (opt3) from hemagglutinin__InfluenzaA__AFY24162

SEQ ID NO: 137806 - RNA, 1701 nt, Artificial Sequence
  derived and/or modified CDS sequence (opt3) from hemagglutinin__InfluenzaA__AFY24195
augaagaccaucauugcccugagcuacauacucugccuuguguucgcucagaaacugcccggcaacgacaauuccacagcaacuuuguguuuagggcaccaugccgucccuaacggaacgaucguuaagaccauuacaaaugaucaaaucgaggugacuaacgcgaccgaacugguacagucuucaaguacagguggcauuugcgacagcccacaccagauccuagauggggagaauuguacccucauagacgcucugcuuggagauccgcagugcgacggcuuucaaaacaaaaagugggaucuguucguggaaagauccaaagccuauucuaauuguuaccccuaugacgucccugauuacgcaucguugaggucacucguggccagcagugguacucuggaguuuaacaaugaauccuucaacuggacagggguuacccagaauggaacgucuagcgcuugcaagcggcgcuccaacaauucauuuuucagucgacugaacuggcucacucauuuaaaguuuaaauauccagcacugaaugugaccaugcccaacaacgagaaguucgacaaacuuuacaucuggggcguccaccauccuggcacagauaaugaccagaucuuuuuguaugcccaggcuagcgggcguauuacugugucuaccaagagaucccaacagacaguaauuccaaacaucggaucaaggccccggauacgcaauauuccuagcagaaucaguauuuacuggaccaucguuaaaccaggugauauccugcuaauuaacucuacgggcaaucucauagccccgaggggguacuucaagauccgguccggaaagagcucgauuaugcgcucugacgcgcccaucggcaaauguaacuccgagugcauaacuccuaaugguucaauuccaaacgacaagcccuuucagaaugugaaccgaaucacauauggggcauguccuagauacgucaaacagaauacccugaagcuggccacuggaaugaggaacgugccagaaaaacaaacacggggcaucuucggcgcuauugccggguuuaucgagaauggaugggaagguaugguggauggcugguauggguuccgucaccagaacagugagggaauuggccaggcagcugaccuuaagagcacccaagccgcgauaaaucagaucaacgguaaauugaaccgccucauugggaagacgaaugagaaguuccaccagaucgaaaaagaguuuuccgaagucgagggcagaauccaggaucuggaaaaguacguugaggacaccaaaauugauuuauggucuuauaacgccgagcugcucguggcacuugaaaaucaacauacaauagaccugacugauagcgagaugaacaaguuguucgaaaggaccaaaaagcagcuacgggagaaugcugaagacaugggaaacggcugcuuuaagaucuaccacaaaugugauaaugccugcauugggucaauccgaaacggaacauaugaccaugauguauaccgcgacgaggcucugaauaacagauuccagauuaaggguguggagcucaaaaguggcuacaaggacuggauccuguggauauccuuugccaucagcugcuuccuucugugugucgcauugcucggguuuauuaugugggccugccagaaaggaaauaucagguguaacauuugcaucuga

SEQ ID NO: 137807 - RNA, 1701 nt, Artificial Sequence; identical to SEQ ID NO: 128233
  derived and/or modified CDS sequence (opt3) from hemagglutinin__InfluenzaA__AFY24217

SEQ ID NO: 137808 - RNA, 1701 nt, Artificial Sequence
  derived and/or modified CDS sequence (opt3) from hemagglutinin__InfluenzaA__AGB08294
augaaggccauccuggugguccuccuuuacaccuucgcuacagcaaacgccgacacucugugcauuggcuaucacgcgaauaacagcacggauaccguugacacaguguuggagaaaaauguaacugugacccauuccgucaacuuacuggaagauaagcacaaugggaaacuauguaagcucagaggaguggcuccccugcaucuugguaaaugcaacauagccggcuggauccuggggaauccugagugugaaucuuugucaacagcaaguagcugguccuacauuguugagaccucuucgucagacaacggaacuugcuauccaggcgauuuuaucaauuacgaggagcucagggagcagcugagcaguguguccucuuucgaacgguuugagauuuucccgaagacaagcuccuggcccaaccacgacucaaauaagggugucaccgccgcuuguccucaagcaggggccaaaaguuuuuauaagaaccugaucuggcucgugaaaaagggaaauagcuacccaaaauuaauaaagucuuauaucaacgauaagggcaaagaaguacugguucuuuggggcauucaucaccccuccacgucagcugaccagcagagcuuguaccagaaugccgaugcguacguguucgucgggaccaguaaguauucuaaaaaguuuaaaccugagaucgcagugcgcccaaaggugcgagaccaagagggacguaugaacuacuauuggacucuggucgaacccggugauaaaauuacauucgaggccacuggcaaccuacucguuccuagauacgcuuuugugauggaaaggaaugccggguccggaaucauaauuagcgacaccccaguacacgauugcaacacaaccugucagacgccgaagggcgcaaucaauacuucgcugcccuuccagaacauucauccuaucacaaucgguaagugcccaaaauaugugaagucuaccaaacuucggcuggcuacuggguugcgcaauauucccuccauacagucaagaggacucuuuggcgccaucgcgggcuucauugaagggggauggacagguauggucgacggcugguacggguaucaccaucaaaacgcccagggaaguggcuacgcagcugaccuuaagagcacccagaaugccaucgauaaaauaacgaacaagguaaauuccguuauugaaaagaugaacacccaguuuacagcuguggguaaagaguucaaucacuuagagaagaggaucgaaaaccugaauaaaaaggucgacgauggguuccucgacaucuggacuuacaacgccgagcuucugguguugcuagaaaaugagcggacccuggauuaucacgacucuaacgugaaaaaccucuacgaaaagguucgcagccaacugaagaauaacgcaaaagagauuggcaauggauguuuugaguucuaucauaagugcgauaacacauguauggaaucagugaaaaauggcacuuacgacuauccucgauacagugaggaagccaagcugaacagagaggaaaucgauggggucaaacuggaguccaccaggauuuaucagauauuggcuaucuacagcacaguggcgucuucacucguccuggugguuaguuuaggagcaauuagcuuuuggaugugcuccaaugguucucugcagugccggaucuguaucuga

SEQ ID NO: 137809 - RNA, 1701 nt, Artificial Sequence
  derived and/or modified CDS sequence (opt3) from hemagglutinin__InfluenzaA__AGB08295
augaaggccauccuggugguccuccuuuacaccuucgcuacagcaaacgccgacacucugugcauuggcuaucacgcgaauaacagcacggauaccguugacacagugauagagaaaaauguaacugugacccauuccgucaacuuguuagaagauaagcacaaugggaaacuguguaagcuaagaggaguggcuccccuccaucuggguaaaugcaacaucgccggcuggauucuugggaauccugagugugaaucucugucaacagcaaguagcugguccuacaucguugagaccucuucgucagacaacggaacuugcuauccaggcgauuuuauuaauuacgaagaguugagggagcagcucagcaguguguccucuuucgaacgguuugagaucuucccgaagacaagcuccuggcccaaccacgacucaaauaagggugucaccgccgcuuguccucaugcaggggccaaaaguuuuuauaagaaccugauauggcuggugaaaaagggaaauagcuacccaaaacucucuaaguccuauaucaacgauaagcgcaaagaaguauuaguucuguggggcauucaccaccccucaacgacugcugaccaacagagccuuuaccagaaugccgaugcguacguguucgucggcaccagucgauauucuaagaaauuuaagccugagaucgcaauucguccaaaagugagagaccaggaggggaggaugaacuacuauuggacauugguggaacccggagauaagaucacuuucgaggccaccgguaaccuggucguuccucgguacgcuuuugccauggaacgcacagcaggcuccgggauaauuaucagcgacaccccagugcaugauugcaauacgacuugucaaacaccgaaaggagcuauuaacaccucgcuacccuuccagaauauccacccuaucacuauuggcaagugcccaaaguauguaaaaucuacaaagcucagacuggccaccggucuuaggaacauacccuccauccagucacgggggcuguuuggagcgauugccggcuucaucgagggcggguggacgggaaugguggacgguugguacggcuaucaucaccagaaugaacaagggaguggauacgcagcugacuugaaaagcacccagaacgccauagauaagauuacaaauaaagucaacuccgugaucgagaagaugaauacucaguuuaccgcuguuggcaaggaguucaaccaccucgaaaaacgcaucgagaaucugaacaagaaaguggacgaugguuucuuagacauuuggacauacaaugccgaacugcucguccuucuggagaacgaacgaacuuuggauuaucaugacucuaaugugaagaaccuauacgagaaaguaagaaaccagcugaagaauaacgcaaaggagaucgggaauggcuguuuugaguucuaucacaaaugcgauaacaccuguauggaaagcguuaagaauggaacauacgacuauccuaaauacucagaagaggccaagcucaacagggaagagauugauggcgugaaacuggagaguacccggauauaucaaauccuugcuauuuacuccacugucgcgagcucucugguguuggucgugucacucggggcaaucaguuuuuggaugugcagcaauggaucccugcagugccguaucuguauuuga

SEQ ID NO: 137810 - RNA, 1701 nt, Artificial Sequence
  derived and/or modified CDS sequence (opt3) from hemagglutinin__InfluenzaA__AGB08296
augaaggccauccuggugguccuccuuuacaccuucgcuacagcaaacgccgacacucugugcauuggcuaucacgcgaauaacagcacggauaccguugacacaguguuggagaaaaauguaacugugacccauuccgucaacuuacuggaagauaagcacaaugggaaacuauguaagcucagaggaguggcuccccugcaucuugguaaaugcaacauagccggcuggauccuggggaauccugagugugaaucuuugucaacagcaaguagcugguccuacauuguugagaccucuucgucagacaacggaacuugcuauccaggcgauuuuaucaauuacgaagaacucagggagcagcugagcaguguguccucuuucgaacgguuugagauuuucccgaagacaagcuccuggcccaaccacgacucaaauaagggugucaccgccgcuuguccucaugcaggggccaaaaguuuuuauaagaaccugaucuggcucgugaaaaagggaaauagcuacccaaaauuaucuaaguccuauauaaacgauaagggcaaagaaguacugguucuuuggggcauccaccaccccucaacgacugcugaccaacagagcuuguaccagaaugccgaugcguacguguucgucgggaccagucgcuauucuaagaaauuuaagccugagauugcaauccgaccaaaagugcguggacaggaggguagaaugaacuacuauuggacacugguggaacccggcgacaagauuacuuucgaggccaccgggaaccuagucguuccuagguacgcuuuugccauggaacggacagcaggauccggcaucauaauuagcgauaccccagugcaugacugcaauacgacuugucaaacaccgaaaggugcuaucaacaccucgcuccccuuccagaauauucacccuaucacuaucgggaagugcccaaaguauguaaaaucuacaaagcugcgccuugccaccggacugagaaacgugcccuccauucagucaaggggcuuguuuggcgcgauagccggguucaucgagggagguuggacgggcauggucgaugggugguacggauaucaucaccagaaugaacaaggcagugguuacgcagcugaccucaaaagcacccagaacgccauugacaagaucacaaauaaagugaacuccguuauagagaagaugaauacucaguuuaccgcuguggggaaggaguucaaccaccuggaaaaacggauugagaauuuaaacaagaaagucgaugacggcuuccuggauaucuggacauacaaugccgaacuccuugugcuguuggagaacgaacgcacucuagacuaucaugauucuaauguaaagaaccuguacgagaaaguucgaaaccagcucaagaauaacgcaaaggagaucggaaauggcuguuuugaguucuaucacaaaugcgacaacaccuguauggagagcgugaagaaugggacauacgauuauccuaaauacucagaagaggccaagcugaacagagaagagauugacggagucaaacuugagaguaccaggaucuaucaaauucuggcuauauacuccacuguggcgagcucuuugguccucgugguuucacugggugcaaucaguuuuuggaugugcagcaauggcuccuuacagugccggauuuguaucuga

SEQ ID NO: 137811 - RNA, 1701 nt, Artificial Sequence
  derived and/or modified CDS sequence (opt3) from hemagglutinin__InfluenzaA__AGB08297
augaaggccauccuggugguccuccuuuacaccuucgcuacagcaaacgccgacacucugugcauuggcuaucacgcgaauaacagcacggauaccguugacacaguguuggagaaaaauguaacugugacccauuccgucaacuuacuggaagauaagcacaaugggaaacuauguaagcucagaggaguggcuccccugcaucuugguaaaugcaacauagccggcuggauccuggggaauccugagugugaaucuuugucaacagcaaguagcugguccuacauuguugagaccucuucgucagacaacggaacuugcuauccaggcgauuuuaucaauuacgaagaacucagggagcagcugagcaguguguccucuuucgaacgguuugagauuuucccgaagacaagcuccuggcccaaccacgacucaaauaagggugucaccgccgcuuguccucaugcaggggccaaaaguuuuuauaagaaccugaucuggcucgugaaaaagggaaauagcuacccaaaauuaucugaauccuauauaaacgauaagggcaaggagguacugguucuuuggggcauccaccaccccucaacgacugcugaccaacagagcuuguaccagaaugccgaugcguacguguucgucgggaccagucgcuauucuaaaaaguuuaaaccugagauugcaauccgaccaaaggugcgugaccaggaaggaagaaugaacuacuauuggacacugguggagcccggugauaaaauuacuuucgaagccaccggcaaccuagucguuccuagguacgcuuuugccauggagcggacagcaggguccggaaucauaauuagcgacaccccagugcaugauugcaauacgacuugucaaacaccgaagggcgcuaucaacaccucgcuccccuuccagaauauucacccuaucacuaucgguaaaugcccaaaguauguaaagucuacaaaacugcgccuugccaccgggcugagaaacgugcccuccauucagucaaggggauuguuuggcgcgauagccggcuucaucgaagggggauggacggguauggucgacggcugguacggguaucaucaccagaaugagcaaggaaguggcuacgcagcugaccucaagagcacccagaacgccauugauaaaaucacaaauaaggugaacuccguuauagagaaaaugaauacucaguuuaccgcuguggguaaggaguucaaccaccuggagaagcggauugaaaauuuaaacaaaaaggucgacgauggguuccuggacaucuggacauacaaugccgagcuccuugugcuguuggaaaacgagcgcacucuagauuaucaugacucuaauguaaagaaccuguacgagaagguucgaaaccagcucaaaaauaacgcaaaggaaaucggcaauggauguuuugaguucuaucacaagugcgauaacaccuguauggaaagcgugaaaaauggcacauacgacuauccuaaguacucagaggaagccaaacugaacagagaggagauugauggggucaaacuugaaaguaccaggaucuaucaaauucuggcuauauacuccacuguggcgagcucuuugguccucgugguuucacugggagcaaucaguuuuuggaugugcagcaaugguuccuuacagugccggauuuguaucuga

SEQ ID NO: 137812 - RNA, 1701 nt, Artificial Sequence
  derived and/or modified CDS sequence (opt3) from hemagglutinin__InfluenzaA__AGB08298
augaaggccauccuggugguccuccuuuacaccuucgcuacagcaaacgccgacacucugugcauuggcuaucacgcgaauaacagcacggauaccguugacacaguguuggagaagaauguaacugugacccauuccgucaacuuacuggaagauaagcacaaugggaaacuauguaagcucagaggaauagcuccccugcaucuugguaaaugcaacaucgccggcuggauucuggggaauccugagugugaaucuuugucaacagcaaguagcugguccuacaucguggagaccucuucgucagacaacggaacuugcuauccaggcgauuuuauuaauuacgaggagcucagggagcagcugagcaguguuuccucuuucgaacgguuugagaucuucccgaagacaagcuccuggcccaaccacgacucaaauaagggugugaccgccgcuuguccucaugcaggggccaaaaguuuuuauaagaaccugauauggcucgucaaaaagggaaauagcuacccacgcuuaucuaaauccuauaucaacgauaagggcaaggaagugcugguacuuuggggcauucaccaccccucaacgacugcugaccaacagagcuuguaccagaaugccgaugcguacguuuucguggggaccagucgauauucuaaaaaguuuaaaccugagaucgcaauucguccaaaggucagagaccaggagggaaggaugaacuacuauuggacacugguggaacccggugauaaaaucacuuucgaggccaccggcaaccuaguggucccucgguacgcuuuugccauggaacgcacagcaggguccggaauaauuaucagcgacaccccaguucaugauugcaauacgacuugucaaacaccgaagggcgcuauuaacaccucgcuccccuuccagaauauccacccuaucacuauugguaaaugcccaaaguaugugaagucuacaaaacugagacuugccaccgggcugaggaacguacccuccauacagucacggggauuguuuggcgcgaucgccggcuucauugaagggggauggacggguaugguggacggcugguacggguaucaucaccagaaugaacaaggaaguggcuacgcagcugaccucaagagcacccagaacgccaucgauaaaauaacaaauaaggucaacuccgugauugagaaaaugaauacucaguuuaccgcuguugguaaggaguucaaccagcuggaaaagcgcaucgagaauuuaaacaaaaagguggacgauggguuccuggacaucuggacauacaaugccgaacuccuuguccuguuggagaacgaacgaacucuagauuaucacgacucuaaugugaaaaaccuguacgagaagguaagaaaccaacucaaaaauaacgcaaaggagauuggcaauggauguuuugaguucuaucauaagugcgauaacaccuguauggaaagcguuaaaaauggcacauacgacuauccuaaguacucagaagaggccaaacugaacagggaagagaucgauggggugaaacuugagaguacccggauuuaucagauacuggcuaucuacuccacugucgcgagcucuuuggugcucgucgugucacugggagcaauuaguuuuuggaugugcagcaaugguuccuuacagugccguaucuguaucuga

SEQ ID NO: 137813 - RNA, 1701 nt, Artificial Sequence
  derived and/or modified CDS sequence (opt3) from hemagglutinin__InfluenzaA__AGB08301
augaagaccaucauugcccugagcuacauacucugccuuguguucgcucaggagcugcccggcaacgacgauuccacagcaacuuuguguuuagggcaccaugccgucccuaauggaacgaucguuaaaaccauuacaaacgaccaaaucgaagugacuaaugcgaccgagcugguacagucuucaaguacaggugaaauuugcaacagcccacaccagauccuagauggcgagaauuguacccucauagacgcucugcuuggggauccgcagugcgacggauuucaaaacaagaaaugggaucuguucguggaaagauccaaggcccauucuaauuguuaucccuacgacgucccugauuaugcaucguugaggucacucguggccagcaguggcacucuggaguuuaacaaugaguccuucaacuggacagguguuacccagaaugggacgucuagcgcuugcauccggcgcuccaacaauucauuuuucagucgacugaacuggcucacucacuuaaauuuuaaauacccagcacugaacgugaccaugcccaacaaugaacaguucgacaaacuuuauauuuggggaguccaucacccuggcacagauaaggaccagaucuuuuuguacgcccaagcuagcggccguauuacugugucuaccaagagaucccagcaggccguaaucccaaacauagggucaaggccccggguucgcaauauuccuagcagagugaguaucuauuggacagucgugaagccaggagauauucugcuaaucaacucuaccgguaaucucaucgcgccgaggggcuacuucaaaauucgguccggaaagagcucgauaaugcgcucugacgcacccaucgggaaauguaacuccgccugcauuacgccuaauggcucaaucccaaacgacaagcccuuucagaaugugaaccgaauaacuuacggugcuuguccuagauaugucaagcaaaauacacugaaacuugccaccgggaugaggaacguuccagagaagcagacucggggaauuuucggcgcaaucgcuggcuuuaucgaaaaugggugggagggaaugguggaugguugguacggcuuccgucaccagaacagugaggggcgcggacaagccgcggaccugaaaagcacacaggccgcaauugaucagaucaauggcaaguugaacagacucauugguaaaaccaacgaaaaguuccaucagauagagaaagaauuuuccgagguagaagggaggauccaagaccuggagaaguauguggaggauacgaagauugacuuauggucuuacaaugcugaacugcucgucgcccuugagaaccagcacaccaucgaucugacagacagcgaaaugaauaaauuguucgagaagacuaaaaagcagcuacgggaaaacgcugaggauaugggcaauggaugcuuuaaaaucuaucauaagugugacaacgccugcauuggcucaauacgaaaugggaccuacgaucacaacguguaucgcgacgaggcacugaauaacagauuccagaucaagggaguugaacucaaaagugguuacaaggacuggauucuguggaucuccuuugccauuagcugcuuccuucuguguguggcuuugcucggcuuuaucaugugggcgugccaaaaagggaauauaagguguaacaucugcauuuga

SEQ ID NO: 137814 - RNA, 1701 nt, Artificial Sequence
  derived and/or modified CDS sequence (opt3) from hemagglutinin__InfluenzaA__AGB08343
augaagaccaucauugcccugagcuacauauucugccucgugcuugcucaggaccugcccggcaacgauaauuccacagcaacuuuguguuuagggcaccaugccgucccuaacggaacgcugguuaaaaccaucacaaaugaccaaauugaggugacuaacgcgaccgaacuuguacagucuucaaguacagguagaaucugcaauaacccacacaggauucucgauggcaucaauuguacccugauagacgcccuucugggggauccgcauugcgacggauuucagaacaagaaaugggauuuguucguggagcggagcaaggcuuuuuccaauuguuaucccuacgacgucccugauuaugcaucucuccgcucgcugguggccucaagcggcacucuggaguucaucaacgaagguuuuaauuggacagggguuacccagaacggaggcaguuacgcuugcaaacgaggcccagacaauggguucuuuucccgucucaacugguuauauaagucugaaagcacguaccccgugcugaaugucacuaugccuaacaacgauaauuucgacaagcuauauauuuggggagugcaccauccauccaccgauaaagagcaaacaaacuuguacguacaggcaucagguagaguuacugugaguaccaagaggagccagcagacaaucauucccaaugucggcucucggccuugggugcgcgggcuguccucaagaaucagcauauacuggaccauugugaaaccaggagacauccuagucauuaacaguaauggcaaccucaucgccccgagggguuauuuuaagauccggaaugggaaaucuuccauuaugcgcagcgacgcucccauaggaacguguucgucugagugcaucacuccuaacggcuccauuccaaaugauaagcccuuccaaaacguuaauaagaucacauacggcgccuguccuaaauaugugaagcagaacacccugaaacuugcgacugggaugcgaaauguaccagaaaagcagacaagaggaauauuuggugcaauugccggcuucaucgagaacgggugggaaggaaugaucgacggcugguacgguuuuaggcaccaaaauucagaggggaccggccaggcugccgaucugaaaaguacgcaggcagcuauugaccagaucaacggaaaguugaaccgggugauugagaaaaccaaugaaaaguuccaccaaauagagaaggaguucagcgaagucgaaggccguauccaggaucucgagaaauauguggaggacacaaagauugaucugugguccuacaacgccgaauuacugguugcgcucgagaaucagcauacuaucgaccuuaccgauucugaaaugaacaaacuguuugagaagacacgcagacaguugagggaaaaugccgaggacauggggaacggaugcuucaaaaucuaucacaagugugauaaugcaugcauugguagcauacggaacggcacuuacgaccaugacguguaccgagaugaggcucuaaauaaccgcuuucaaaucaagggggucgaacugaaaucaggauauaaggacuggauucucuggaucaguuucgccauuuccugcuuucugcuuugugugguacuguugggcuucaucaugugggcuugccagaaagguaauauaagauguaacaucugcauuuga

SEQ ID NO: 137815 - RNA, 1701 nt, Artificial Sequence
  derived and/or modified CDS sequence (opt3) from hemagglutinin__InfluenzaA__AGB08362
augaagaccaucauugcccugagcuacauauucugccucgcucuuggccaggaccugcccgggaacgauaauuccacagcaacuuuguguuuaggacaccaugccgugccuaacgguacgcuggucaaaaccaucacagacgaucaaauugagguuacuaaugcgaccgaacuugugcagucuucaaguacaggcaagaucugcaacaauccacacaggauucucgacgggaucaacuguacccugauagaugcucuacugggagacccgcauugcgauguauuucaggacgagacuugggauuuguucguggaaagaagcaaagccuuuuccaauuguuaucccuacgacgucccugauuaugcaucucuccggucgcugguggccucaagcggcacacuggaguucaucaccgaagguuuuacguggacugggguuacccagaacggaggcaguaaugcuugcaagcgcggcccaggguccggauucuuuucucgacucaacugguuaacaaaaagcgguuccacuuaccccgugcugaaugucaccaugccuaacaaugacaacuucgauaaguuguauauuuggggcgugcaccauccaucaacaaaucaagagcagaccaguuuguacguacaggcaagcgggcguguuacggugucuacuagaaggucccagcaaacaaucauucccaacaucggaucacggccuuggguccgcggccugagcaguagaauaucuauuuauuggaccaucgugaagccaggugacgugcuagucauuaacuccaaugggaaccucaucgccccgaggggauacuuuaaaaugcggacuggcaagagcucgaucaugcgcucugacgcucccauugauacauguauauccgagugcaucaccccuaauggcucaauuccaaacgacaaacccuuccagaauguuaacaagaucacguacggggccuguccuaaauaugugaagcagaauacccugaaacuugcgacaggaaugcgaaacguaccagaaaagcagacuagaggucuguuuggcgcaauagccggguucauugagaauggaugggaaggcaugaucgaugguugguacggguuuaggcaccaaaacagugagggcaccggacaggcugccgaccuuaagagcacacaggcagcuaucgaucaaauuaauggcaaacucaaccgggugaucgagaagacuaaugaaaaauuccaccagauugagaaggaguucuccgaagucgaagggcguauacaggaccuggagaaauauguggaggauaccaagaucgacuuauggucuuacaacgccgaacugcucguugcgcuugagaaucagcauacaauugaucugaccgacagcgaaaugaacaaguuguuugauaaaacucgcagacaacuaagggagaacgccgaagacaugggaaaugguugcuucaagaucuaucacaaaugugacaacgcaugcaucgagucaauucggaauggcacguacgaucaugacguguaucgagaugaggcucugaacaaucgcuuucagauaaagggggucgaacucaaaaguggauacaaggacuggauccuguggauuuccuucgccaucagcugcuuucuucugugugugguauugcucggcuucauuaugugggcuugccagagagguaacaucagguguaauauaugcaucuga

SEQ ID NO: 137816 - RNA, 1701 nt, Artificial Sequence; identical to SEQ ID NO: 134870
  derived and/or modified CDS sequence (opt3) from hemagglutinin__InfluenzaA__AGB12986

SEQ ID NO: 137817 - RNA, 1701 nt, Artificial Sequence; identical to SEQ ID NO: 135134
  derived and/or modified CDS sequence (opt3) from hemagglutinin__InfluenzaA__AGB13006

SEQ ID NO: 137818 - RNA, 1701 nt, Artificial Sequence
  derived and/or modified CDS sequence (opt3) from hemagglutinin__InfluenzaA__AGB13016
augaaggccauccuggugguccuccuuuacaccauugcuacagcaaacgccgacacucugugcauaggcuaucacgcgaauaacagcacggauaccguugacacaguguuggagaaaaauguaacugugacccauuccgucaacuuacuggaagauaagcacaaugggaaacuauguaagcucagaggaguggcuccccugcaucuugguaaaugcaacaucgccggcuggauucuggggaauccugagugugaaucuuugucaacagcaaguagcugguccuacaucguugagaccucuucgucagacaacggaacuugcuauccaggcgauuucauuaauuacgaggagcucagggagcagcugagcaguguguccucuuuugaacgguucgagaucuuuccgaagacaagcuccuggcccaaccacgacucaaauaagggugucaccgccgcuuguccucaugcaggggccaaaaguuucuauaagaaccugauauggcucgugaaaaagggaaauagcuacccaaaauuaucuaaguccuauaucaacgauaagggcaaagaaguacugguucuuuggggcauucaccaccccucaacgacugcugaccaacagagcuuguaccagaaugccgaugcguacguguuugucgggaccagucgcuauucuaagaaauucaagccugagaucgcaauucgaccaaaagugcgugaccaggagggaagaaugaacuacuauuggacacugguggaacccggugauaagaucacuuuugaggccauaggcaaccuagucguuccuagguacgcuuucgccauggaaaagaaugcaggguccggaauuaucauuagcgacaccccagugcaugauugcaacacaaccugucaaacgccgaagggcgcuaucaauacuucgcuccccuuucagaacauccacccuauuacaauagguaagugcccaaaauauguaaagucuaccaaacugcggcuugccacugggcugcgcaaugugcccuccauccagucaagaggauuguucggcgcgauugccggcuuuaucgaagggggauggacagguauggucgacggcugguacggguaucaucaccagaacgaacaaggaaguggcuacgcagcugaccucaagagcacccagaaugccauagauaaaauuacgaacaagguaaauuccguuaucgagaagaugaacacccaguucacagcuguggguaaagaguuuaaucaccuggaaaagaggaucgagaacuuaaauaaaaaggucgacgauggguuccuggacauuuggacuuacaacgccgaacuccuugugcuguuggagaaugaacggacccuagauuaucaugacucuaacgugaaaaaccuguacgagaagguucgcaaucagcucaagaacaaugcaaaagagaucggcaacggauguuucgaauuuuaucacaagugcgauaauacauguauggagagcgugaaaaacggcacuuacgacuauccuaaguacucagaagaggccaaacugaaucgagaagagauugauggggucaaacuugagagugcuagaguguaucaaauacuggcgaucuacuccaccgucgcaagcucuuuggugcucguugugucacugggagccauuaguuucuggaugugcagcaacgguuccuuacagugcaggaucuguaucuga

SEQ ID NO: 137819 - RNA, 1701 nt, Artificial Sequence; identical to SEQ ID NO: 134915
  derived and/or modified CDS sequence (opt3) from hemagglutinin__InfluenzaA__AGB13026

SEQ ID NO: 137820 - RNA, 1701 nt, Artificial Sequence; identical to SEQ ID NO: 134857
  derived and/or modified CDS sequence (opt3) from hemagglutinin__InfluenzaA__AGB13036

SEQ ID NO: 137821 - RNA, 1701 nt, Artificial Sequence
  derived and/or modified CDS sequence (opt3) from hemagglutinin__InfluenzaA__AGB13048
augaaggccauccuggugguccuccuuuacaccuucgcuacagcaaacgccgacacucugugcauuggcuaucacgcgaauaacagcacggauaccguugacacaguguuggagaaaaauguaacugugacccauuccgucaacuuacuggaagauaagcacaaugggaaacuauguaagcucagaggaguggcuccccugcaucuugguaaaugcaacauagccggcuggauccuggggaauccugagugugaaucuuugucaacagcaaguagcugguccuacauuguugagaccucuucgucagacaacggaacuugcuauccaggcgauuuuaucaauuacgaggagcucagggagcagcugagcaguguguccucuuucgaacgguuugagauuuucccgaagacaagcuccuggcccaaccacgacucaaauaagggugucaccgccgcuuguccucaugcaggggccaaaaguuuuuauaagaaccugaucuggcucgugaaaaagggaaauagcuacccaaaauuaucuaaguccuauauaaacgauaagggcaaagaaguacugguucuuuggggcauccaccaccccucaacgacugcugaccaacagagcuuguaccagaaugccgaugcguacguguucgucgggaccagucgcuauucuaagaaauuuaagccugagauugcaauccgaccaaaagugcgugaccaggagggaagaaugaacuacuauuggacacugguggaacccggugauaagauuacuuucgaggccaccggcaaccuagucguuccuagguacgcuuuugccauggaacggaaugcaggguccggaaucauaauuagcgacacaccagugcaugauugcaacaccacgugucaaacuccgaaaggcgcuaucaauacaucgcuccccuuccagaacauucacccuaucaccaucgguaagugcccaaaguauguaaaaucuacuaagcugcgccuugccacagggcugagaaaugugcccuccauucagucaaggggauuguuuggcgcgauagccggcuucaucgaagggggauggaccgguauggucgacggcugguacggguaucaucaccagaacgaacaaggaaguggcuacgcagcugaccucaaaagcacgcagaaugccauugauaagaucaccaacaaaguuaauuccgugauagagaagaugaacacacaguuuacugcuguggguaaggaguucaaucaccuggaaaaacggauugagaacuuaaauaagaaagucgacgauggguuccuggacaucuggaccuacaacgccgaacuccuugugcuguuggagaaugaacgcacacuagauuaucaugacucuaacguaaagaaccuguacgagaaaguucgaaaucagcucaagaacaaugcaaaggagaucggcaacggauguuuugaguucuaucacaaaugcgauaauacuuguauugaaagcgugaagaacggcaccuacgacuauccuaaauacucagaagaggccaagcugaauagagaagagaucgauggggucaaacuugagaguacaaggauuuaucaaauacuggcuaucuacuccaccguggcgagcucuuugguccucgugguuucacugggagcaauuaguuuuuggaugugcagcaacgguuccuuacagugccggaucuguaucuga

SEQ ID NO: 137822 - RNA, 1701 nt, Artificial Sequence
  derived and/or modified CDS sequence (opt3) from hemagglutinin__InfluenzaA__AGB13066
augaaggccauccuggugguccuccuuuacaccuucgcuacagcaaacgccgacacucugugcauuggcuaucacgcgaauaacagcacggauaccguugacacaguguuggagaagaauguaacugugacccauuccgucaacuuacuggaagauaagcacaaugggaaacuauguaagcucagaggaguggcuccccugcaucuugguaaaugcaacauagccggcuggauccuggggaauccugagugugaaucuuugucaacagcaaguagcugguccuacauuguugagaccucuucgucagacaacggaacuugcuauccaggcgauuuuaucgacuacgaagaacucagggagcagcugagcaguguguccucuuucgaacgguuugagauuuucccgaagacaagcuccuggcccaaucacgauucaaacaagggugucaccgccgcuuguccucaugcaggggccaaaaguuuuuauaagaaucugaucuggcucgugaaaaagggaaacagcuacccaaaauuaucuaaguccuauauaaaugacaagggcaaagaaguacugguucuuuggggcauccaccaccccucaacgagcgcugaucaacagaguuuguaccagaacgccgacgcguacguguucgucgggacuucucgcuauuccaagaaauuuaagccugagauugcaauccgaccaaaagugcgugaucaggagggaagaaugaauuacuauuggacccugguggaacccggugacaagauuacauucgaggccacuggcaaccuagucguuccuagguacgcuuuugccauggaacggaacgcagggagcggaaucauaauuucggauaccccagugcaugacugcaauacaaccugucaaacgccgaaaggcgcuaucaacacuucucuccccuuccagaauauucacccuaucacaaucgguaagugcccaaaguauguaaaagggaccaagcugcgccuugccacuggacugagaaacgugcccuccauucagucaaggggcuuguuuggcgcgauagccggguucaucgagggagguuggacaggcauggucgacgggugguacggauaucaucaccagaaugaacaaggcagugguuacgcagcugaucucaaaagcacccagcacgccauugacgagaucacgaacaagguaaauuccguuauagagaaaaugaacacccaguuuacagcuguggggaaggaguucaaucaucuggagaagcggauugaaaacuuaaauaaaaaggucgaugacggcuuccuggauaucuggacuuacaacgccgagcuccuugugcuguuggaaaaugagcgcacccuagacuaucacgauucuaacgugaaaaaucuguacgagaagguucgaagccagcucaaaaacaacgcaaaggaaaucggaaauggcuguuuugaguucuaucauaagugcgacaacacauguauggaaucagugaaaaaugggacuuacgauuauccuaaguacagugaggaagccaaacugaacagagaggagauugacggagucaaacuugaauccaccaggaucuaucaaauucuggcuauauacagcacaguggcgucuucauugguccucgugguuagucugggugcaaucagcuuuuggaugugcuccaauggcucuuuacagugccggauuuguaucuga

SEQ ID NO: 137823 - RNA, 1701 nt, Artificial Sequence; identical to SEQ ID NO: 134957
  derived and/or modified CDS sequence (opt3) from hemagglutinin__InfluenzaA__AGB13082

SEQ ID NO: 137824 - RNA, 1701 nt, Artificial Sequence; identical to SEQ ID NO: 134857
  derived and/or modified CDS sequence (opt3) from hemagglutinin__InfluenzaA__AGB13105

SEQ ID NO: 137825 - RNA, 1701 nt, Artificial Sequence; identical to SEQ ID NO: 134915
  derived and/or modified CDS sequence (opt3) from hemagglutinin__InfluenzaA__AGB13125

SEQ ID NO: 137826 - RNA, 1701 nt, Artificial Sequence; identical to SEQ ID NO: 134915
  derived and/or modified CDS sequence (opt3) from hemagglutinin__InfluenzaA__AGB13130

SEQ ID NO: 137827 - RNA, 1701 nt, Artificial Sequence
  derived and/or modified CDS sequence (opt3) from hemagglutinin__InfluenzaA__AGB13140
augaaggccauccuggugguccuccuuuacaccuucgcuacagcaaacgccgacacucugugcauuggcuaucacgcgaauaacagcacggauaccguugacacaguguuggagaaaaauguaacugugacccauuccgucaacuuacuggaagauaagcacaaugggaaacuauguaagcucagaggaguggcuccccugcaucuugguaaaugcaacauagccggcuggauccuggggaauccugagugugaaucuuugucaacagcaagucucuggagcuacauuguugagaccuccucuucggacaacggaacuugcuauccaggcgauuuuaucgacuacgaggagcugagggagcagcugucaagcgugaguuccuucgaacgguuugagauuuucccgaagacaucuagcuggcccaaucacgauuccaacaagggugucaccgccgcuuguccucaugcaggggccaaaucauuuuauaagaaucucaucugguuagugaaaaagggaaacaguuacccaaaacugagcaagucuuauauaaaugacaagggcaaagaaguacuuguuuuguggggcauccaccaccccuccacgacugcugaucaacagucacuguaccagaacgccgacaccuacguguucgucgggacaagccgcuauaguaagaaauuuaagccugagauugcgauccgaccaaaagugcgugaucaggagggaagaaugaauuacuauuggacucuaguggaacccggugacaagauuaccuucgaggcaacaggcaaccucgucguuccuagguacgccuuugcuauggaacggaacgccgggucuggaaucauaauuuccgauaccccagugcaugacugcaauacgacuugucaaacaccgaaaggcgcaaucaacaccagccugcccuuccagaauauucacccuaucacuaucgguaagugcccaaaguauguaaaaucgacaaaacuucgccuggcuaccggguugagaaacgugcccucuauucaguccaggggacucuuuggcgccauagcgggcuucaucgaagggggauggacggguauggucgacggcugguacggguaucaucaccagaaugaacaaggaucaggcuacgccgcagaucugaagaguacccagaacgcuauugacaagaucacaaauaaagugaacagcguuauagagaagaugaauacucaguuuaccgccguggguaaggaguucaaccacuuagaaaaacggauugagaaucugaacaagaaagucgaugacggguuccucgauaucuggacauacaaugcugaacuucugguguugcuagagaacgaacgcacucuggacuaucaugauuccaauguaaagaaccucuacgagaaaguucgaaaccagcugaagaauaacgccaaggagaucggcaauggauguuuugaguucuaucacaaaugcgacaacaccuguauggaaucugugaagaauggcacauacgauuauccuaaauacagcgaagaggcaaaacuuaacagagaagagauugacggggucaagcuggagucaaccaggaucuaucaaauuuuggccauauacaguacuguggcuuccagccucguccuggugguuucuuuaggagcgaucucauuuuggaugugcaguaaugguagccugcagugccggauuuguaucuga

SEQ ID NO: 137828 - RNA, 1701 nt, Artificial Sequence
  derived and/or modified CDS sequence (opt3) from hemagglutinin__InfluenzaA__AGB13159
augaaggccauccugguggucaugcucuacaccuucgcuacagcaaacgccgacacucuuugcauuggcuaucacgcgaauaacagcacggauaccguugacacagugcuggagaaaaauguaacugugacccauuccgucaacuuguuagaagauaagcacaaugggaaacuguguaagcuaagaggaguggcuucucuccaucuggguaaaugcaacauagccggcuggauccuugggaaucccgagugugaaucacugaguacagcaagcuccuggucuuacauuguugagaccucgucaagcgacaacggaacuugcuauccuggcgauuuuaucgacuacgaagaguugagggagcagcucaguuccgugucuagcuucgaacgguuugagauuuucccaaagacauccucauggccgaaucacgauaguaacaagggugucaccgccgcuuguccccaugcaggggccaaaggauuuuauaagaaucugaucuggcuggugaaaaagggcaacagcuacccuaaacucucuaaguccuauauaaaugacaagggcaaagaaguauuaguucugugggggauccaccacccaucaacgacugcugaucaacagagccuuuaccagaacgccgacaccuacguguucgucggaacaagucgcuauucuaagaaauuuaagcccgagauugcgauccgaccuaaagugcgugaucaggaggguagaaugaauuacuauuggacuuugguggaaccaggcgacaagauuaccuucgaggcaacagggaaccuggucguucccagguacgccuuugcuauggaacggaacgccggauccggcaucauaauuagcgauaccccugugcaugacugcaauacgacuugucaaacaccaaaaggugcaaucaacaccucgcuaccguuccagaauauucaccccaucacuaucgggaagugcccuaaguauguaaaaucuacaaagcuccgccuggcuaccggacuuagaaacgugccauccauucagucaaggggccuguuuggcgccauagcgggguucaucgagggagguuggacgggcauggucgacgggugguacggauaucaucaccagaaugaacaaggcagugguuacgccgcagauuugaaaagcacccagaacgcuauugacaagaucacaaauaaagugaacuccguuauagagaagaugaauacucaguuuaccgccguggggaaggaguucaaccaccucgaaaaacggauugagaaucugaacaagaaagucgaugacggcuucuuagauaucuggacauacaaugcugaacugcucgugcuucuggagaacgaacgcacuuuggacuaucaugauucuaauguaaagaaccuauacgagaaaguucgaaaccagcugaagaauaacgccaaggagaucggaaauggcuguuuugaguucuaucacaaaugcgacaacaccuguauggaaagcgugaagaaugggacauacgauuaucccaaauacucagaagaggcaaagcucaacagagaagagauugacggagucaaacuggagaguaccaggaucuaucaaauucuugccauauacuccacuguggcuagcucucuggucuuggugguuucacucggugcgaucaguuuuuggaugugcagcaauggcucccugcagugccggauuuguaucuga

SEQ ID NO: 137829 - RNA, 1701 nt, Artificial Sequence; identical to SEQ ID NO: 134872
  derived and/or modified CDS sequence (opt3) from hemagglutinin__InfluenzaA__AGB13170

SEQ ID NO: 137830 - RNA, 1701 nt, Artificial Sequence
  derived and/or modified CDS sequence (opt3) from hemagglutinin__InfluenzaA__AGB13180
augaaggccauccuggugguccuccuuuacaccuucgcuacagcaaacgccgacacucugugcauuggcuaucacgcgaauaacagcacggauaccguugacacaguguuggagaaaaauguaacugugacccauuccgucaacuuacuggaagauaagcacaaugggaaacuauguaagcucagaggaguggcuccccugcaucuugguaaaugcaacauagccggcuggauccuggggaauccugagugugaaucuuugucaacagcaaguagcugguccuacauuguugagaccucuucgucagacaacggaacuugcuauccaggcgauuuuaucaauuacgaggagcucagggagcagcugagcaguguguccucuuucgaacgguuugagauuuucccgaagacaagcuccuggcccaaccacgacucaaauaagggugucaccgccgcuuguccucaugcaggggccaaaaguuuuuauaagaaccugaucuggcucgugaaaaagggaaauagcuacccaaaauuaucuaaguccuauauaaacgauaagggcaaagaaguacugguucuuuggggcauccaccaccccucaacgacugcugaccaacagagcuuguaccagaaugccgaugcguacguguucgucgggaccagucgcuauucuaagaaauuuaagccugagauugcaauccgaccaaaagugcgugaccaggagggaagaaugaacuacuauuggacacugguggaacccggugauaagauuacuuucgaggccaccggcaaccuagucguuccuagguacgcuuuugccauggaacggaaugcaggguccggaaucauaauuagcgacacaucggugcaugauugcaacaccacgugucaaacuccaaaaggcgcuaucaauacaucucucccguuccagaacauucaccccaucaccaucgguaagugcccuaaguauguaaaauccacuaagcugcgccuugccacagggcugagaaaugugccaucaauucagaguaggggauuguuuggcgcgauagccggcuucaucgaagggggauggaccgguauggucgacggcugguacggguaucaucaccagaacgaacaaggaagcggcuacgcagcugaccucaaauccacgcagaaugccauugauaagaucaccaacaaaguuaauucugugauagagaagaugaacacacaguuuacugcuguggguaaggaguucaaucaccuggaaaaacggauugagaacuuaaauaagaaagucgacgauggguuccuggacaucuggaccuacaacgccgaacuccuugugcuguuggagaaugaacgcacacuagauuaucaugacagcaacguaaagaaccuguacgagaaaguucgaaaucagcucaagaacaaugcaaaggagaucggcaacggauguuuugaguucuaucacaaaugcgauaauacuuguauggaaucagugaagaacggcaccuacgacuaucccaaauacagugaagaggccaagcugaauagagaagagauugauggggucaaacuugaguccacaaggaucuaucaaauucuggcuauauacagcaccguggcgucuucauugguccucgugguuagucugggagcaaucagcuuuuggaugugcuccaacgguucuuuacagugccggauuuguaucuga

SEQ ID NO: 137831 - RNA, 1701 nt, Artificial Sequence; identical to SEQ ID NO: 134915
  derived and/or modified CDS sequence (opt3) from hemagglutinin__InfluenzaA__AGB13190

SEQ ID NO: 137832 - RNA, 1701 nt, Artificial Sequence
  derived and/or modified CDS sequence (opt3) from hemagglutinin__InfluenzaA__AGB13200
augaaggccauccuggugguccuccuuuacaccuucgcuacagcaaacgccgacacucugugcauuggcuaucacgcgaauaacagcacggauaccguugacacaguguuggagaaaaauguaacugugacccauuccgucaacuuacuggaagauaagcacaaugggaaacuauguaagcucagaggaguggcuccccugcaucuugguaaaugcaacauagccggcuggauccuggggaauccugagugugaaucuuugucaacagcaaguagcugguccuacauuguugagaccucuucgucagacaacggaacuugcuauccaggcgauuuuaucaauuacgaggagcucagggagcagcugagcaguguguccucuuucgaacgguuugagauuuucccgaagacaagcuccuggcccaaccacgacucaaauaagggugucaccgccgcuuguccucaugcaggggugaaaaguuuuuauaagaaccugaucuggcucguaaagaagggaaauagcuacccaaaauuaucuaaguccuauauaaacgauaagggcaaagaaguucuggugcuuuggggcauccaccaccccucaacgacuaccgaccaacagagcuuguaccagaaugccgaugcuuacgucuucguggggacaaguaaguauucuaaaaaguuuaaaccugagauugccauccgcccaaaggugcgagaccaggagggacguaugaacuacuauuggacucuggucgaacccggugauaaaauuaccuucgaggcgacaggcaaccuaguugugccuagauacgcauuugccauggaaaggaaugcuggguccggaaucauaauuagcgacaccccaguacaugauugcaacacgacuugucaaacaccgaagggcgccaucaauaccucgcuccccuuccagaacauucacccuaucacuaucgguaagugcccaaaauaugugaagucuacaaaacugcggcuugcaaccgggcugcgcaauguccccuccauucagucaagaggauuguuuggcgcuauagccggcuucaucgaagggggauggacggguaugguggacggcugguacggguaucaucaccagaacgaacaaggaaguggcuacgcggccgaccucaagagcacccagaaugcaauugauaaaaucacaaacaagguuaauuccgugauagagaagaugaacacucaguuuaccgcugucgguaaagaguucaaucaccuggaaaagaggauugagaacuuaaauaaaaagguggacgauggguuccuggacaucuggacauacaacgccgaacuccuuguacuguuggagaaugaacggacucuagauuaucaugacucuaacguuaaaaaccuguacgagaaggugcgcaaucagcucaagaacaaugcuaaagagaucggcaacggauguuuugaguucuaucacaagugcgauaauaccuguauggaaagcgucaaaaacggcacauacgacuauccuaaguacucagaagaggccaaacugaaucgagaagagauugauggggugaaacuugagaguaccagaaucuaucaaauucuggcaauauacuccacugucgccagcucuuuggugcucguugugucacugggagcuaucaguuuuuggaugugcagcaacgguuccuuacagugcaggauuuguaucuga

SEQ ID NO: 137833 - RNA, 1701 nt, Artificial Sequence
  derived and/or modified CDS sequence (opt3) from hemagglutinin__InfluenzaA__AGB13210
augaaggccacccuggugguccuccuuuacacauucgcuacugcaaacgccgacacgcugugcaucggcuaucacgcgaauaacagcaccgauacaguugacacuguguuggagaaaaauguaaccgugacacauuccgucaacuuacuggaagauaagcacaaugggaaacuauguaagcucagaggaguggcuccccugcaucuugguaaaugcaacauugccggcuggauacuggggaauccugagugugaaucuuugucaaccgcaaguagcugguccuacaucguugagacuucuucgucagacaacggaacaugcuauccaggcgauuuuauuaauuacgaggagcucagggagcagcugagcaguguguccucuuucgaacgguuugagaucuucccgaagaccagcuccuggcccaaccacgacucaaauaagggugucacggccgcuuguccucaugcaggggccaaaaguuuuuauaagaaccugauuuggcucgugaaaaagggaaauagcuacccaaaauuaucuaaguccuauaucaacgauaagggcaaagaaguacugguucuuuggggcauacaccaccccucaacuagcgcugaccaacagaguuuguaccagaaugccgaugcguacguguucgucgggaccucuaaguauuccaaaaaguuuaaaccugagaucgcagugcgcccaaaggugcgagaccaggagggacguaugaacuacuauuggacacuggucgaacccggugauaaaauuacuuucgaggccaccggcaaccuacucguuccuagauacgcuuuugccauggaaaggaaugcagggagcggaaucauuaucucggacacaccagugcaugauugcaacaccacgugucaaacuccgaagggcgcuauaaauacaucucugcccuuccagaacauucacccuaucaccauugguaagugcccaaaauauguaaaguccacuaaacuucggcuggccacaggguugcgcaaugugcccucaauccagaguagaggacucuuuggcgcgaucgccggcuucauugaagggggauggaccgguauggucgacggcugguacggguaucaucaccagaacgaacaaggaagcggcuacgcagcugaccugaaguccacgcagaaugccauagauaaaaucaccaacaagguaaauucuguuauugagaagaugaacacacaguuuacugcuguggguaaagaguucaaucacuuagaaaagaggaucgagaaccugaauaaaaaggucgacgauggguuccucgacauauggaccuacaacgccgaacuucugguguugcuagagaaugaacggacacuggauuaucaugacagcaacgugaaaaaccucuacgagaagguucgcucacagcugaagaauaacgcaaaagagauuggcaauggauguuuugaguucuaucacaagugcgauaacacuuguauggaaagugugaaaaauggcaccuacgacuauccuaaguacuccgaagaggccaaacuuaaccgagaagagaucgauggggucaagcuggagagcacaagaaucuaucaaauuuuggcuaucuacucuaccguggcgucaagucucguccuggugguuagcuuaggagcaauuuccuuuuggaugugcucuaaugguucgcugcagugcaggauauguaucuga

SEQ ID NO: 137834 - RNA, 1701 nt, Artificial Sequence
  derived and/or modified CDS sequence (opt3) from hemagglutinin__InfluenzaA__AGB13220
augaaggccauccuggugguccuccuuuacaccuucgcuacagcaaacgccgacacucugugcauuggcuaucacgcgaauaacagcacggauaccguugacacaguguuggagaaaaauguaacugugacccauuccgucaacuuacuggaagauaagcacaaugggaaacuauguaagcucagaggaguggcuccccugcaucuugguaaaugcaacauagccggcuggauccuggggaauccugagugugaaucuuugucaacagcaaguagcugguccuacauuguugagaccucuaucucggacaacggaacuugcuauccaggcgauuuuauuaauuacgaggagcucagggagcagcugucaagcgugaguuccuucgaacgguuugagaucuucccgaagacaucuagcuggcccaaccacgacuccaauaagggugucaccgccgcuuguccucaugcaggggccaaaucauuuuauaagaaccugauauggcucgugaaaaagggaaauaguuacccaaaauuaagcaagucuuauaucaacgauaagggcaaagaaguacugguucuuuggggcauucaccaccccuccacgacugcugaccaacagucauuguaccagaaugccgaugcguacguguucgucgggaccagcaaguauaguaaaaaguuuaaaccugagaucgcaauucgcccaaaggugcgagaccaggagggacguaugaacuacuauuggacacugguggaacccggugauaaaaucacuuucgaggccaccggcaaccuagucguuccuagauacgcuuuugccauggaaaggaaugcagggucuggaauaauuaucuccgacacaccagugcaugauugcaacaccacgugucaaacuccgaagggcgcuauuaauacaagccuccccuuccagaacauccacccuaucaccauugguaagugcccaaaauauguaaagucgacuaaacugcggcuugccacagggcugcgcaaugugcccucuauacaguccagaggauuguuuggcgcgaucgccggcuucauugaagggggauggaccgguauggucgacggcugguacggguaucaucaccagaacgaacaaggaucaggcuacgcagcugaccucaagaguacgcagaaugccaucgauaaaauaaccaacaaggugaauagcguuauugagaagaugaacacacaguuuacugcuguggguaaagaguucaaucaccuggaaaagaggaucgagaacuuaaauaaaaaggucgacgauggguuccuggacaucuggaccuacaacgccgaacuccuugugcuguuggagaaugaacggacacuagauuaucaugacuccaacguaaagaaccuguacgagaagguucgcaaucagcucaagaacaaugcaaaagagauuggcaacggauguuuugaguucuaucacaagugcgauaauacuuguauggaaucugugaaaaacggcaccuacgacuauccuaaguacagcgaagaggccaaacugaaucgagaagagaucgauggggucaaacuugagucaacaagaauuuaucaaauacuggcuaucuacaguaccguggcguccagcuugguccucgugguuucucugggagcaauuucauuuuggaugugcaguaacgguagcuuacagugcaggaucuguaucuga

SEQ ID NO: 137835 - RNA, 1701 nt, Artificial Sequence
  derived and/or modified CDS sequence (opt3) from hemagglutinin__InfluenzaA__AGB13230
augaaggccauccuggugguccuccuuuacaccuucgcuacagcaaacgccgacacucugugcauuggcuaucacgcgaauaacagcacggauaccguugacacaguguuggagaaaaauguaacugugacccauuccgucaacuuacuggaagauaaucacaacgggaagcuauguaaacucagaggaguggcuccccugcaucuugguaagugcaauauagccggcuggauccuggggaacccugagugugaaucuuugucaacagcaaguagcugguccuacauuguugagaccucuucgucagacaauggaacuugcuauccaggcgauuuuaucaacuacgaggagcucagggagcagcugagcaguguguccucuuucgaacgguuugagauuuucccgaaaacaagcuccuggcccaaucacgacucaaacaagggugucaccgccgcuuguccucaugcaggggccaagaguuuuuauaaaaaucugaucuggcucgugaagaaaggaaacagcuacccaaaguuaucuaaauccuauauaaaugauaagggcaaggaaguacugguucuuuggggcauccaccaccccucaacgacugcugaccaacagagcuuguaccagaacgccgaugcguacguguucgucgggaccagucgcuauucuaaaaaguuuaaaccugagauugcaauccgaccaaaggugcgugaccaggagggaagaaugaacuacuauuggacacugguggaacccggugauaaaauuacuuucgaggccaccggcaaucuagucguuccuagguacgcuuuugccauggaacggaacgcaggguccggaaucauaauuagcgacacaccagugcaugauugcaauaccacgugucaaacuccgaagggcgcuaucaacacaucgcuccccuuccagaauauucacccuaucaccaucgguaaaugcccaaaguauguaaagucuacuaaacugcgccuugccacagggcugagaaacgugcccuccauucagucaaggggauuguuuggcgcgauagccggcuucaucgaagggggauggaccgguauggucgacggcugguacggguaucaucaccagaaugaacaaggaaguggcuacgcagcugaccucaagagcacgcagaacgccauugauaaaaucaccaauaaggugaacuccguuauagagaaaaugaauacacaguuuacugcuguggguaaggaguucaaccggcuggaaaagcgcauugagaauuuaaacaaaaaggucgacgauggguuccuggacaucuggaccuacaaugccgaacuccuugugcuguuggagaacgaacgaacacuagauuaucacgacucuaacguaaagaaucuguacgagaagguuagaaaccagcucaaaaauaacgcaaaggagaucggcaauggauguuuugaguucuaucauaagugcgauaacacuuguauggaaagcgugaaaaauggcaccuacgacuauccuaaguacucagaagaggccaaacugaacagggaagagauugauggggucaaacuugagaguacacggaucuaucaaauucuggcuauauacuccaccguggcgagcucuuugguccucgugguuucacugggagcaaucaguuuuuggaugugcagcaaugguuccuuacagugccguauuuguaucuga

SEQ ID NO: 137836 - RNA, 1701 nt, Artificial Sequence; identical to SEQ ID NO: 134915
  derived and/or modified CDS sequence (opt3) from hemagglutinin__InfluenzaA__AGB13240

SEQ ID NO: 137837 - RNA, 1701 nt, Artificial Sequence; identical to SEQ ID NO: 134915
  derived and/or modified CDS sequence (opt3) from hemagglutinin__InfluenzaA__AGB13250

SEQ ID NO: 137838 - RNA, 1701 nt, Artificial Sequence
  derived and/or modified CDS sequence (opt3) from hemagglutinin__InfluenzaA__AGB13260
augaaggccauccuggugguccuccuuuacaccuucgcuacagcaaacgccgacacucugugcauuggcuaucacgcgaauaacagcacggauaccguugacacaguguuggagaaaaauguaacugugacccauuccgucaacuuacuggaagauaagcacaaugggaaacuauguaagcucagaggaguggcuccccugcaucuugguaaaugcaacauagccggcuggauccuggggaauccugagugugaaucuuugucaacagcaaguagcugguccuacauuguugagaccucuucgucagacaacggaacuugcuauccaggcgauuuuaucgacuacgaggagcucagggagcagcugagcaguguguccucuuucgaacgguuugagauuuucccgaagacaagcuccuggcccaaucacgauucaaacaagggugucaccacggccuguccucaugcugggaguaagagcuuuuauaagaaucugaucuggcucgugaaaaagggaaacucuuacccaaaauuauccaagucauauauaaaugacaagggcaaagaaguacugguucuuuggggcauccaccaucccccuacuagcgcagaucaacagaguuuguaccagaacgccgacgcuuacguguucgucgggaccucucgcuauuccaagaaauuuaagccagagauugccauccgacccaaagugcgugaucaggagggaagaaugaauuacuauuggacacugguggaaccuggugacaagauuacuuucgaggcgaccggcaaccuagucguuccaagguacgcauuugccauggaacggaacgcugggagcggaaucauaauuucggauacaccggugcacgacugcaauaccacgugucaaacucccaaaggcgccaucaacacaucucucccuuuccagaauguacacccaauuaccaucgguaagugccccaaguaugugaaauccacuaagcugcgccuugcaacagggcugagaaacgucccuucaauccagaguaggggauuguuuggcgcuauugccggcuucauagaagggggauggaccgguaugguggacggcugguacggguaucaucaccagaaugaacaaggaagcggcuacgcggccgaucucaaauccacgcagaacgcaaucgacgagauuaccaauaagguuaacucugugaucgagaaaaugaauacacaguuuacugcugucgguaaggaguucaaccaccuggaaaagcggauagaaaauuuaaacaaaaagguggaugacggguuccuggauauuuggaccuacaaugccgagcuccuuguacuguuggaaaacgagcgcacacuagacuaucaugauagcaauguuaaaaaccuguacgagaaggugcgaucacagcucaaaaacaaugcuaaggaaaucggcaacggauguuuugaguucuaucacaagugcgacaauacuuguauggaaaguaucaaaaacggcaccuacgauuauccaaaguacuccgaggaagccaaacugaauagagaggagauugacggggucaaacuugaaagcacaaggaucuaucaaauucuggcaauauacucuaccguggccucaaguuugguccucgugguuagccugggagcuaucuccuuuuggaugugcucuaacgguucguuacagugccggauuuguaucuga

SEQ ID NO: 137839 - RNA, 1701 nt, Artificial Sequence
  derived and/or modified CDS sequence (opt3) from hemagglutinin__InfluenzaA__AGB13270
augaaggccauccuggugguccuccuuuacaccuucgcuacagcaaacgccgacacucugugcauuggcuaucacgcgaauaacagcacggauaccguugacacaguguuggagaaaaauguaacugugacccauuccgucaacuuacuggaagauaagcacaaugggaaacuauguaagcucagaggaguggcuccccugcaucuugguaaaugcaacauagccggcuggauccuggggaauccugagugugaaucuuugucaacagcaaguagcugguccuacauuguugagaccucuucgucagacaacggaacuugcuauccaggcgauuuuaucaauuacgaggagcucagggagcagcugagcaguguguccucuuucgaacgguuugagauuuucccgaagacaagcuccuggcccaaccacgacucaaauaagggugucaccgccgcuuguccucaugcaggggccaaaaguuuuuauaagaaccugaucuggcucgugaaaaagggaaauagcuacccaaaauuaucuaaguccuauauaaacgauaagggcaaagaaguacugguucuuuggggcauccaccaccccucaacgagcgcugaccaacagaguuuguaccagaaugccgaugcguacguguucgucgggacuucuaaguauuccaaaaaguuuaaaccugagauugcagugcgcccaaaggugcgagaccaggagggacguaugaacuacuauuggacccuggucgaacccggugauaaaaucacauucgaggccacuggcaaccuacucguuccuagauacgcuuuugccauggaaaggaaugcagggagcggaauuaucauaucggacaccccagugcaugauugcaacacaaccugucaaacgccgaagggcgcuauuaauacuucucugcccuuccagaacauccacccuauuacaaucgguaagugcccaaaauauguaaaguccaccaaacuucggcuggccacuggguugcgcaaugugcccucaauccagaguagaggacucuuuggcgcgauugccggcuucauagaagggggauggacagguauggucgacggcugguacggguaucaucaccagaacgaacaaggaagcggcuacgcagcugaccugaaguccacccagaaugccaucgauaaaauuacgaacaagguaaauucuguuaucgagaagaugaacacccaguuuacagcuguggguaaagaguucaaucacuuagaaaagaggauagagaaccugaauaaaaaggucgacgauggguuccucgacauuuggacuuacaacgccgaacuucugguguugcuagagaaugaacggacccuggauuaucaugacagcaacgugaaaaaccucuacgagaagguucgcucacagcugaagaauaacgcaaaagagaucggcaauggauguuuugaguucuaucacaagugcgauaacacauguauggaaagugugaaaaauggcacuuacgacuauccuaaguacuccgaagaggccaaacuuaaccgagaaaagaucgauggggucaagcuggagagcaccagaauuuaucaaaucuuggcuauuuacucuacaguggcgucaagucucguccuggugguuagcuuaggagcaauauccuuuuggaugugcucuaaugguucgcugcagugcaggaucuguauuuga

SEQ ID NO: 137840 - RNA, 1701 nt, Artificial Sequence
  derived and/or modified CDS sequence (opt3) from hemagglutinin__InfluenzaA__AGB13280
augaaggccauccuggugguccuccuuuacaccuucgcuacagcaaacgccgacacucugugcauuggcuaucacgcgaauaacagcacggauaccguugacacaguguuggagaaaaauguaacugugacccauuccgucaacuuacuggaagauaagcacaaugggaaacuauguaagcucagaggaguggcuccccugcaucuugguaaaugcaacauagccggcuggauccuggggaauccugagugugaaucuuugucaacagcaaguagcugguccuacauuguugagaccucuucgucagacaacggaacuugcuauccaggcgauuuuaucaauuacgaggagcucagggagcagcugagcaguguguccucuuucgaacgguuugagauuuucccgaagacaagcuccuggcccaaccacgacucaaauaagggugucaccgccgcuuguccucaugcaggggccaaaaguuuuuauaagaaccugaucuggcucgugaaaaagggaaauagcuacccaaaauuaucuaaguccuauauaaacgauaagggcaaagaaguacugguucuuuggggcauccaccaccccucaacgaaugcugaccaacagagcuuguaccagaacgccgaugcguacguguucgucgggacuagcaaguauucuaaaaaguuuaaaccugagauugcagugcgcccaaaggugcgagaccaggagggacguaugaacuacuauuggacccuggucgaacccggugauaaaaucacauucgaggccacuggcaaucuacucguuccuagauacgcuuuugccauggaaaggaacgcaggguccggaauuaucauaagcgacaccccagugcaugauugcaauacaaccugucaaacgccgaagggcgcuauuaacacuucgcugcccuuccagaauauccacccuauuacaaucgguaagugcccaaaauauguaaagucuaccaaacuucggcuggccacuggguugcgcaacgugcccuccauccagucaagaggacucuuuggcgcgauugccggcuucauagaagggggauggacagguauggucgacggcugguacggguaucaucaccagaauggacaaggcagugguuacgcagcugaccugaaaagcacccagaacgccaucgauaaaauuacgaauaaggugaacuccguuaucgaaaagaugaauacccaguuuacagcuguggggaaagaguucaaccacuuagagaagaggauagaaaaucugaacaaaaaggucgacgauggcuuccucgacauuuggacuuacaaugccgagcuucugguguugcuagaaaacgagcggacccuggauuaucaugacucuaacguaaagaaucucuacgaaaagguucgcagccagcugaagaacaaugcaaaagagaucggaaacggcuguuuugaguucuaucacaagugcgauaauacauguauggaaucagugaaaaacgggacuuacgacuauccuaaguacagugaggaagccaaacuuaaucgagaggaaaucgauggagucaagcuggaguccaccagaauuuaucaaaucuuggcuauuuacagcacaguggcgucuucacucguccuggugguuaguuuaggugcaauaaguuuuuggaugugcuccaacggcucucugcagugcaggaucuguauuuga

SEQ ID NO: 137841 - RNA, 1701 nt, Artificial Sequence
  derived and/or modified CDS sequence (opt3) from hemagglutinin__InfluenzaA__AGB13290
augaaggccauccuggugguccuccuuuacaccuucgcuacagcaaacgccgacacucugugcauuggcuaucacgcgaauaacagcacggauaccguugacacaguguuggagaaaaauguaacugugacccauuccgucaacuuacuggaagugaagcacaaugggaaacuauguaagcucagaggaguugcuccccugcaucuugguaaaugcaacauagccggcuggauccuggggaauccugagugugaaucuuugucaacagcaaguagcugguccuacauuguggagaccucuucgucagauaacggaacuugcuauccaggcgacuuuaucaauuacgaggagcucagggagcagcugagcagugucuccucuuucgaacgguuugagauuuucccgaagacaagcuccuggcccaaccacgauucaaauaagggugugaccgccgcuuguccucaugcaggggccaaaaguuuuuauaagaaccugaucuggcucguuaaaaagggaaauagcuacccaaaauuaucuaaguccuauauaaacgacaagggcaaagaaguacuggugcuuuggggcauccaccaccccucaacgacugcugaucaacagagcuuguaccagaaugccgacgcguacgucuucguggggaccagucgcuauucuaagaaauuuaagccugagauugcaauccgaccaaaagugcgugaucaggagggaagaaugaacuacuauuggacacuggucgaacccggugacaagauuacuuucgaggccaccggcaaccuaguugugccuagguacgcuuuugccauggaacggaaugcaggguccggaaucauaauuagcgauacaccaguacaugacugcaacaccacgugucaaacuccgaaaggcgcuaucaauacaucgcuccccuuccagaacauucacccuaucaccaucgguaagugcccaaaguaugugaaaucuacuaagcugcgccuugccacagggcugagaaauguccccuccauucagucaaggggauuguuuggcgcgauagccggcuucaucgaagggggauggaccgguaugguggauggcugguacggguaucaucaccagaacgaacaaggaaguggcuacgcagcugaccucaaaagcacgcagaaugccauugacaagaucaccaacaaaguuaauuccgugauagagaagaugaacacacaguuuacugcugucgguaaggaguucaaucaccuggaaaaacggauugagaacuuaaauaagaaaguggaugacggguuccuggauaucuggaccuacaacgccgaacuccuuguacuguuggagaaugaacgcacacuagacuaucaugauucuaacguuaagaaccuguacgagaaagugcgaaaucagcucaagaacaaugcaaaggagaucggcaacggauguuuugaguucuaucacaaaugcgacaauacuuguauggaaagcgucaagaacggcaccuacgauuauccuaaauacucagaagaggccaagcugaauagagaagagauugacggggugaaacuugagaguacaaggaucuaucaaauucuggcuauauacuccaccgucgcgagcucuuuggugcucguugugucacugggagcaaucaguuuuuggaugugcagcaacgguuccuuacagugccggauuuguaucuga

SEQ ID NO: 137842 - RNA, 1701 nt, Artificial Sequence; identical to SEQ ID NO: 134915
  derived and/or modified CDS sequence (opt3) from hemagglutinin__InfluenzaA__AGB13300

SEQ ID NO: 137843 - RNA, 1701 nt, Artificial Sequence
  derived and/or modified CDS sequence (opt3) from hemagglutinin__InfluenzaA__AGB13310
augaaggccauccuggugguccuccuuuacaccuucgcuacagcaaacgccgacacucugugcauuggcuaucacgcgaauaacagcacggauaccguugacacaguguuggagaagaauguaacugugacccauuccgucaacuuacuggaagauaagcacaaugggaaacuauguaagcucagaggaguggcuccccugcaucuugguaaaugcaacauagccggcuggauccuggggaauccugagugugaaucuuugucaacagcaaguagcugguccuacauuguugagaccucuucgucagacaacggaacuugcuauccaggcgauuuuaucgacuacgaggagcucagggagcagcugagcaguguguccucuuucgaacgguuugagauuuucccgaagacaagcuccuggcccaaucacgauucaaacaagggugucaccgccgcuuguccucaugcaggggccaaaaguuuuuauaagaaucugaucuggcucgugaaaaagggaaacagcuacccaaaauuaucuaaguccuauauaaaugacaagggcaaagaaguacugguucuuuggggcgugcaccaccccucaacgagcgcugaucaacagaguuuguaccagaacgccgacgcguacgucuucguggggacuucucgcuauuccaagaaauuuaagccugagaucgcaauucgaccaaaagugcgugaucaggagggaagaaugaauuacuauuggacccuggucgaacccggugacaagaucacauucgaggccacuggcaaccuaguugugccuagguacgcuuuugccauggaacggaacgcagggagcggaauuaucauaucggauaccccaguacaugacugcaauacaaccugucaaacgccgaaaggcgcuauuaacacuucucuccccuuccagaauauccacccuauuacaaucgguaagugcccaaaguaugugaaauccaccaagcugcgccuugccacugggcugagaaacguccccucaauccagaguaggggauuguuuggcgcgauugccggcuucauagaagggggauggacagguaugguggacggcugguacggguaucaucaccagaaugaacaaggaagcggcuacgcagcugaucucaaauccacccagcacgccaucgacgagauuacgaacaagguuaauucugugaucgagaaaaugaacacccaguuuacagcugucgguaaggaguucaaucaucuggaaaagcggauagaaaacuuaaauaaaaagguggaugacggguuccuggauauuuggacuuacaacgccgagcuccuuguacuguuggaaaaugagcgcacccuagacuaucacgauagcaacguuaaaaaucuguacgagaaggugcgaucacagcucaaaaacaacgcaaaggaaaucggcaauggauguuuugaguucuaucauaagugcgacaacacauguauggaaagugucaaaaauggcacuuacgauuauccuaaguacuccgaggaagccaaacugaacagagaggagaucgacggggugaaacuugaaagcaccaggauuuaucaaauccuggcuauuuacucuacagucgcgucaaguuuggugcucguugugagccugggagcaauauccuuuuggaugugcucuaaugguucguuacagugccggaucuguauuuga

SEQ ID NO: 137844 - RNA, 1701 nt, Artificial Sequence
  derived and/or modified CDS sequence (opt3) from hemagglutinin__InfluenzaA__AGB13320
augaaggccauccuggugguccuccuuuacaccauugcuacagcaaacgccgacacucugugcauaggcuaucacgcgaauaacagcacggauaccguugacacaguguuggagaaaaauguaacugugacccauuccgucaacuuacuggaagauaagcacaaugggaaacuauguaagcucagaggaguggcuccccugcaucuugguaaaugcaacaucgccggcuggauucuggggaauccugagugugaaucuuugucaacagcaaguagcugguccuacaucguugagaccucuucgucagacaacggaacuugcuauccaggcgauuucauuaauuacgaggagcucagggagcagcugagcaguguguccucuuuugaacgguucgagaucuuuccgaagacaagcuccuggcccaaccacgacucaaauaagggugucaccgccgcuuguccucaugcaggggccaaaaguuucuauaagaaccugauauggcucgugaaaaagggaaauagcuacccaaaauuaucuaaguccuauaucaacgauaagggcaaagaaguacugguucuuuggggcauucaccaccccucaacgacugcugaccaacagagcuuguaccagaaugccgaugcguacguguuugucgggaccagucgcuauucuaagaaauucaagccugagaucgcaauucgaccaaaagugcgugaccaggagggaagaaugaacuacuauuggacacugguggaacccggugauaagaucacuuuugaggccaccggcaaccuagucguuccuagguacgcuuucgccauggaaaagaaugcaggguccggaauaauuaucagcgacacaccagugcaugauugcaacaccacgugucaaacuccgaagggcgcuauuaauacaucgcuccccuuucagaacauccacccuaucaccauugguaagugcccaaaauauguaaagucuacuaaacugcggcuugccacagggcugcgcaaugugcccuccauacagucaagaggauuguucggcgcgaucgccggcuuuauugaagggggauggaccgguauggucgacggcugguacggguaucaucaccagaacgaacaaggaaguggcuacgcagcugaccucaagagcacgcagaaugccaucgauaaaauaaccaacaagguaaauuccguuauugagaagaugaacacacaguucacugcuguggguaaagaguuuaaucaccuggaaaagaggaucgagaacuuaaauaaaaaggucgacgauggguuccuggacaucuggaccuacaacgccgaacuccuugugcuguuggagaaugaacggacacuagauuaucaugacucuaacgugaaaaaccuguacgagaagguucgcaaucagcucaagaacaaugcaaaagagauuggcaacggauguuucgaauuuuaucacaagugcgauaauacuuguauggagagcgugaaaaacggcaccuacgacuauccuaaguacucagaagaggccaaacugaaucgagaagagaucgauggggucaaacuugagagugcuagaguguaucaaauucuggcgauauacuccacagucgcaagcucuuuggugcucguugugucacugggagccaucaguuucuggaugugcagcaacgguuccuuacagugcaggauuuguaucuga

SEQ ID NO: 137845 - RNA, 1701 nt, Artificial Sequence
  derived and/or modified CDS sequence (opt3) from hemagglutinin__InfluenzaA__AGB13330
augaaggccauccugguggucaugcucuacaccuucgcuacagcaaacgccgacacucuuugcauuggcuaucacgcgaauaacagcacggauaccguugacacagugcuggagaaaaauguaacugugacccauuccgucaacuuguuagaagauaagcacaaugggaaacuguguaagcuaagaggaguggcuccccuccaucuggguaaaugcaacauagccggcuggauccuugggaauccugagugugaaucucugucaacagcaaguagcugguccuacauuguugagaccucuucgucagacaacggaacuugcuauccaggcgauuuuaucgacuacgaagaguugagggagcagcucagcaguguguccucuuucgaacgguuugagauuuucccgaagacaagcuccuggcccaaucacgauucaaacaagggugucaccgccgcuuguccucaugcaggggccaaaggauuuuauaagaaucugaucuggcuggugaaaaagggcaacaguuacccaaaacucagcaagucuuauuccaaugacaagggcaaagaaguauuaguucugugggggauacaccaccccucaacgacugcugaucaacagagccuuuaccagaacgccgacaccuacguguucgucggaacaagucgcuauucuaagaaauuuaagccugagaucgcgauucgaccaaaagugcgugaucaggaggguagaaugaauuacuauuggacuuugguggaacccggcgacaagaucaccuucgaggcaacagggaaccuggucguuccuagguacgccuuugcuauggaacggaacgccggauccggcauuaucauaagcgauaccccagugcaugacugcaauacgacuugucaaacaccgaaaggugcaauuaacaccucgcuacccuuccagaauauccacccuauuacuaucgggaagugcccaaaguauguaaaaucuacaaagcuccgccuggcuaccggacuuagaaacgugcccuccauccagucaaggggccuguuuggcgccauugcgggguucauagagggagguuggacgggcauggucgacgggugguacggauaucaucaccagaaugaacaaggcagugguuacgccgcagauuugaaaagcacccagaacgcuaucgacaagauuacaaauaaagugaacuccguuaucgagaagaugaauacucaguuuaccgccguggggaaggaguucaaccaccucgaaaaacggauagagaaucugaacaagaaagucgaugacggcuucuuagauauuuggacauacaaugcugaacugcucgugcuucuggagaacgaacgcacuuuggacuaucaugauucuaauguaaagaaccuauacgagaaaguucgaaaccagcugaagaauaacgccaaggagaucggaaauggcuguuuugaguucuaucacaaaugcgacaacaccuguauggaaagcgugaagaaugggacauacgauuauccuaaauacucagaagaggcaaagcucaacagagaagagaucgacggagucaaacuggagaguaccaggauuuaucaaauccuugccauuuacuccacuguggcuagcucucuggucuuggugguuucacucggugcgauaaguuuuuggaugugcagcaauggcucccugcagugccggaucuguauuuga

SEQ ID NO: 137846 - RNA, 1701 nt, Artificial Sequence; identical to SEQ ID NO: 134915
  derived and/or modified CDS sequence (opt3) from hemagglutinin__InfluenzaA__AGB13340

SEQ ID NO: 137847 - RNA, 1701 nt, Artificial Sequence
  derived and/or modified CDS sequence (opt3) from hemagglutinin__InfluenzaA__AGB13350
augaaggccauccuggugguccuccuuuacaccuucgcuacagcaaacgccgacacucugugcauuggcuaucacgcgaauaacagcacggagaccguugauacaguguuggagaaaaauguaacugugacccauuccgucaacuuacuggaagacaagcacaaugggaaacuauguaagcucagaggaguggcuccccugcaucuugguaaaugcaacauagccggcuggauccuggggaauccugaaugugagucuuugucaacagcaaguagcugguccuacauuguugaaaccucuucgucagauaacggaacuugcuauccaggcgacuuuaucaauuacgaggagcucagggaacagcugagcaguguguccucuuucgagcgguuugaaauuuucccgaagacaagcuccuggcccaaccacgauucaaauaagggugucaccgccgcuuguccucaagcaggggccaaaaguuuuuauaagaaccugaucuggcucgugaaaaagggaaauagcuacccaaaauuaucuaaguccuauauaaacgacaagggcaaagagguacugguucuuuggggcauccaucaccccucaacgagcgcugaucagcagaguuuguaccagaaugccgacgcguacguguucgucgggacuucuaaguauuccaaaaaguuuaaaccugagauugcagugcgcccaaaggugcgagaucaagaaggacguaugaacuacuauuggacccuggucgagcccggugacaaaaucacauucgaagccacuggcaaccuacucguuccuagauacgcuuuugccauggagaggaaugcagggagcggaauuaucauaucggauaccccagugcacgacugcaacacaaccugucagacgccgaagggcgcuauuaauacuucucugcccuuccagaacauccauccuauuacaaucgguaagugcccaaaauauguaaaguccaccaaacuucggcuggccacuggguugcgcaaugugcccucaauccagaguagaggacucuuuggcgcgauugccggcuucauagaagggggauggacagguauggucgauggcugguacggguaucaccaucaaaacgcacagggaagcggcuacgcugccgaccugaaguccacccagaaugcuaucgacaaaauuacgaacaagguaaauucuguuaucgagaagaugaacacccaguuuacagccguggguaaagaguucaaucacuuagaaaagaggauagagaaccugaauaaaaaggucgaugacggguuccucgauauuuggacuuacaacgcagaacuucugguguugcuagagaaugaacggacccuggacuaucacgauagcaacgugaaaaaccucuacgagaagguucgcucacaacugaagaauaacgccaaagagaucggcaauggauguuuugaguucuaucauaagugcgacaacacauguauggaaagugugaaaaauggcacuuacgauuauccuaaguacuccgaagaggcuaaacuuaaccgagaagagaucgacggggucaagcuggagagcaccagaauuuaucagaucuuggcgauuuacucuacaguggcaucaagucucguccuggugguuagcuuaggagccauauccuuuuggaugugcucuaaugguucgcugcagugcaggaucuguauuuga

SEQ ID NO: 137848 - RNA, 1701 nt, Artificial Sequence
  derived and/or modified CDS sequence (opt3) from hemagglutinin__InfluenzaA__AGB13360
augaaggccauccuggugguccuccuuuacaccuucgcuacagcaaacgccgacacucugugcauuggcuaucacgcgaauaacagcacggauaccguugacacaguguuggagaaaaauguaacugugacccauuccgucaacuuacuggaagauaagcacaaugggaaacuauguaagcucagaggaguggcuccccugcaucuugguaaaugcaacauagccggcuggauccuggggaauccugagugugaaucuuugucaacagcaaguagcugguccuacauuguugagaccucuucgucagacaacggaacuugcuauccaggcgauuuuaucaauuacgaggagcucagggagcagcugagcaguguguccucuuucgaacgguuugagauuuucccgaagacaagcuccuggcccaaccacgacucaaauaagggugucaccgccgcuuguccucaugcaggggccaaaaguuuuuauaagaaccugaucuggcucgugaaaaagggaaauagcuacccaaaauuaucuaaguccuauauaaacgauaagggcaaagaaguacugguucuuuggggcauccaccaccccucaacgagcgcugaccaacagaguuuguaccagaaugccgaugcguacguguucgucgggacuucuaaguauuccaaaaaguuuaaaccugagauugcagugcgcccaaaggugcgagaccaggagggacguaugaacuacuauuggacccuggucgaacccggugauaaaaucacauucgaggccacuggcaaccuacucguuccuagauacgcuuuugccauggaaaggaaugcagggagcggaauuaucauaucggacaccccagugcaugauugcaacacaaccugucaaacgccgaagggcgcuauuaauacuucucugcccuuccagaacauccacccuauuacaaucgguaagugcccaaaauauguaaaguccaccaaacuucggcuggccacuggguugcgcaaugugcccucaauccagaguagaggacucuuuggcgcgauugccggcuucauagaagggggauggacagguauggucgacggcugguacggguaucaucaccagaacgaacaaggaagcggcuacgcagcugaccugaaguccacccagaaugccaucgauaaaauuacgaacaagguuaauucugugaucgagaagaugaacacccaguuuacagcuguggguaaagaguucaaucacuuagaaaagaggauagagaaccugaauaaaaaggucgacgauggguuccucgacauuuggacuuacaacgccgaaaugcuugugcuguuggagaaugaaaagacccuagauuaucaugacagcaacguaaagaaccuguacgagaagguucggucacagcucaaaaauaacgcaaaggagaucggcaauggauguuuugaguucuaucacaaaugcgauaacacauguauggaaagugugaagaauggcacuuacgacuauccuaaauacuccgaagaggccaagcugaaccgcgaagagaucgauggggucaaacuugagagcacccgaauuuaucaaauccuggcuauuuacucuacaguggcgucaaguuugguccucgugguuagccugggagcaauauccuuuuggaugugcucuaaugguucguuacagugcagaaucuguauuuga

SEQ ID NO: 137849 - RNA, 1701 nt, Artificial Sequence
  derived and/or modified CDS sequence (opt3) from hemagglutinin__InfluenzaA__AGB13380
augaaggccauccuggugguccuccuuuacaccuucgcuacagcaaaagccgacacucugugcauuggcuaucacgcgaacaauagcacggauaccguugacacaguguuggagaagaacguaacugugacccauuccgucaauuuacuggaagauaaacacaacgggaagcuauguaaacucagaggaguggcuccccugcaucuugguaagugcaauauagccggcuggauccuggggaacccugagugugaaucuuugucaacagcaaguagcugguccuacauuguugagaccucuucgucagacaauggaacuugcuauccaggcgauuuuaucaacuacgaggagcucagggagcagcugagcaguguguccucuuucgaacgguuugagauuuucccgaagacaagcuccuggcccaaucacgacucaaacaaaggugucaccgccgcuuguccucaugcaggggccaagaguuuuuauaaaaaucugaucuggcucgugaagaaaggaaacagcuacccaaaguuaucuaaguccuauauaaaugauaaaggcaaggaaguacugguucuuuggggcauccaccaccccucaacgacugcugaccaacagagcuuguaccagaacgccgaugcguacguguucgucgggaccagucgcuauucuaaaaaguuuaaaccugagauugcaauccgaccaaaggugcgugaccaggagggaagaaugaauuacuauuggacacugguggaacccggugauaaaauuacuuucgaggccaccggcaaccuagucguuccuagguacgcuuuugccauggaacggaacccaggguccggaaucauaauuagcgacacaccggugcaugauugcaauaccacgugucaaacucccaagggcgcaaucaacacaucgcucccuuuccagaauauucacccaaucaccaucgguaagugccccaaauauguaaagucuacuaaacugcgccuugcuacagggcugagaaacgugccuuccauucagucaaggggauuguuuggcgccauagcgggcuucaucgaagggggauggaccgguauggucgacggcugguacggguaucaucaccagaaugaacaaggaaguggcuacgccgcagaccucaagagcacgcagaacgcuauugauaaaaucaccaauaaggugaacuccguuauagagaagaugaauacacaguuuacugccguggguaaagaguucaaccaccuggaaaagcggauugagaauuuaaacaaaaaggucgacgauggguuccuggacaucuggaccuacaaugcugaacuccuugugcuguuggagaacgaacgcacacuagauuaucaugacucuaauguaaagaaccuguacgagaagguucgaaaccagcucaagaauaacgccaaagagaucggcaauggauguuuugaguucuaucacaagugcgauaacacuuguauggaaagcgugaaaaauggcaccuacgacuauccaaaguacucagaagaggcaaaacugaacagagaagagauugauggggucaaacuugagaguacaaggaucuaucaaauucuggccauauacuccaccguggcuagcucuuugguccucgugguuucacugggagcgaucaguuuuuggaugugcagcaaugguuccuuacagugccggauuuguaucuga

SEQ ID NO: 137850 - RNA, 1701 nt, Artificial Sequence; identical to SEQ ID NO: 134483
  derived and/or modified CDS sequence (opt3) from hemagglutinin__InfluenzaA__AGB13390

SEQ ID NO: 137851 - RNA, 1701 nt, Artificial Sequence; identical to SEQ ID NO: 135090
  derived and/or modified CDS sequence (opt3) from hemagglutinin__InfluenzaA__AGB13400

SEQ ID NO: 137852 - RNA, 1701 nt, Artificial Sequence; identical to SEQ ID NO: 134483
  derived and/or modified CDS sequence (opt3) from hemagglutinin__InfluenzaA__AGB13410

SEQ ID NO: 137853 - RNA, 1701 nt, Artificial Sequence; identical to SEQ ID NO: 134502
  derived and/or modified CDS sequence (opt3) from hemagglutinin__InfluenzaA__AGB13420

SEQ ID NO: 137854 - RNA, 1701 nt, Artificial Sequence
  derived and/or modified CDS sequence (opt3) from hemagglutinin__InfluenzaA__AGB13430
augaaggccauccuggugguccuccuuuacaccuucgcuacagcaaacgccgacacucugugcauuggcuaucacgcgaauaacagcacggauaccguugacacaguguuggagaaaaauguaacugugacccauuccgucaacuuacuggaagauaagcacaaugggaaacuauguaagcucagaggaguggcuccccugcaucuugguaaaugcaacauagccggcuggauccuggggaauccugagugugaaucuuugucaacagcaaguagcugguccuacauuguugagaccucuucgucagacaacggaacuugcuauccaggcgauuuuaucgacuacgaggagcucagggagcagcugagcaguguguccucuuucgaacgguuugagauguucccgaagacaagcuccuggcccaaucacgauucaaacaagggugucaccacggccuguccucaugcuggggcaaaaaguuuuuauaagaaucugauuuggcucgugaaaaagggaaacagcuacccaaaauuaucuaaguccuauaucaaugacaagggcaaagaaguacugguucuuuggggcauacaccaucccccuacuucagccgaucaacagagcuuguaccagaacgcugacgccuacguguucgucgggaccagucgcuauucuaagaaauuuaagccagagaucgcgauucgacccaaagugcgugaucaggagggaagaaugaauuacuauuggacacugguggaaccuggugacaagaucacuuucgaggcaaccggcaaccuagucguuccaagguacgccuuugcuauggaacggaacgccggguccggaauuaucauaagcgauacaccggugcacgacugcaauaccacgugucaaacucccaaaggcgcaauuaacacaucgcucccuuuccagaauauccacccaauuaccaucgguaagugccccaaguauguaaaaucuacuaagcugcgccuugcuacagggcugagaaacgugccuuccauccagucaaggggauuguuuggcgccauugcgggcuucauagaagggggauggaccgguauggucgacggcugguacggguaucaucaccagaaugaacaaggaaguggcuacgccgcagaucucaaaagcacgcagaacgcuaucgacgguauuaccaauaaggugaacuccguuaucgagaaaaugaauacacaguuuacugccguggggaaggaguucaaccaccuggaaaagcggauagagaauuuaaacaaaaaggucgaugacggcuuccuggauauuuggaccuacaaugcugaacuccuugugcuguuggagaacgaacgcacacuagacuaucaugauucuaauguaaagaaccuguacgagaagguucgaagccagcucaaaaacaaugccaaggagaucggaaacggcuguuuugaguucuaucacaagugcgacaauacuuguauggaaucagugaaaaacgggaccuacgauuauccaaaguacagugaagaggcaaaacugaauagagaagagaucgacggagucaaacuugaguccacaaugauuuaucaaauccuggccauuuacagcaccguggcuucuucauugguccucgugguuagucugggugcgaucagcuuuuggaugugcuccaacggcucuuuacagugcaggauauguauuuga

SEQ ID NO: 137855 - RNA, 1701 nt, Artificial Sequence; identical to SEQ ID NO: 135090
  derived and/or modified CDS sequence (opt3) from hemagglutinin__InfluenzaA__AGB13440

SEQ ID NO: 137856 - RNA, 1701 nt, Artificial Sequence; identical to SEQ ID NO: 134502
  derived and/or modified CDS sequence (opt3) from hemagglutinin__InfluenzaA__AGB13450

SEQ ID NO: 137857 - RNA, 1701 nt, Artificial Sequence; identical to SEQ ID NO: 134483
  derived and/or modified CDS sequence (opt3) from hemagglutinin__InfluenzaA__AGB13460

SEQ ID NO: 137858 - RNA, 1701 nt, Artificial Sequence; identical to SEQ ID NO: 134915
  derived and/or modified CDS sequence (opt3) from hemagglutinin__InfluenzaA__AGB13470

SEQ ID NO: 137859 - RNA, 1701 nt, Artificial Sequence; identical to SEQ ID NO: 134502
  derived and/or modified CDS sequence (opt3) from hemagglutinin__InfluenzaA__AGB13480

SEQ ID NO: 137860 - RNA, 1701 nt, Artificial Sequence; identical to SEQ ID NO: 134915
  derived and/or modified CDS sequence (opt3) from hemagglutinin__InfluenzaA__AGB13490

SEQ ID NO: 137861 - RNA, 1701 nt, Artificial Sequence
  derived and/or modified CDS sequence (opt3) from hemagglutinin__InfluenzaA__AGB13500
augaaggccauccuggugguccuccuuuacaccuucgcuacagcaaacgccgacacucugugcauuggcuaucacgcgaauaacagcacggauaccguugacacaguguuggagaaaaauguaacugugacccauuccgucaacuuacuggaagauaagcacaaugggaaacuauguaagcucagaggaguggcuccccugcaucuugguaaaugcaacauagccggcuggauccuggggaauccugagugugaaucuuugucaacagcaaguagcugguccuacauuguugagaccucuucgucagacaacggaacuugcuauccaggcaauuuuaucgauuacgaagaacucagggagcagcugagcaguguguccucuuucgaacgguuugagauuuucccgaagacaagcuccuggcccgaccacgauucaaacaagggugucaccgccgcuuguccucaugcaggggccaaaggauuuuauaagaaucugaucuggcucgugaaaaagggcaacaguuacccaaaauuaagcaagucuuauauaaaugacaagggcaaagaaguacugguucuuugggggauccaccaccccuccacgucagcugaucaacagagcuuguaccagaacgccgacgcguacguguucgucggaaccagucgcuauucuaagaaauuuaagccugagauugcaauccgaccaaaagugcgugaucaggaggguagaaugaauuacuauuggacucugguggaacccggcgacaagauuacauucgaggccacugggaaccuagucgcuccuagguacgccuuugcaauggaacggaacgcuggauccggcaucauaauuagcgauaccccaguucaugacugcaauacaaccugucaaacgccgaaaggugccaucaacacuucgcuccccuuccagaauauucacccuaucacaaucgggaagugcccaaaguaugugaaaucuaccaagcugcgccuugcgacuggacugagaaacguacccuccauucagucaaggggcuuguuuggcgccauagcaggguucaucgagggagguuggacaggcaugguggacgggugguacggauaucaucaccagaaugaacaaggcagugguuacgcugccgaucucaaaagcacccagaacgcuauugacaagaucacgaauaaagucaacuccgugauagagaagaugaauacccaguuuacagccguugggaaggaguucaaccaccuggaaaaacggauugagaauuuaaacaagaaaguggaugacggcuuccuggauaucuggacuuacaaugcagaacuccuuguccuguuggagaacgaacgcacccuagacuaucaugauucuaaugugaagaaccuguacgagaaaguacgaagccagcucaagaacaaugccaaggagaucggaaacggcuguuuugaguucuaucacaaaugcgacaauacauguauggagucaguuaagaacgggacuuacgauuauccuaaauacagugaagaggcuaagcugaauagagaagagauugacggagugaaacuugaguccaccaggaucuaucaaauucuggcgauauacagcacagucgcaucuucauuggugcucgucgugagucugggugccaucagcuuuuggaugugcuccaacggcucuuuacagugccggauuuguaucuga

SEQ ID NO: 137862 - RNA, 1701 nt, Artificial Sequence; identical to SEQ ID NO: 135120
  derived and/or modified CDS sequence (opt3) from hemagglutinin__InfluenzaA__AGB13520

SEQ ID NO: 137863 - RNA, 1701 nt, Artificial Sequence
  derived and/or modified CDS sequence (opt3) from hemagglutinin__InfluenzaA__AGB13530
augaaggccauccuggugguccuccuuuacaccuucgcuacagcaaacgccgacacucugugcauuggcuaucacgcgaauaacagcacggauaccguugacacaguguuggagaaaaauguaacugugacccauuccgucaacuuacuggaagauaagcacaaugggaaacuauguaagcucagaggaguggcuccccugcaucuugguaaaugcaacauagccggcuggauccuggggaauccugagugugaaucuuugucaacagcaaguagcugguccuacauuguugagaccucuucgucagacaacggaacuugcuauccaggcgauuuuaucgacuacgaggagcucagggagcagcugagcaguguguccucuuucgaacgguuugagauuuucccgaagacaagcuccuggcccaaucacgauucaaacaagggugucaccgccgcuuguccucaugcaggggccaaaaguuuuuauaagaaucugaucuggcucgugaaaaagggaaacagcuacccaaaauuaaauaagucuuauauaaacgacaagggcaaagaaguacugguucuuuggggcauccaccaccccuccacgacugcugaucaacagucauuguaccagaaugccgacgcguacguguucgucgggaccagccgcuauaguaagaaauuuaagccugagauugcaauccgaccaaaagugcgugaucaggagggaagaaugaacuacuauuggacacugguggaacccggugacaagauuacuuucgaggccaccggcaaccuagucguuccuagguacgcuuuugccauggaacggaaugcagggucuggaaucauaauuuccgauacaccagugcaugacugcaacaccacgugucaaacuccgaaaggcgcuaucaauacaagccuccccuuccagaacauucacccuaucaccaucgguaagugcccaaaguauguaaaaucgacuaagcugcgccuugccacagggcugagaaaugugcccucuauucaguccaggggauuguuuggcgcgauagccggcuucaucgaagggggauggaccgguauggucgacggcugguacggguaucaucaccagaacgaacaaggaucaggcuacgcagcugaucucaaaaguacgcagaaugccauugacaagaucaccaacaaagugaauagcguuauagagaagaugaacacacaguuuacugcuguggguaaggaguucaaucaccuggaaaaacggauugagaacuuaaauaagaaagucgaugacggguuccuggauaucuggaccuacaacgccgaacuccuugugcuguuggagaaugaacgcacacuagacuaucaugauuccaacguaaagaaccuguacgagaaaguucgaaaucagcucaagaacaaugcaaaggagaucggcaacggauguuuugaguucuaucacaaaugcgacaauacuuguauggaaucugugaagaacggcaccuacgauuauccuaaauacagcgaagaggccaagcugaauagagaagagauuaacggggucaaacuugagucaacaaggaucuaucaaauucuggcuauauacaguaccguggcguccagcuugguccucgugguuucucugggagcaaucucauuuuggaugugcaguaaugguagcuuacagugccggauuuguaucuga

SEQ ID NO: 137864 - RNA, 1701 nt, Artificial Sequence; identical to SEQ ID NO: 135134
  derived and/or modified CDS sequence (opt3) from hemagglutinin__InfluenzaA__AGB13540

SEQ ID NO: 137865 - RNA, 1701 nt, Artificial Sequence; identical to SEQ ID NO: 135098
  derived and/or modified CDS sequence (opt3) from hemagglutinin__InfluenzaA__AGB13550

SEQ ID NO: 137866 - RNA, 1701 nt, Artificial Sequence; identical to SEQ ID NO: 135098
  derived and/or modified CDS sequence (opt3) from hemagglutinin__InfluenzaA__AGB13560

SEQ ID NO: 137867 - RNA, 1701 nt, Artificial Sequence; identical to SEQ ID NO: 134915
  derived and/or modified CDS sequence (opt3) from hemagglutinin__InfluenzaA__AGB13570

SEQ ID NO: 137868 - RNA, 1701 nt, Artificial Sequence
  derived and/or modified CDS sequence (opt3) from hemagglutinin__InfluenzaA__AGB13580
augaaggccauccuggugguccuccuuuacaccuucgcuacagcaaacgccgacacucugugcauuggcuaucacgcgaauaacagcacggauaccguugacacaguguuggagaaaaauguaacugugacccauuccgucaacuuacuggaagauaagcacaaugggaaacuauguaagcucagaggaguggcuccccugcaucuugguaaaugcaacauagccggcuggauccuggggaauccugagugugaaucuuugucaacagcaaguagcugguccuacauuguugagaccucuucgucagacaacggaacuugcuauccaggcgauuuuaucaauuacgaggagcucagggagcagcugagcaguguguccucuuucgaacgguuugagauuuucccgaagacaagcuccuggcccaaccacgacucaaauaagggugucaccgccgcuuguccucaugcaggggccaaaaguuuuuauaagaaccugaucuggcucgugaaaaagggaaauagcuacccaaaauuaucuaaguccuauauaaacgauaagggcaaagaaguacugguucuuuggggcauccaccaccccucaacgacugcugaccaacagagcuuguaccagaaugccgaugcguacguguucgucgggaccagucgcuauucuaagaaauuuaagccugagauugcaauccgaccaaaagugcgugaccaggagggaagaaugaacuacuauuggacacugguggaacccggugauaagauuacuuucgaggccaccggcaaccuagucguuccuagguacgcuuuugccauggaacggaaugcaggguccggaaucauaauuagcgacacaccagugcaugauugcaacaccacgugucaaacuccgaaaggcgcuaucaauacaucgcuccccuuccagaacauucacccuaucaccaucgguaagugcccaaaguauguaaaaucuacuaagcugcgccuugccacagggcugagaaaugugcccuccauucagucaaggggauuguuuggcgcgauagccggcuucaucgaagggggauggaccgguauggucgacggcugguacggguaucaucaccagaacgaacaaggaaguggcuacgcagcugaccucaaaagcacgcagaaugccauugauaagaucaccaacaaaguuaauuccgugauagagaagaugaacacacaguuuacugcuguggguaaggaguucaaucaccuggaaaaacggauugagaacuuaaauaagaaagucgacgauggguuccuggacaucuggaccuacaacgccgaacuccuugugcuguuggagaaugaacgcacacuagauuaucaugacucuaacguaaagaaccuguacgagaaaguucgaaaucagcucaagaacaaugcaaaggagaucggcaacggauguuuugaguucuaucacaaaugcaauaacacuuguauggaaagcgugaagaauggcaccuacgauuauccuaaauacucagaagaggccaagcugaacagagaagagauugacggggucaaacuugagaguacaaggaucuaucaaauucuggcuauauacuccaccguggcgagcucuuugguccucgugguuucacugggagcaaucaguuuuuggaugugcagcaaugguuccuuacagugccggauuuguaucuga

SEQ ID NO: 137869 - RNA, 1701 nt, Artificial Sequence
  derived and/or modified CDS sequence (opt3) from hemagglutinin__InfluenzaA__AGB13590
augaaggccauccuggugguccuccuuuacaccuucgcuacagcaaacgccgacacucugugcauuggcuaucacgcgaauaacagcacggauaccguugacacaguguuggagaagaauguaacugugacccauuccgucaacuuacuggaagauaagcacaaugggaaacuauguaagcucagaggaguggcuccccugcaucuugguaaaugcaacauagccggcuggauccuggggaauccugagugugaaucuuugucaacagcaaguagcugguccuacauuguugagaccucuucgucagacaacggaacuugcuauccaggcgauuuuaucaauuacgaggagcucagggagcagcugagcaguguguccucuuucgaacgguuugagauuuucccgaagacaagcuccuggcccaaccacgacucaaauaagggugucaccgccgcuuguccucaugcaggggccaaaaguuuuuauaagaaccugaucuggcucgugaaaaagggaaauagcuacccaaaauuaucucaauccuauauaaacgauaagggcaaggaaguacugguucuuuggggcauccaccaccccucaacgacugcugaccagcagagcuuguaccagaaugccgaugcguacguguucgucgggaccagucgcuauucuaaaaaguuuaaaccugagauugcaauccgaccaaaggugcgugaccaagagggaagaaugaacuacuauuggacacugguggaacccggugauaaaauuacuuucgaggccaccggcaaccuagucguuccuagguacgcuuuugccauggaacggaaugcaggguccggaaucauaauuagcgacacaccagugcaugauugcaacaccacgugucagacuccgaagggcgcuaucaauacaucgcuccccuuccagaacauucacccuaucaccaucgguaaaugcccaaaguauguaaagucuacuaaacugcgccuugccacagggcugagaaaugugcccuccauucagucaaggggauuguuuggcgcgauagccggcuucaucgaagggggauggaccgguauggucgacggcugguacggguaucaucaccaaaacgaacagggaaguggcuacgcagcugaccucaagagcacgcagaaugccauugauaaaaucaccaacaagguaaauuccguuauagagaaaaugaacacacaguuuacugcuguggguaaggaguucaaucaccuggaaaagcggauugagaacuuaaauaaaaaggucgacgauggguuccuggacaucuggaccuacaacgccgaacuccuugugcuguuggagaaugaacgcacacuagauuaucaugacucuaacgugaaaaaccuguacgagaagguucgaaaucaacucaaaaacaaugcaaaggagaucggcaacggauguuuugaguucuaucacaagugcgauaauacuuguauggaaagcgugaaaaacggcaccuacgacuauccuaaguacucagaagaggccaaacugaauagagaagagauugauggggucaaacuugagaguacaaggaucuaucagauucuggcuauauacuccaccguggcgagcucuuugguccucgugguuucacugggagcaaucaguuuuuggaugugcagcaacgguuccuuacagugccggauuuguaucuga

SEQ ID NO: 137870 - RNA, 1701 nt, Artificial Sequence
  derived and/or modified CDS sequence (opt3) from hemagglutinin__InfluenzaA__AGB13600
augaaggccauccuggugguccuccuuuacaccuucgcuacagcaaacgccgacacucugugcauuggcuaucacgcgaauaacagcacggauaccguugacacaguguuggagaaaaauguaacugugacccauuccgucaacuuacuggaagauaagcacaaugggaaacuauguaagcucagaggaguggcuccccugcaucuugguaaaugcaacauagccggcuggauccuggggaauccugagugugaaucuuugucaacagcaaguagcugguccuacauuguugagaccucuucgucagacaacggaacuugcuauccaggcgauuuuaucaauuacgaggagcucagggagcagcugagcaguguguccucuuucgaacgguuugagauuuucccgaagacaagcuccuggcccaaccacgacucaaauaagggugucaccgccgcuuguccucaugcaggggccaaaaguuuuuauaagaaccugaucuggcucgugaaaaagggaaauagcuacccaaaauuaaacaagucuuauauaaaugauaagggcaaagaaguacugguucuuuggggcauccaccaccccuccacgacugcugaccaacagucauuguaccagaacgccgaugcguacguguucgucgggaccagccgcuauaguaagaaauuuaagccugagauugcaauccgaccaaaagugcgugaccaggagggaagaaugaacuacuauuggacacugguggaacccggugauaagauuacuuucgaggccaccggcaaucuagucguuccuagguacgcuuuugccauggaacggaacgcagggucuggaaucauaauuuccgacacaccagugcaugauugcaauaccacgugucaaacuccgaaaggcgcuaucaacacaagccuccccuuccagaauauucacccuaucaccaucgguaagugcccaaaguauguaaaaucgacuaagcugcgccuugccacagggcugagaaacgugcccucuauucaguccaggggauuguuuggcgcgauagccggcuucaucgaagggggauggaccgguauggucgacggcugguacggguaucaucaccagaaugaacaaggaucaggcuacgcagcugaccucaaaaguacgcagaacgccauugauaagaucaccaauaaagugaacagcguuauagagaagaugaauacacaguuuacugcuguggguaaggaguucaaccaccuggaaaaacggauugagaauuuaaacaagaaagucgacgauggguuccuggacaucuggaccuacaaugccgaacuccuugugcuguuggagaacgaacgcacacuagauuaucaugacuccaacguaaagaaucuguacgagaaaguucgaaaccagcucaagaauaacgcaaaggagaucggcaauggauguuuugaguucuaucacaaaugcgauaacacuuguauggaaucugugaagaauggcaccuacgacuauccuaaauacagcgaagaggccaagcugaacagagaagagauugauggggucaaacuugagucaacaaggaucuaucaaauucuggcuauauacaguaccguggcguccagcuugguccucgugguuucucugggagcaaucucauuuuggaugugcaguaaugguagcuuacagugccggauuuguaucuga

SEQ ID NO: 137871 - RNA, 1701 nt, Artificial Sequence; identical to SEQ ID NO: 134915
  derived and/or modified CDS sequence (opt3) from hemagglutinin__InfluenzaA__AGB13610

SEQ ID NO: 137872 - RNA, 1701 nt, Artificial Sequence; identical to SEQ ID NO: 135134
  derived and/or modified CDS sequence (opt3) from hemagglutinin__InfluenzaA__AGB13620

SEQ ID NO: 137873 - RNA, 1701 nt, Artificial Sequence; identical to SEQ ID NO: 134502
  derived and/or modified CDS sequence (opt3) from hemagglutinin__InfluenzaA__AGB13630

SEQ ID NO: 137874 - RNA, 1701 nt, Artificial Sequence
  derived and/or modified CDS sequence (opt3) from hemagglutinin__InfluenzaA__AGB13640
augaaggccauccuggugguccuccuuuacaccuucgcuacagcaaacgccgacacucugugcauuggcuaucacgcgaauaacagcacggauaccguugacacaguguuggagaaaaauguaacugugacccauuccgucaacuuacuggaagauaagcacaaugggaaacuauguaagcucagaggaguggcuccccugcaucuugguaaaugcaacauagccggcuggauccuggggaauccugagugugaaucuuugucaacagcaaguagcugguccuacauuguugagaccucuucgucagacaacggaacuugcuauccaggcgauuuuaucgacuacgaggagcucagggagcagcugagcaguguguccucuuucgaacgguuugagauuuucccgaagacaagcuccuggcccaaucacgauucaaacaagggugucaccacggccuguccucaugcuggggcaaaaaguuuuuauaagaaucugaucuggcucgugaaaaagggaaacagcuacccaaaauuaucuaaguccuauauaaaugacaagggcaaagaaguacugguucuuuggggcauccaccaucccccuacuucagccgaucaacagagcuuguaccagaacgcugacgccuacguguucgucgggaccagucgcuauucuaagaaauuuaagccagagauugcgauccgacccaaagugcgugaucaggagggaagaaugaauuacuauuggacacugguggaaccuggugacaagauuacuuucgaggcaaccggcaaccuagucguuccaagguacgccuuugcuauggaacggaacgccggguccggaaucauaauuagcgauacaccggugcacgacugcaauaccacgugucaaacucccaaaggcgcaaucaacacaucgcucccuuuccagaauauucacccaaucaccaucgguaagugccccaaguauguaaaaucuacuaagcugcgccuugcuacagggcugagaaacgugccuuccauucagucaaggggauuguuuggcgccauagcgggcuucaucgaagggggauggaccgguauggucgacggcugguacggguaucaucaccagaaugaacaaggaaguggcuacgccgcagaucucaaaagcacgcagaacgcuauugacgguaucaccaauaaggugaacuccguuauagagaaaaugaauacacaguuuacugccguggggaaggaguucaaccaccuggaaaagcggauugagaauuuaaacaaaaaggucgaugacggcuuccuggauaucuggaccuacaaugcugaacuccuugugcuguuggagaacgaacgcacacuagacuaucaugauucuaauguaaagaaccuguacgagaagguucgaagccagcucaaaaacaaugccaaggagaucggaaacggcuguuuugaguucuaucacaagugcgacaauacuuguauggaaucagugaaaaacgggaccuacgauuauccaaaguacagugaagaggcaaaacugaauagagaagagauugacggagucaaacuugaguccacaaugaucuaucaaauucuggccauauacagcaccguggcuucuucauugguccucaucgugagucugggugcgauuagcuuuuggaugugcuccaacggcucuuuacagugcaggaucuguaucuga

SEQ ID NO: 137875 - RNA, 1701 nt, Artificial Sequence
  derived and/or modified CDS sequence (opt3) from hemagglutinin__InfluenzaA__AGB13650
augaaggccauccuggugguccuccuuuacaccuucgcuacagcaaacgccgacacucugugcauuggcuaucacgcgaauaacagcacggauaccguugacacaguguuggagaagaauguaacugugacccauuccgucaacuuacuggaagauaagcacaaugggaaacuauguaagcucagaggaguggcuccccugcaucuugguaaaugcaacauagccggcuggauccuggggaauccugagugugaaucuuugucaacagcaaguagcugguccuacauuguugagaccucuucgucagacaacggaacuugcuauccaggcgauuuuaucgacuacgaggagcucagggagcagcugagcaguguguccucuuucgaacgguuugagauuuucccgaagacaagcuccuggcccaaucacgauucaaacaagggugucaccacggccuguccucaugcuggggcaaaaaguuuuuauaagaaucugaucuggcucgugaaaaagggaaacagcuacccaaaauuaucuaaguccuauauaaaugacaagggcaaagaaguacugguucuuuggggcauccaccaucccccuacuucagccgaucaacagagcuuguaccagaacgcugacgccuacguguucgucgggaccagucgcuauucuaagaaauuuaagccagagauugcgauccgacccaaagugcgugaucaggagggaagaaugaauuacuauuggacacugguggaaccuggugacaagauuacuuucgaggcaaccggcaaccuagucguuccaagguacgccuuugcuauggaacggaacgccggguccggaaucauaauuagcgauacaccggugcacgacugcaauaccacgugucaaacucccaaaggcgcaaucaacacaucgcucccuuuccagaauauucacccaaucaccaucgguaagugccccaaguauguaaaaucuacuaagcugcgccuugcuacagggcugagaaacgugccuuccauucagucaaggggauuguuuggcgccauagcgggcuucaucgaagggggauggaccgguauggucgacggcugguacggguaucaucaccagaaugaacaaggaaguggcuacgccgcagaucucaaaagcacgcagaacgcuauugacgguaucaccaauaaggugaacuccguuauagagaaaaugaauacacaguuuacugccguggggaaggaguucaaccaccuggaaaagcggauugagaauuuaaacaaaaaggucgaugacggcuuccuggauaucuggaccuacaaugcugaacuccuuauccuguuggagaacgaacgcacacuagacuaucaugauucuaaugugaaaaaccuguacgagaagguacgaagccagcucaaaaacaaugccaaggagauuggaaacggcuguuuugaguucuaucacaagugcgacaauacuuguauggaaucaguuaaaaacgggaccuacgauuauccaaaguacagugaagaggcaaaacugaauagagaagagaucgacggagugaaacuugaguccacaaugauuuaucaaauacuggccaucuacagcaccgucgcuucuucauuggugcucauugucagucugggugcgaucagcuuuuggaugugcuccaacggcucuuuacagugcaggaucuguauuuga

SEQ ID NO: 137876 - RNA, 1701 nt, Artificial Sequence; identical to SEQ ID NO: 134872
  derived and/or modified CDS sequence (opt3) from hemagglutinin__InfluenzaA__AGB13660

SEQ ID NO: 137877 - RNA, 1701 nt, Artificial Sequence; identical to SEQ ID NO: 134483
  derived and/or modified CDS sequence (opt3) from hemagglutinin__InfluenzaA__AGB13721

SEQ ID NO: 137878 - RNA, 1701 nt, Artificial Sequence; identical to SEQ ID NO: 134915
  derived and/or modified CDS sequence (opt3) from hemagglutinin__InfluenzaA__AGB13731

SEQ ID NO: 137879 - RNA, 1701 nt, Artificial Sequence
  derived and/or modified CDS sequence (opt3) from hemagglutinin__InfluenzaA__AGB51356
augaaggccauccugcucgugcuucugugcaccuucgcugcaacaaacgccgacacuuuguguauuggcuaccacgcgaauaacagcacggauaccgucgacacaguuuuagagaaaaaugugacuguaacccauuccgugaaccugcuagaagauagacacaaugggaagcucugcaaacugggagguauagcuccccuucaucugggcaaguguaacaucgccgggugguugcucggaaauccugagugcgaacugcugcucacagucucuucauggaguuauauuguggagaccagcaacuccgacaauggcacuuguuacccaggugauuuuaucaacuaugaagaguuaagggagcagcugucuucgguuaguagcuucgaacgguuugagauuuucccgaaaacaaguuccuggcccaaucacgaaaccaaccgcggggugacggcagccugcccuuacgcuggagcaaauucuuuuuaucgaaaccuuaucugguuggucgagaagggcaauagcuacccaaagcuguccaaaucauaugugaacaacaagggcaaagaggugcuaguucucugggggauacaucaucccccuacuucaaccgaccaacagagccuguaccagaaugccgaugcuuacguguucgucggaucuuccaaguauaaccguaaauuuaagccagaaaucgccgcgagacccaaggugaggggucaggcaggccggaugaauuacuauuggacacuuauugagccuggggacacuaucaccuucgaagccacaggaaaccugguggucccacgcuacgcuuuugccaugaauagaggcucagguagcgggauuaucauaagugaugcaccgguucacgacuguaacaccaaaugccaaacgcccaagggagcuauuaauacuucuuugccuuuccagaacauccacccagugacaauuggcgagugucccaaauauguaaaguccaccaaacucaggauggccacuggccugcggaauaucccuagcauccagucgcgcggguuauuuggagcgauugccgguuucauagaaggcggguggacaggaaugaucgauggcugguacgguuaucaccaucagaacgagcaagggucuggcuacgcagcugaccagcgauccacccagaaugccauugauggaaucacgaacaagguaaauucagucauagagaaaaugaacacccaguuuacagcugugggcaaggaguucaaucaccuggaaaagagaauugaaaaccucaacaaaaagguugacgacggguuccuugauaucuggacuuacaaugccgagcuguuggugcuacuggaaaacgagaggacccucgacuuucacgauaguaaugucaaaaaccuguaugagaaggugcggagccaacuucguaauaacgcaaaagaaaucggaaaugguugcuucgaguuuuaccauaagugugacgauacaugcauggaauccguaaagaacggcacuuaugacuacccaaaauauucugaggaaagcaagcugaaucgcgaggagauugaugggguuaaauuggaaucaaccagaaucuaccagauucucgccauauauaguacaguggcuuccagccuggucuuacuggugucucuaggagcgaucucauucuggaugugcaguaacggcagccuccaguguaggauuugcaucuga

SEQ ID NO: 137880 - RNA, 1701 nt, Artificial Sequence
  derived and/or modified CDS sequence (opt3) from hemagglutinin__InfluenzaA__AGB97269
augaaggccauccuggugguccuccuuuacaccuucgcuacagcaaacgccgacacucugugcauuggcuaucacgcgaauaacagcacggauaccguugacacaguguuggagaaaaauauaacuguaacccauuccgugaacuuacuggaagauaagcacaaugggaaacuauguaagcucagaggagucgcuccccugcaucuugguaaaugcaacaucgccggcuggauucuggggaauccugagugugaaacauugucuaccgcaucaaguuggagcuacaucguggagacuuccucuucggacaacggaacaugcuauccaggcgauuuuauugacuacgaagaacucagggagcagcugucaagcguuaguuccuucgaacgguuugagaucuucccgaagaccucuagcuggcccaaucacgauuccaacaagggugugacggccgcuuguccucaugcaggggccaaaggauuuuauaagaaucugauauggcucgucaaaaagggcaacucauacccaaaauuaaguaagagcuauaucaaugacaagggcaaagaagugcugguacuuugggggauucaccaccccucuacuaccgcugaucaacaguccuuguaccagaacgccgacacauacguuuucgugggaacuucacgcuauagcaagaaauuuaagccugagaucgcgauucgaccaaaaguccgugaucaggaggguagaaugaauuacuauuggacccugguggaacccggcgacaagaucacauucgaggcaaccgggaaccuaguggucccuagguacgccuuugcuauggaacgggaugccggaaguggcauaauuaucucugacacgccaguucaugacugcaacacuacaugucaaaccccgaaaggugcaauuaauacuucccuccccuuccagaacauccacccuaucacaauugggaagugcccaaaguaugugaaaagcaccaagcugcgccuugcuacgggacugagaaauguacccucgauacagucuaggggcuuguuuggcgccaucgcgggguucauugagggagguuggaccggcaugguggaugggugguacggauaucaucaccagaacgaacaaggcuccgguuacgccgcagaccucaaaucaacacagaaugcuaucgauaagauaacuaacaaagucaauagugugauugagaagaugaacacccaguuuacagccguugggaaggaguucaaucaccuggaaaaacggaucgagaacuuaaauaagaaaguggacgauggcuuccuggacaucuggacuuacaacgcugaacuccuuguccuguuggagaaugaacgcacccuagauuaucaugacagcaacgugaagaaucuguacgagaaaguacgaaaccagcucaagaacaaugccaaggagauuggaaacggcuguuuugaguucuaucacaaaugcgauaauacauguauggaguccguuaagaacgggaccuacgacuauccuaaauacucugaagaggcaaagcugaauagagaagagaucgauggagugaaacuugagagcacuaggauuuaucaaauacuggccaucuacucaacggcugcgaguuccuugguccucguggucagccugggugcaauuucuuuuuggaugugcucaaacggcaguuuacagugccggaucuguaucuga

SEQ ID NO: 137881 - RNA, 1701 nt, Artificial Sequence; identical to SEQ ID NO: 136234
  derived and/or modified CDS sequence (opt3) from hemagglutinin__InfluenzaA__AGB97273

SEQ ID NO: 137882 - RNA, 1701 nt, Artificial Sequence
  derived and/or modified CDS sequence (opt3) from hemagglutinin__InfluenzaA__AGB97288
augaagaccaucauugcccugggcuacauacucugccuuguguucgcucagaaacugcccgggaacgacaauagcacagcaacuuuguguuuaggacaccaugccgucccuaacgguacgaucguuaagaccauuacaaaugauagaaucgaggugacuaacgcgaccgaacugguacaaaauuccucuauuggcgagaucugcgacucaccacaccagauacuagaugggaaaaacuguacacucaucgacgcucugcuuggagauccgcagugcgacggcuuucagaauaagaaaugggaucuguucauugaaaggaguaaggccuauagcaacuguuaccccuaugacgugccugauuacgcauccuugcggucucucgucgccucgucagguacccuggaguuuaauaacgagagcuucaauuggacuggggugacacaaaacggaaccaguuccgcuugcauccgccgaucuaauagcuccuuuuucucacgucugaacuggcucacgcauuuaaauuuuaaguauccagcacugaacguuacuaugcccaacaaugaacaguucgacaaacuuuacauuuggggcgugcaccauccuggcaccgauaaggaccagaucuuuuuguaugccaaaaguagcgggagaauaacagucucuacuaagaggucccagcaagcugugauuccaaacaucggaucacggccccgcauuagaaauaucccuagcaggaucaguauuuacuggaccauaguaaaaccaggugauauccugcuaauuaacucuacaggcaaucucaucgccccgcggggguacuucaagauacgcuccggaaagagcucgauuaugcgaucugacgcgcccaucggcaaauguaaguccgagugcaucaccccuaacgguucaauuccaaaugacaaacccuuucagaacguuaauagaaucacguauggggcauguccuagguacgugaagcagaguacucugaaacuugccacaggaaugcggaacgucccagaaaagcagacccguggcauuuucggcgcuauagccggguuuaucgagaauggaugggaagguaugguggauggcugguauggguuccgccaccaaaacagcgagggaagaggccaggcagcugaccugaaauccacucaggccgcgauugaucaaaucaaugguaaguugaacaggcucaucgggaagacaaaugagaaauuccaccagauugaaaaggaguuuucugaaguggagggccggauacaggaccuggaaaaauacgucgaggauaccaagaucgacuuauggagcuauaacgccgagcugcucguugcacuugaaaaccagcauacgauugaucugaccgacucagagaugaauaaauuguucgaaaagacaaagaaacaacuacgagagaacgcugaagauaugggaaauggcugcuuuaagaucuaccacaaaugugacaacgccugcauugggaguauccgcaauggaacuuaugaucauaacguguacagagacgaggcucugaauaacagguuccagauaaaggguguagagcucaaauccggcuacaaggacuggauccuguggauuagcuuugccaucucuugcuuccuucuguguguggcauugcucggguuuauuaugugggccugccagaagggaaauauccgguguaacauaugcauuuga

SEQ ID NO: 137883 - RNA, 1701 nt, Artificial Sequence
  derived and/or modified CDS sequence (opt3) from hemagglutinin__InfluenzaA__AGB97292
augaagaccaucauugcccugagcuacauacucugccuuguguucgcucaggagcugcccggcaacgacgauuccacagcaacuuuguguuuagggcaccaugccgucccuaauggaacgaucguuaaaaccauuacaaacgaccaaaucgaagugacuaaugcgaccgagcugguacagucuucaaguacaggugaaauuugcaacagcccacaccagauccuagauggcgagaauuguacccucauagacgcucugcuuggggauccgcagugcgacggauuucaaaacaagaaaugggaucuguucguggaaagauccaaggcccauucuaauuguuaucccuacgacgucccugauuaugcaucguugaggucacucguggccagcaguggcacucuggaguuuaacaaugaguccuucaacuggacagguguuacccagaaugggacgucuagcgcuugcauccggcgcuccaacaauucauuuuucagucgacugaacuggcucacucacuuaaauuuuaaauacccagcacugaacgugaccaugcccaacaaugaacaguucgacaaacuuuauauuuggggaguccaucacccuggcacagauaaggaccagaucuuuuuguacgcccaagcuagcggccguauuacugugucuaccaagagaucccagcaggccguaaucccaaacauagggucaaggccccggguucgcaauauuccuagcagagugaguaucuauuggacaauugucaagccaggagauauccugcuaaucaacucuaccgguaaucucauugcgccgaggggcuacuucaaaauacgguccggaaagagcucgaucaugcgcucugacgcacccauugggaaauguaacuccgccugcaucacgccuaauggcucaauaccaaacgacaagcccuuucagaaugugaaccgaauuacuuacggugcuuguccuagauaugugaagcaaaauacacugaaacuugccaccgggaugaggaacgucccagagaagcagacucggggaaucuucggcgcaaucgcuggcuuuauugaaaaugggugggagggaaugguugaugguugguacggcuuccgucaccagaacagugaggggcgcggacaagccgcggaccugaaaagcacacaggccgcaaucgaucagauuaauggcaaguugaacagacucauagguaaaaccaacgaaaaguuccaucagaucgagaaagaauuuuccgagguggaagggaggauucaagaccuggagaaguauguagaggauacgaagaucgacuuauggucuuacaaugcugaacugcucguggcccuugagaaccagcacaccaucgaucugacagacagcgaaaugaauaaauuguucgagaagacuaaaaagcagcuacgggaaaacgcugaggauaugggcaauggaugcuuuaaaauuuaucauaagugugacaacgccugcauaggcucaauccgaaaugggaccuacgaucacgacgucuaucgcgacgaggcacugaacaauagauuccagauuaagggaguggaacucaaaagugguuacaaggauuggauccuguggauuuccuuugccaucagcugcuuccuucuguguguugcuuugcucggcuuuauaaugugggcgugccaaaaagggaacaucagguguaauauuugcaucuga

SEQ ID NO: 137884 - RNA, 1701 nt, Artificial Sequence
  derived and/or modified CDS sequence (opt3) from hemagglutinin__InfluenzaA__AGB97300
augaagaccaucauugcccugagcuacauacucugccuuguguucgcucagaaacugcccggcaacgacaauuccacagcaacuuuguguuuagggcaccaugccgucccuaacggaacgaucguuaagaccauuacaaaugauagaaucgaggugacuaacgcgaccgaacugguacaaaauucuucaauuggugagaucugcgacaguccacaccagauacuagauggcgaaaacuguacacucaucgacgcucugcuuggggauccgcagugcgacggauuucagaauaaaaagugggaucuguucguggagaggagcaaagccuauuccaacuguuaccccuaugacgucccugauuacgcaucuuugcggucgcucguggccucaagcggcacccuggaauuuaauaacgagaguuucaauuggacugguguuacacaaaacgggaccuccucugcuugcauucgccgaagcaauuccucauuuuucagucgucugaacuggcucacgcauuuaaauuuuaaguauccagcacugaacgugacuaugcccaacaaugagcaguucgacaaguuguacaucuggggaguccaccauccuggcaccgauaaagaccagauuuuucuuuaugcccagagcucuggcagaaucacaguguccacuaagaggucacaacaggcuguaauaccaaacauugggagccggccccgcaucagaaauauuccuaguaggaucucuaucuacuggaccauuguuaaaccaggagauauacugcuaaucaacuccacagguaaucucauugccccgcggggcuacuucaagauccgcagcgggaaaucgucuauaaugcgauccgacgcgcccauuggaaaguguaagucagaaugcaucaccccuaacggcaguaucccaaaugacaaacccuuucagaacgugaauagaauuacguauggugcauguccuagguacgucaagcagagcacucugaaacuugccacagggaugcggaacgugccagagaagcaaacccguggaaucuucggcgcuauugccggcuuuauagaaaaugggugggagggaaugguggaugguugguauggcuuccgccaccagaacuccgaggggagaggacaggcagcugaccugaaaucuacucaagccgcgaucgaucagauuaauggcaaguugaacaggcucaucgguaaaacaaaugaaaaguuccaccagaucgagaaggaauuuagcgaggucgaagggcggauucaggaccuggagaaauacguugaggauaccaagauagacuuauggucauauaacgccgaacugcucguggcacuugagaaccaacauacgaucgaucugaccgacagugaaaugaauaaauuguucgagaagacacgaaaacagcuacgcgaaaacgcugaggauaugggcaauggaugcuuuaagauuuaccacaagugugacaacgccugcaucggcuccauuagaaaugggacuuaugaucaugacguauacagggacgaggcucugaacaaucgguuccagaucaaaggaguggaacucaagagcgguuacaaagauuggauacuguggaucucuuuugccauuucaugcuuccuucugugugucgcauugcucggcuuuaucaugugggccugccagaaggggaacauucgcuguaauaucugcauauga

SEQ ID NO: 137885 - RNA, 1701 nt, Artificial Sequence
  derived and/or modified CDS sequence (opt3) from hemagglutinin__InfluenzaA__AGE89267
augaaggccauccugauugugcuccuuuacaccuucgcuacagcaaacgccgacacucugugcauaggcuaucacgcgaauaacagcacggauaccgucgacacaguuuuggagaaaaaugugacuguaacccauuccguggauuuacuggaagacaagcacaacgggaaacuauguaagcucagaggagucgcuccccugcaucuugguaaaugcaauaucgccggcuggauucuggggaacccugagugugaaucuuugucaacagcaaguagcugguccuacaucguggagaccucuucgucagauaauggaacuugcuauccaggcgacuuuauugauuacgaagaacucagggagcagcugagcaguguuuccucuuucgaacgguuugagaucuucccgaagacaagcuccuggcccaaccacgacucaaauaagggugugaccgccgcuuguccucaugcaggggaaaagaguuuuuauaagaaccugauauggcucgucaaaaagggaaauagcuacccaaaauuaaacaagucuuauaucaaugauaagggcaaagaggugcugguacuuuggggcauucaccaccccuccacgucaacugaccaacagagcuuguaccagaacgccgaugcuuacguuuucguggggaccagucgcuauucuaagaaauuuaagccugagaucgccauucgaccaaaaguccgugaccaggaaggaagaaugaauuacuauuggacacugguggagcccggugauaagaucacuuucgaagcgaccggcaaccuaguggucccuagguacgcauuugccauggagcggaacgcuggguccggaauaauuaucagcgacacaccaauucaugacugcaauaccacgugucaaacuccgaaaggcgccaucaacacaucgcuccccuuccagaauauccacccuauuaccauagguaagugcccaaaguauguuaaaucuacuaagcugcgccuugcaacagggcugagaaacgugcccuccauccagucaaggggauuguuuggcgcuauugccggcuucaucgaagggggauggaccgguaugguagauggcugguacggguaucaucaccagaaugagcaaggaaguggcuacgcggccgaccucaaaagcacgcagaacgcaauagaugagauuaccaauaaggugaacuccgucaucgagaaaaugaauacacaguuuacugcuguggguaaggaguucaaccaccuggaaaagcggaucgagaauuuaaacaaaaagguugacgauggguuccuggacauuuggaccuacaaugccgaacuccuugugcuguuggagaacgagcgcacacuagauuaucaugacucuaaugucaaaaaccuguacgaaaaggugaaaagccagcucaagaacaaugcuaaggagaucggcaacggauguuuugaguucuaucacaaaugcgauaauacuuguauggaaucaguaaagaacggcaccuacgacuauccuaaauacagugaagaggccaagcugaaucgagagaaaauugaugggguuaaacuugaauccacaagaauauaucaaauccuggcaauuuacagcaccguggccucuucauugguccucguggucagucugggagcuaucagcuuuuggaugugcuccaacgguucuuuacagugcaggaucuguauuuga

SEQ ID NO: 137886 - RNA, 1701 nt, Artificial Sequence
  derived and/or modified CDS sequence (opt3) from hemagglutinin__InfluenzaA__AGE89277
augaaggccauccugauugugcuccuuuacaccuucgcuacagcaaacgccgacacucugugcauaggcuaucacgcgaauaacagcacggauaccgucgacacaguuuuggagaaaaaugugacuguaacccauuccguggauuuacuggaagacaagcacaacgggaaacuauguaagcucagaggagucgcuccccugcaucuugguaaaugcaauaucgccggcuggauucuggggaacccugagugugaaucuuugucaacagcaaguagcugguccuacaucguggagaccucuucgucagauaauggaacuugcuauccaggcgacuuuauugauuacgaagaacucagggagcagcugaacagcguuaguuccuucgaacgguuugagaucuucccgaagacaucuagcuggcccaaucacgacuccaacaagggugugaccgccgcuuguccucaugcaggggaaaaaucauuuuauaagaaucugauauggcucgucaaaaagggaaacaguuacccaaaauuaaauaagagcuauaucaacgauaagggcaaagaggugcugguacuuuggggcauucaccaccccucuacguccacugaccaacagucauuguaccagaaugccgaugcuuacguuuucguggggaccagccgcuauaguaagaaauuuaagccugagaucgccauucgaccaaaaguccgugaccaggaaggaagaaugaacuacuauuggacacugguggagcccggugauaagaucacuuucgaagcgaccggcaaccuaguggucccuagguacgcauuugccauggagcggaaugcugggucuggaauaauuaucuccgacacaccaauucaugacugcaacaccacgugucaaacuccgaaaggcgccaucaauacaagccuccccuuccagaacauccacccuauuaccauagguaagugcccaaaguauguuaaaucgacuaagcugcgccuugcaacagggcugagaaaugugcccucuauccaguccaggggauuguuuggcgcuauugccggcuucaucgaagggggauggaccgguaugguagauggcugguacggguaucaucaccagaacgagcaaggaucaggcuacgcggccgaccucaaaaguacgcagaaugcaauagaugagauuaccaacaaggugaauagcgucaucgaaaagaugaacacacaguuuacugcuguggguaaggaguucaaucaccuggaaaagcggaucgagaacuuaaauaaaaagguugacgauggguuccuggacauuuggaccuacaacgccgaacuccuugugcuguuggagaaugagcgcacacuagauuaucaugacuccaacgucaaaaaccuguacgaaaaggugaaaucucagcucaagaauaacgcuaaggagaucggcaauggauguuuugaguucuaucacaaaugcgauaacacuuguauggagagcguaaagaauggcaccuacgacuauccuaaauacucagaagaggccaagcugaaccgagagaaaauugaugggguuaaacuugaaaguacaagaauauaucaaauccuggcaauuuacuccaccguggccagcucuuugguccucguggucucacugggagcuaucaguuuuuggaugugcagcaaugguuccuuacagugcaggaucuguauuuga

SEQ ID NO: 137887 - RNA, 1701 nt, Artificial Sequence; identical to SEQ ID NO: 136404
  derived and/or modified CDS sequence (opt3) from hemagglutinin__InfluenzaA__AGE89287

SEQ ID NO: 137888 - RNA, 1701 nt, Artificial Sequence
  derived and/or modified CDS sequence (opt3) from hemagglutinin__InfluenzaA__AGE89298
augaaggccauccuggugguccuccuuuacaccuucgcuacagcaaacgccgacacucugugcauuggcuaucacgcgaauaacagcacggauaccguugacacaguguuggagaaaaauguaacugugacccauuccgucaacuuacuggaagauaagcacaaugggaaacuauguaagcucagaggaguggcuccccugcaucuugguaaaugcaacauagccggcuggauccuggggaauccugagugugaaucuuugucaacagcaaguagcugguccuacauuguugagaccucuucgucagacaacggaacuugcuauccaggcgauuuuaucgacuacgaagaacucagggagcagcugagcaguguguccucuuucgaacgguuugagauuuucccgaagacaagcuccuggcccaaucacgauucaaacaagggugucaccgccgcuuguccucaugcaggggccaaaggauuuuauaagaaucugaucuggcucgugaaaaagggcaacaguuacccaaaauuaagcaagucuuauauaaaugacaagggcaaagaaguacugguucuuugggggauccaccaccccuccacgacugcugaucaacagucauuguaccagaacgccgacaccuacguguucgucggaacaagccgcuauaguaagaaauuuaagccugagauugcgauccgaccaaaagugcgugaucaggaggguagaaugaauuacuauuggacucugguggaacccggcgacaagauuaccuucgaggcaacagggaaccuagucguuccuagguacgccuuugcuauggaacggaacgccggaucuggcaucauaauuuccgauaccccagugcaugacugcaauacgacuugucaaacaccgaaaggugcaaucaacaccagccuccccuuccagaauauucacccuaucacuaucgggaagugcccaaaguauguaaaaucgacaaagcugcgccuugcuaccggacugagaaacgugcccucuauucaguccaggggcuuguuuggcgccauagcgggguucaucgagggagguuggacgggcauggucgacgggugguacggauaucaucaccagaaugaacaaggcucagguuacgccgcagaucucaaaaguacccagaacgcuauugacaagaucacaaauaaagugaacagcguuauagagaagaugaauacucaguuuaccgccguggggaaggaguucaaccaccuggaaaaacggauugagaauuuaaacaagaaagucgaugacggcuuccuggauaucuggacauacaaugcugaacuccuugugcuguuggagaacgaacgcacucuagacuaucaugauuccaauguaaagaaccuguacgagaaaguucgaaaccagcucaagaauaacgccaaggagaucggaaauggcuguuuugaguucuaucacaaaugcgacaacaccuguauggagucugugaagaaugggacauacgauuauccuaaauacagcgaagaggcaaagcugaacagagaagagauugacggagucaaacuugagucaaccaggaucuaucaaauucuggccauauacaguacuguggcuuccagcuugauccucgucgugucucugggugcgauuucauuuuggaugugcaguaauggcagcuuacagugccggaucuguaucuga

SEQ ID NO: 137889 - RNA, 1701 nt, Artificial Sequence; identical to SEQ ID NO: 134957
  derived and/or modified CDS sequence (opt3) from hemagglutinin__InfluenzaA__AGE89308

SEQ ID NO: 137890 - RNA, 1701 nt, Artificial Sequence; identical to SEQ ID NO: 136399
  derived and/or modified CDS sequence (opt3) from hemagglutinin__InfluenzaA__AGE89318

SEQ ID NO: 137891 - RNA, 1701 nt, Artificial Sequence
  derived and/or modified CDS sequence (opt3) from hemagglutinin__InfluenzaA__AGE89329
augaagaccaucauugcccugagcuacauacucugccuuguguucgcucagaaacugcccggcaacgacgauuccacagcaacuuuguguuuagggcaccaugccgucccuaauggaacgaucguuaagaccauuacaaacgaccaaaucgaggugacuaaugcgaccgaacugguacagucuucaaguacaggugagauuugcaacagcccacaccagauccuagauggcgaaaauuguacccucauagacgcucugcuuggggauccgcagugcgacggauuucaaaacaaaaagugggaucuguucguggagagauccaaagcccauucuaauuguuaucccuacgacgucccugauuaugcaucguugaggucacucguggccagcaguggcacucuggaauuuaacaaugaguccuucaacuggacagguguuacccagaaugggacgucuagcgcuugcauccggcgcuccaacaauucauuuuucagucgacugaacuggcucacucacuuaaauuuuaaguacccagcacugaacgugaccaugcccaacaaugagcaguucgacaagcuguauauuuggggaguccaucacccuggcacagauaaagaccagaucuuuuuguacgcccaagcuagcggccguauuacugugucuaccaagagaucccagcaggccguaaucccaaacauagggucaaggccccggguucgcaauauuccuagcagagugaguaucuauuggacaauugucaaaccaggagauauccugcuaaucaacucuaccgguaaucucauugcgccgaggggcuacuucaagauacgguccgggaaaagcucgaucaugcgcucugacgcacccauuggaaaguguaacuccgccugcaucacgccuaauggcucaauaccaaacgacaagcccuuucagaaugugaaccgaauuacuuacggugcuuguccuagauaugugaaacaaaauacacugaaacuugccaccgggaugaggaacgucccagaaaaacagacucggggaaucuucggcgcaaucgcuggcuuuauugagaaugggugggaaggaaugguugaugguugguacggcuuccgucaccagaacagugaggggcgcggacaagccgcggaccuuaagagcacacaggccgcaaucgaucagauuaauggcaaauugaacagacucauagguaagaccaacgagaaauuccaucagaucgaaaaggaguuuuccgaaguggaggggaggauucaagaccuggaaaaguauguagaggauacgaaaaucgacuuauggucuuacaaugcugagcugcucguggcccuugaaaaccagcacaccaucgaucugacagacagcgagaugaauaaguuguucgaaaagacuaagaaacagcuacgggagaacgcugaagauaugggcaauggaugcuuuaagauuuaucauaagugugacaacgccugcauaggcucaauccgaaaugggaccuacgaucacgacgucuaucgcgacgaggcacugaacaauagauuccagauuaaaggaguggagcucaagagugguuacaaagauuggauccuguggauuuccuuugccaucagcugcuuccuucuguguguugcuuugcucggcuuuauaaugugggcgugccaaaaggggaacaucagguguaauauuugcaucuga

SEQ ID NO: 137892 - RNA, 1701 nt, Artificial Sequence; identical to SEQ ID NO: 134502
  derived and/or modified CDS sequence (opt3) from hemagglutinin__InfluenzaA__AGE89340

SEQ ID NO: 137893 - RNA, 1701 nt, Artificial Sequence; identical to SEQ ID NO: 136402
  derived and/or modified CDS sequence (opt3) from hemagglutinin__InfluenzaA__AGE89350

SEQ ID NO: 137894 - RNA, 1701 nt, Artificial Sequence
  derived and/or modified CDS sequence (opt3) from hemagglutinin__InfluenzaA__AGE89361
augaaggccauccuggugguccuccuuuacaccuucgcuacagcaaacgccgacacucugugcauuggcuaucacgcgaauaacagcacggauaccguugacacaguguuggagaaaaauguaacugugacccauuccgucaacuuacuggaagauaagcacaaugggaaacuauguaagcucagaggaguggcuccccugcaucuugguaaaugcaacauagccggcuggauccuggggaauccugagugugaaucuuugucaacagcaaguagcugguccuacauuguugagaccucuucgucagacaacggaacuugcuauccaggcgauuuuaucaauuacgaggagcucagggagcagcugagcaguguguccucuuucgaacgguuugagauuuucccgaagacaagcuccuggcccaaccacgacucaaauaagggugucaccgccgcuuguccucaugcaggggccaaaaguuuuuauaagaaccugaucuggcucgugaaaaagggaaauagcuacccaaaauuaucuaaguccuauauaaacgauaagggcaaagaaguacugguucuuuggggcauccaccaccccucaacgacuaccgaccaacagagcuuguaccagaaugcugaugccuacguguucgucgggacaagucgcuauucuaagaaauuuaagccugagauugcgauccgaccaaaagugcgugaccaggagggaagaaugaacuacuauuggacucugguggaacccggugauaagauuaccuucgaggcaacaggcaaccuagucguuccuagguacgccuuugcuauggaacggaaugccggguccggaaucauaauuagcgacaccccagugcaugauugcaacacgacuugucaaacaccgaaaggcgcaaucaauaccucgcuccccuuccagaacauucacccuaucacuaucgguaagugcccaaaguauguaaaaucuacaaagcugcgccuugcuaccgggcugagaaaugugcccuccauucagucaaggggauuguuuggcgccauagcgggcuucaucgaagggggauggacggguauggucgacggcugguacggguaucaucaccagaacgaacaaggaaguggcuacgccgcagaccucaaaagcacccagaaugcuauugauaagaucacaaacaaaguuaauuccgugauagagaagaugaacacucaguuuaccgccguggguaaggaguucaaucaccuggaaaaacggauugagaacuuaaauaagaaagucgacgauggguuccuggacaucuggacauacaacgcugaacuccuugugcuguuggagaaugaacgcacucuagauuaucaugacucuaacguaaagaaccuguacgagaaaguucgaaaucagcucaagaacaaugccaaggagaucggcaacggauguuuugaguucuaucacaaaugcgauaauaccuguauggaaagcgugaagaacggcacauacgacuauccuaaauacucagaagaggcaaagcugaauagagaagagauugauggggucaaacuugagaguaccaggaucuaucaaauucuggccauauacuccacuguggcuagcucuuugguccucgugguuucacugggagcgaucaguuuuuggaugugcagcaacgguuccuuacagugccggauuuguaucuga

SEQ ID NO: 137895 - RNA, 1701 nt, Artificial Sequence; identical to SEQ ID NO: 136399
  derived and/or modified CDS sequence (opt3) from hemagglutinin__InfluenzaA__AGE89371

SEQ ID NO: 137896 - RNA, 1701 nt, Artificial Sequence
  derived and/or modified CDS sequence (opt3) from hemagglutinin__InfluenzaA__AGE89382
augaaggccauccuggugguccuccuuuacaccuucgcuacagcaaacgccgacacucugugcauuggcuaucacgcgaauaacagcacggauaccguugacacaguguuggagaagaauguaacugugacccauuccgucaacuuacuggaagauaagcacaaugggaaacuauguaagcucagaggaguggcuccccugcaucuugguaaaugcaacauagccggcuggauccuggggaauccugagugugaaucuuugucaacagcaaguagcugguccuacauuguugagaccucuucgucagacaacggaacuugcuauccaggcgauuuuaucaauuacgaggaacucagggagcagcugagcaguguguccucuuucgaacgguuugagauuuucccgaagacaagcuccuggcccaaccacgacucaaauaagggugucaccgccgcuuguccucaugcaggggccaaaaguuuuuauaagaaccugaucuggcucgugaaaaagggaaauagcuacccaaaauuaucuaaguccuauauaaacgauaagggcaaagaaguacugguucuuuggggcauccaccaccccucaacgagcgcugaccaacagaguuuguaccagaaugccgaugcguacguguucgucgggacuucuaaguauuccaaaaaguuuaaaccugagauugcagugcgcccaaaggugcgagaccaggagggacguaugaacuacuauuggacccuggucaaacccggugauaagaucacauucgaagccacuggcaaccuacucguuccuagauacgcuuuugccauggagaggaaugcagggagcggaauuaucauaucggacaccccagugcaugauugcaacacaaccugucaaacgccgaagggcgcuauuaauacuucucugcccuuccagaacauccacccuauuacaaucgguaaaugcccaaaguauguaaaauccaccaaacuucggcuggccacuggguugcgcaaugugcccucaauccagaguagaggacucuuuggcgcgauugccggcuucauagaagggggauggacagguauggucgacggcugguacggguaucaucaccagaacgagcaaggaagcggcuacgcagcugaccugaaauccacccagaaugccaucgauaagauuacgaacaagguuaauucugugaucgaaaagaugaacacccaguuuacagcuguggguaaggaguucaaucacuuagagaaaaggauagaaaaccugaauaagaaagucgacgauggguuccucgacauuuggacuuacaacgccgagcuucugguguugcuagaaaaugagcggacccuggauuaucaugacagcaacguaaagaaccucuacgaaaagguucgcucacagcugaaaaauaacgcaaaggagaucggcaauggauguuuugaguucuaucacaaaugcgauaacacauguauggaaagugugaagaauggcacuuacgacuauccuaaauacuccgaggaagccaaacuuaaccgagaggaaaucgauggggucaagcuggagagcaccagaauuuaucaaaucuuggcuauuuacucuacaguggcgucaagucucguccuggugguuagcuuaggagcaauauccuuuuggaugugcucuaaugguucgcugcagugcaggaucuguauuuga

SEQ ID NO: 137897 - RNA, 1701 nt, Artificial Sequence
  derived and/or modified CDS sequence (opt3) from hemagglutinin__InfluenzaA__AGE89392
augaagaccaucauugcccugagcuacauacucugccuuguguucgcucaggagcugcccggcaacgacaauuccacagcaacuuuguguuuagggcaccaugccgucccuaacggaacgaucguuaaaaccauuacaaaugaucaaaucgaagugacuaacgcgaccgagcugguacagucuucaaguacaggugaaauuugcaauagcccacaccagauccuagacggcgagaacuguacccucauagaugcucugcuuggggacccgcagugcgauggauuucaaaauaagaaaugggaccuguucguggaaagauccaaggcccauucuaacuguuaucccuacgaugucccugacuaugcaucguugaggucacucguggccagcaguggcacucuggaguuuaauaacgaguccuucaauuggacagguguuacccagaacgggacgucuagcgcuugcauccggcgcuccaauaacucauuuuucagucgacugaauuggcucacucacuuaaacuuuaaauacccagcacugaacgugaccaugcccaauaacgaacaguucgauaaacuuuauauuuggggaguccaucacccuggcacagacaaggaucagaucuuuuuguacgcccaagcuagcggccguauuacugugucuaccaagagaucccagcaggccguaaucccaaauauagggucaaggccccggguucgcaacauuccuagcagagugaguaucuauuggacaauugucaagccaggagacauccugcuaaucaauucuaccgguaaccucauugcgccgaggggcuacuucaaaauacgguccggaaagagcucgaucaugcgcucugaugcacccauugggaaauguaauuccgccugcaucacgccuaacggcucaauaccaaaugacaagcccuuucagaacgugaaucgaauuacuuacggugcuuguccuagauaugugaagcaaaacacacugaaacuugccaccgggaugaggaaugucccagagaagcagacucggggaaucuucggcgcaaucgcuggcuuuauugaaaacgggugggagggaaugguugacgguugguacggcuuccgucaccagaauagugaggggcgcggacaagccgcggaucugaaaagcacacaggccgcaaucgaccagauuaacggcaaguugaacagacucauagguaaaaccaaugaaaaguuccaucagaucgagaaagaauuuuccgagguggaagggaggauucaagaucuggagaaguauguagaggacacgaagaucgauuuauggucuuacaacgcugaacugcucguggcccuugagaaucagcacaccaucgaccugacagauagcgaaaugaacaaauuguucgagaagacuaaaaagcagcuacgggaaaaugcugaggacaugggcaacggaugcuuuaaaauuuaucauaagugugauaaugccugcauaggcucaauccgaaacgggaccuacgaccacgaugucuaucgcgacgaggcacugaauaacagauuccagauuaagggaguggaacucaaaagugguuacaaggacuggauccuguggauuuccuuugccaucagcugcuuccuucuguguguugcuuugcucggcuuuauaaugugggcgugccaaaaagggaauaucagguguaacauuugcaucuga

SEQ ID NO: 137898 - RNA, 1701 nt, Artificial Sequence; identical to SEQ ID NO: 137885
  derived and/or modified CDS sequence (opt3) from hemagglutinin__InfluenzaA__AGE89422

SEQ ID NO: 137899 - RNA, 1701 nt, Artificial Sequence; identical to SEQ ID NO: 136382
  derived and/or modified CDS sequence (opt3) from hemagglutinin__InfluenzaA__AGE89719

SEQ ID NO: 137900 - RNA, 1701 nt, Artificial Sequence
  derived and/or modified CDS sequence (opt3) from hemagglutinin__InfluenzaA__AGE89730
augaaggccauccuggugguccuccuuuacaccuucgcuacagcaaacgccgacacucugugcauuggcuaucacgcgaauaacagcacggauaccguugacacaguguuggagaaaaauguaacugugacccauuccgucaacuuacuggaagauaagcacaaugggaaacuauguaagcucagaggaguggcuccccugcaucuugguaaaugcaacauagccggcuggauccuggggaauccugagugugaaucuuugucaacagcaaguagcugguccuacauuguugagaccucuucgucagacaacggaacuugcuauccaggcgauuuuaucaauuacgaggagcucagggagcagcugagcaguguguccucuuucgaacgguuugagauuuucccgaagacaagcuccuggcccaaccacgacucaaauaagggugucaccgccgcuuguccucaugcaggggccaaaaguuuuuauaagaaccugaucuggcucgugaaaaagggaaauagcuacccaaaauuaucuaaguccuauauaaacgauaagggcaaagaaguacugguucuuuggggcauccaccaccccucaacgagcgcugaccaacagaguuuguaccagaaugccgaugcguacguguucgucgggacuucuaaguauuccaaaaaguuuaaaccugagauugcagugcgcccaaaggugcgagaccaggagggacguaugaacuacuauuggacccuggucgaacccggugauaaaaucacauucgaggccacuggcaaccuacucguuccuagauacgcuuuugccauggaaaggaaugcagggagcggaauuaucauaucggacaccccagugcaugauugcaacacaaccugucaaacgccgaagggcgcuauuaauacuucucugcccuuccagaacauccacccuauuacaaucgguaagugcccaaaauauguaaaguccaccaaacuucggcuggccacuggguugcgcaaugugcccucaauccagaguagaggacucuuuggcgcgauugccggcuucauagaagggggauggacagguauggucgacggcugguacggguaucaucaccagaacggacaaggcagcgguuacgcagcugaccugaaguccacccagaaugccaucgauaaaauuacgaacaagguaaauucuguuaucgaaaagaugaacacccaguuuacagcuguggggaaagaguucaaucacuuagagaagaggauagaaaaccugaauaaaaaggucgacgauggcuuccucgacauuuggacuuacaacgccgagcuucugguguugcuagaaaaugagcggacccuggauuaucaugacagcaacgugaaaaaccucuacgaaaagguucgcucacagcugaagaauaacgcaaaagagaucggaaauggcuguuuugaguucuaucacaagugcgauaacacauguauggaaagugugaaaaaugggacuuacgacuauccuaaguacuccgaggaagccaaacuuaaccgagaggaaaucgauggagucaagcuggagagcaccagaauuuaucaaaucuuggcuauuuacucuacaguggcgucaagucucguccuggugguuagcuuaggugcaauauccuuuuggaugugcucuaauggcucgcugcagugcaggaucuguauuuga

SEQ ID NO: 137901 - RNA, 1701 nt, Artificial Sequence; identical to SEQ ID NO: 136399
  derived and/or modified CDS sequence (opt3) from hemagglutinin__InfluenzaA__AGE89740

SEQ ID NO: 137902 - RNA, 1701 nt, Artificial Sequence
  derived and/or modified CDS sequence (opt3) from hemagglutinin__InfluenzaA__AGE89751
augaagaccaucauugcccugagcuacauacucugccuuguguucgcucagaaacugcccggcaacgacaauuccacagcaacuuuguguuuagggcaccaugccgucccuaacggaacgaucguuaagaccauuacaaaugaucaaaucgaggugacuaacgcgaccgaacugguacagucuucaagugcuggugagauuugcgacagcccacaccauauccuagauggcgaaaauuguacacucauagacgcccugcuuggggauccgcagugcgacggauuucagaacaaaaagugggaucuguucguggagagauccagggcauauucuaauuguuaccccuaugacgucccugauuacgccucguugcggucacucguggcuagcaguggcacccuggaauuuaacaaugaguccuucaacuggacugguguuacacaaaaugggaccucuagcgcaugcauccgccgauccaacaauucauuuuucagucgucugaacuggcucacgcacuuaaauuuuaaauauccagcccugaacgugacuaugcccaacaaugagcaguucgacaaacuuuacauuuggggaguccaucacccuggcaccgauaaggaccagaucuuuuuguaugcucaggccagcggcagaauuacagugucuacuaaaaggucccaacaggcgguaaucccaaacauagggucacggccccgcguuagaaauauuccuagcaggaucaguauuuacuggaccaucgugaagccaggagauauccugcuaauuaacucuacagguaaucucauagcaccgcggggcuacuucaaaauccgcuccggaaagagcucgauuaugcgaucugacgcccccaucgggaaauguaacuccgaaugcauaaccccuaauggcucaauuccaaacgacaagcccuuucagaaugucaacagaaucacguauggugcuuguccuagguacgugaagcagaguacucugaaacuugccacagggaugcggaaugugccagagaagcaaacccguggaaucuucggcgcaauugcuggcuuuaucgaaaacgggugggagggaaugauggaugguugguauggcuuccgccaccagaauagcgaggggagaggacaggccgcggaccugaaauccacucaagccgcaauugaucagauaaacggcaaguugaauaggcucaucgguaaaacaaacgaaaaguuccaucagauugagaaagaauuuucugaggucgaagggcggauccaggaccuggagaaguacguugaggauaccaagaucgacuuauggagcuauaacgcugaacugcucguggccauggagaaucaacacacgauugaucuuaccgacucagaaaugaacaaacuguucgagaagacaaagaagcaguugcgagaaaaugcugaggauaugggcaacggaugcuuuaaaauauaccauaagugugacaaugccugcaucggcaguauucgcaacgggacuuaugaucacgacguauacagagacgaggcacuauccaauagguuccagaucaagggaguggaacugaaaagcgguuacaaggauuggauucucuggaucucuuuugccauaucaugcuuccugcuuugugucgcucuguugggcuuuaucaugugggcgugccagaaagggaacauucgguguaauaucugcauuuga

SEQ ID NO: 137903 - RNA, 1701 nt, Artificial Sequence; identical to SEQ ID NO: 136402
  derived and/or modified CDS sequence (opt3) from hemagglutinin__InfluenzaA__AGE89762

SEQ ID NO: 137904 - RNA, 1701 nt, Artificial Sequence
  derived and/or modified CDS sequence (opt3) from hemagglutinin__InfluenzaA__AGF44891
augaaggccauccuggugguccuccuuuacaccuucgcuacagcaaacgccgacacucugugcauuggcuaucacgcgaauaacagcacggauaccguugacacaguguuggagaaaaauguaacugugacccauuccgucaacuuacuggaagauaagcacaaugggaaacuauguaagcucagaggaguggcuccccugcaucuugguaaaugcaacauagccggcuggauccuggggaauccugagugugaaucuuugucaacagcaaguagcugguccuacauuguugagaccucuucgucagacaacggaacuugcuauccaggcgauuuuaucaauuacgaagaacucagggagcagcugagcaguguguccucuuucgaacgguuugagauuuucccgaagacaagcuccuggcccaaccacgacucaaauaagggugucaccgccgcuuguccucaugcaggggccaaaaguuuuuauaagaaccugaucuggcucgugaaaaagggaaauagcuacccaaaauuaucuaaguccuauauaaacgauaagggcaaagaaguacugguucuuuggggcauccaccaccccucaacgacugcugaccaacagagcuuguaccagaaugccgaugcguacguguucgucgggaccagucgcuauucuaagaaauuuaagccugagauugcaauccgaccaaaagugcgugaccaggagggaagaaugaacuacuauuggacacugauugaacccggugauaagaucacuuucgaggccaccggcaaccuaguggucccuagguacgcuuuugccauggaacggaaugcaggguccggaauaauuaucagcgacacaccaguucaugauugcaacaccacgugucaaacuccggagggcgcuauuaauacaucgcuccccuuccagaacauccacccuaucaccauugguaaaugcccaaaguaugugaagucuacuaaacugcgccuugccacagggcugagaaauguacccuccauacagucaaggggauuguuuggcgcgaucgccggcuucauugaagggggauggaccgguaugguggacggcugguacggguaucaucaccagaacgagcaaggaaguggcuacgcagcugaccucaagagcacgcagaaugccgucgauaaaaucaccaacaagguaaauuccguuauagagaaaaugaacacacaguuuacugcuguggguaaggaguucaaucaccuggagaagcggauugaaaacuuaaauaaaaaggucgacgauggguuccuggacaucuggaccuacaacgccgagcuccuugugcuguuggaaaaugagcgcacacuagauuaucaugacucuaacgugaaaaaccuguacgagaagguucgaaaucagcucaaaaacaaugcaaaggaaaucggcaacggauguuuugaguucuaucacaagugcgauaauacuuguauggaaagcgugaaaaacggcaccuacgacuauccuaaguacucagaggaagccaaacugaauagagagaagauugauggggucaaacuugagaguacaaggaucuaucaaauucuggcuauauacuccaccguggcgagcucuuugguccucgugguuucacugggagcaaucaguuuuuggaugugcagcaacgguuccuuacagugccggauuuguaucuga

SEQ ID NO: 137905 - RNA, 1701 nt, Artificial Sequence; identical to SEQ ID NO: 137904
  derived and/or modified CDS sequence (opt3) from hemagglutinin__InfluenzaA__AGF44892

SEQ ID NO: 137906 - RNA, 1701 nt, Artificial Sequence
  derived and/or modified CDS sequence (opt3) from hemagglutinin__InfluenzaA__AGF44895
augaagaccaucauugcccugagcuacauacucugccuuguguucgcucagaaacugcccggcaacgacaauuccacagcaacuuuguguuuagggcaccaugccgucccuaacggaacgaucguuaagaccauuacaaaugauagaaucgaggugacuaacgcgaccgaacugguacaaaauucuucaauuggugagaucugcgacaguccacaccagauacuagauggcgaaaacuguacacucaucgacgcucugcuuggggauccgcagugcgacggauuucagaauaaaaagugggaucuguucguggagaggagcaaagccuauuccaacuguuaccccuaugacgucccugauuacgcaucuuugcggucgcucguggccucaagcggcacccuggaauuuaauaacgagaguuucaauuggacugguguuacacaaaacgggaccuccucugcuugcauucgccgaagcaauuccucauuuuucagucgucugaacuggcucacgcauuuaaauuuuaaguauccagcacugaacgugacuaugcccaacaaugagcaguucgacaaacuuuacaucuggggaguccaccauccuggcaccgauaaagaccagaucuuuuuguaugcccagagcucuggcagaauuacaguguccacuaagaggucacaacaggcuguaauaccaaacauugggagccggccccgcaucagaaauauuccuaguaggaucucuaucuacuggaccauuguuaaaccaggagauauacugcuaaucaacuccacagguaaucucauugccccgcggggcuacuucaagauccgcagcgggaaaucgucuauaaugcgauccgacgcgcccauuggaaaguguaagucagaaugcaucaccccuaacggcaguaucccaaaugacaaacccuuucagaacgugaauagaauuacguauggugcauguccuagguacgucaagcagagcacucugaaacuugccacagggaugcggaacgugccagagaagcaaacccguggaaucuucggcgcuauugccggcuuuauagaaaaugggugggagggaaugguggaugguugguauggcuuccgccaccagaacuccgaggggagaggacaggcagcugaccugaaaucuacucaagccgcgaucgaucagauuaauggcaaguugaacaggcucaucgguaaaacaaaugaaaaguuccaccagaucgagaaggaauuuagcgaggucgaagggcggauucaggaccuggagaaauacguugaggauaccaagauagacuuauggucauauaacgccgaacugcucguggcacuugagaaccaacauacgaucgaucugaccgacagugaaaugaauaaauuguucgagaagacaaagaagcagcuacgagaaaacgcugaggauaugggcaauggaugcuuuaagauuuaccacaaaugugacaacgccugcaucggcuccauucgcaaugggacuuaugaucauaacguauacagagacgaggcucugaauaacagguuccagaucaagggaguggaacucaaaagcgguuacaaggacuggauacuguggaucucuuuugccauuucaugcuuccuucugugugucgcauugcucggcuuuaucaugugggccugccagaaagggaauauucgguguaacaucugcauauga

SEQ ID NO: 137907 - RNA, 1701 nt, Artificial Sequence; identical to SEQ ID NO: 137883
  derived and/or modified CDS sequence (opt3) from hemagglutinin__InfluenzaA__AGF44896

SEQ ID NO: 137908 - RNA, 1701 nt, Artificial Sequence
  derived and/or modified CDS sequence (opt3) from hemagglutinin__InfluenzaA__AGF44897
augaagaccaucauugcccugagcuacauacucugccuuguguucgcucaggagcugcccggcaacgacgauuccacagcaacuuuguguuuagggcaccaugccgucccuaauggaacgaucguuaaaaccauuacaaacgaccaaaucgaagugacuaaugcgaccgagcugguacagucuucaaguacaggugaaauuugcaacagcccacaccagauccuagauggcgagaauuguacccucauagacgcucugcuuggggauccgcagugcgacggauuucaaaacaagaaaugggaucuguucguggaaagauccaaggcccauucuaauuguuaucccuacgacgucccugauuaugcaucguugaggucacucguggccagcaguggcacucuggaguuuaacaaugaguccuucaacuggacagguguuacccagaaugggacgucuagcgcuugcaugcggcgcuccaacaauucauuuuucagucgacugaacuggcucacucacuuaaauuuuaaauacccagcacugaacgugaccaugcccaacaaugaacaguucgacaaguuguauaucuggggaguccaucacccuggcacagauaaggaccagauuuuucuuuacgcccaagcuagcggccguaucacugugucuaccaaaagaucccagcaggccguaauuccaaacaucgggucaaggccccggguucgcaauauaccuagcagagugaguauuuauuggacaaucgucaagccaggagauauucugcuaaucaacucuaccgguaaucucaucgcgccgaggggcuacuucaaaauucaguccggaaagagcucgauaaugcggucugacgcacccaucgggaaauguaacuccgccugcauuacgccuaauggcucaaucccaaacgacaagcccuuucaaaaugugaaccgcauaacuuacggugcuuguccucgauaugugaagcagaauacacugaaacuugccaccgggaugagaaacgucccagagaagcagacuaggggaauuuucggcgcaaucgcuggcuuuaucgaaaaugggugggagggaaugguugaugguugguacggcuuccggcaccaaaacagugaggggcguggacaggccgcggaccugaaaagcacacaggccgcaauugaucagaucaauggcaaguugaaccgccucauugguaaaaccaacgaaaaguuccaucaaauagagaaagaauuuuccgagguggaagggagaauccaggaccuggagaaguauguagaggauacgaagauugacuuauggucuuacaaugcugaacugcucguggcccuugagaaccagcacaccaucgaucugacagacagcgaaaugaauaaauuguucgagaagacuaaaaagcagcuaagggaaaacgcugaggauaugggcaauggaugcuuuaaaaucuaucauaagugugacaacgccugcauuggcucaauacggaaugggaccuacgaucacgacgucuaucgagacgaggcacugaacaaucgcuuccaaaucaagggaguggaacucaaaagugguuacaaggauuggauucuguggaucuccuuugccauuagcugcuuccuucuguguguugcuuugcucggcuuuaucaugugggcgugccagaaagggaacauaagauguaauaucugcauuuga

SEQ ID NO: 137909 - RNA, 1701 nt, Artificial Sequence; identical to SEQ ID NO: 137906
  derived and/or modified CDS sequence (opt3) from hemagglutinin__InfluenzaA__AGF44900

SEQ ID NO: 137910 - RNA, 1701 nt, Artificial Sequence; identical to SEQ ID NO: 137906
  derived and/or modified CDS sequence (opt3) from hemagglutinin__InfluenzaA__AGF44901

SEQ ID NO: 137911 - RNA, 1701 nt, Artificial Sequence; identical to SEQ ID NO: 137906
  derived and/or modified CDS sequence (opt3) from hemagglutinin__InfluenzaA__AGF44902

SEQ ID NO: 137912 - RNA, 1701 nt, Artificial Sequence; identical to SEQ ID NO: 137906
  derived and/or modified CDS sequence (opt3) from hemagglutinin__InfluenzaA__AGF44903

SEQ ID NO: 137913 - RNA, 1701 nt, Artificial Sequence; identical to SEQ ID NO: 137906
  derived and/or modified CDS sequence (opt3) from hemagglutinin__InfluenzaA__AGF44904

SEQ ID NO: 137914 - RNA, 1701 nt, Artificial Sequence
  derived and/or modified CDS sequence (opt3) from hemagglutinin__InfluenzaA__AGF44905
augaagaccaucauugcccugagcuacauacucugccuuguguucgcucagaaacugcccggcaacgacaauuccacagcaacuuuguguuuagggcaccaugccgucccuaacggaacgaucguuaagaccauuacaaaugauagaaucgaggugacuaacgcgaccgaacugguacaaaauucuucaauuggugagaucugcgacaguccacaccagauacuagauggcgaaaacuguacacucaucgacgcucugcuuggggauccgcagugcgacggauuucagaauaaaaagugggaucuguucguggagaggagcaaagccuauuccaacuguuaccccuaugacgucccugauuacgcaucuuugcggucgcucguggccucaagcggcacccuggaauuuaauaacgagaguuucaauuggacugguguuacacaaaacgggaccuccucugcuugcauucgccgaagcaauuccucauuuuucagucgucugaacuggcucacgcauuuaaauuuuaaguauccagcacugaacgugacuaugcccaacaaugagcaguucgacaaacuuuacaucuggggaguccaccauccuggcaccgauaaagaccagaucuuuuuguaugcccagagcucuggcagaauuacaguguccacuaagaggucacaacaggcuguaauaccaaacauugggagccggccccgcaucagaaauauuccuaguaggaucucuaucuacuggaccauuguuaaaccaggagauauacugcuaaucaacuccacagguaaucucauugccccgcggggcuacuucaagauccgcagcgggaaaucgucuauaaugcgauccgacgcgcccauuggaaaguguaagucagaaugcaucaccccuaacggcaguaucccaaaugacaaacccuuucagaacgugaauagaaacacguauggugcauguccuagguacgucaagcagagcacucugaaacuugccacagggaugcggaaugugccagagaagcaaacccguggaauuuucggcgcuaucgccggcuuuauugaaaacgggugggagggaaugguggaugguugguauggcuuccgccaccaaaauuccgaggggagaggacaggcagcugaccugaaaucuacucaggccgcgauagaucagaucaacggcaaguugaauaggcucauugguaaaacaaacgaaaaguuccaccagaucgagaaggaauuuagcgaggucgaagggcggauccaggaccuggagaaauacguugaggauaccaagauugacuuauggucauauaacgccgaacugcucguggcacuugagaaucaacauacgauagaucugaccgacagugaaaugaacaaauuguucgagaagacaaagaagcagcuacgagaaaaugcugaggauaugggcaacggaugcuuuaagaucuaccacaaaugugacaaugccugcauuggcuccauccgcaacgggacuuaugaucauaauguauacagagacgaggcucugaacaauagguuccagauuaagggaguggaacucaaaagcgguuacaaggacuggauccuguggauaucuuuugccaucucaugcuuccuucugugugucgcauugcucggcuuuauuaugugggccugccagaaagggaacauccgguguaauauuugcaucuga

SEQ ID NO: 137915 - RNA, 1701 nt, Artificial Sequence; identical to SEQ ID NO: 137906
  derived and/or modified CDS sequence (opt3) from hemagglutinin__InfluenzaA__AGF44906

SEQ ID NO: 137916 - RNA, 1701 nt, Artificial Sequence
  derived and/or modified CDS sequence (opt3) from hemagglutinin__InfluenzaA__AGF44908
augaagaccaucauugcccugagcuacauacucugccuuguguucgcucagaaacugcccggcaacgacaauuccacagcaacuuuguguuuagggcaccaugccgucccuaacggaacgaucguuaagaccauuacaaaugauagaaucgaggugacuaacgcgaccgaacugguacaaaauucuucaauuggugagaucugcgacaguccacaccagauacuagauggcgaaaacuguacacucaucgacgcucugcuuggggauccgcagugcgacggauuucagaauaaaaagugggaucuguucguggagaggagcaaagccuauuccaacuguuaccccuaugacgucccugauuacgcaucuuugcggucgcucguggccucaagcggcacccuggaauuuaauaacgagaguuucaauugggcugguguuacucaaaacgggacauccucugcaugcauucgcggaagcaauuccucauuuuucagucgacugaacuggcucacccauuuaaauuuuaaguauccagcccugaacgugacgaugcccaacaaugagcaguucgacaaguuguacaucuggggcguccaccauccuggcacugauaaagaccagauuuuucuuuaugcucagagcucugggcguaucaccguguccacaaagagaucacaacaggccguaauaccaaacauuggaagcaggccccggauccgcaauauuccuaguagaaucucuaucuacuggacuauuguuaaaccaggugauauacugcuaaucaacuccaccggcaaucucauugcgccgaggggguacuucaagauccggagcggaaaaucgucuauaaugcgcuccgacgcacccauuggcaaguguaagucagaaugcaucacaccuaacgguaguaucccaaaugacaaacccuuucagaacgugaaucgaauuaccuauggggccuguccuagauacgucaagcagagcacgcugaaacuugcuacuggaaugaggaacgugccagagaagcaaacacggggcaucuucggcgccauugcaggguuuauagaaaauggaugggaggguaugauggauggcugguauggguuccgucaccagaacuccgagggacgcggccaggcugccgaccugaaaucuacccaagcggccaucgaucagauuaaugguaaguugaacagacucaucgggaaaacuaaugaaaaguuccaccagaucgagaaggaauuuagcgagguggaaggcaggauucaggaccuggagaaauacgucgaggauacaaagauagacuuauggucauauaacgcagaacugcucguugcucuugagaaccaacauaccaucgaucugacggacagugaaaugaauaaauuguucgagaagaccaaaaagcagcuacgggaaaacgccgaggauaugggaaauggcugcuuuaagauuuaccacaaaugugacaacgcuugcaucggguccauucgaaauggaacauaugaucaugacguguaccgcgacgaggcccugaacaauagauuccagaucaaggguguagaacucaaaagcggcuacaaggauuggauacuguggaucucuuuugcaauuucaugcuuccuucuguguguggccuugcucggguuuaucaugugggcuugccagaaaggaaacauuagguguaauaucugcauauga

SEQ ID NO: 137917 - RNA, 1701 nt, Artificial Sequence; identical to SEQ ID NO: 137906
  derived and/or modified CDS sequence (opt3) from hemagglutinin__InfluenzaA__AGF44909

SEQ ID NO: 137918 - RNA, 1701 nt, Artificial Sequence; identical to SEQ ID NO: 137906
  derived and/or modified CDS sequence (opt3) from hemagglutinin__InfluenzaA__AGF44910

SEQ ID NO: 137919 - RNA, 1701 nt, Artificial Sequence
  derived and/or modified CDS sequence (opt3) from hemagglutinin__InfluenzaA__AGF44911
augaagaccaucauugcccugagcuacauacucugccuuguguucgcucagaaacugcccggcaacgacaauuccacagcaacuuuguguuuagggcaccaugccgucccuaacggaacgaucguuaagaccauuacaaaugauagaaucgaggugacuaacgcgaccgaacugguacaaaauucuucaauuggugagaucugcgacaguccacaccagauacuagauggcgaaaacuguacacucaucgacgcucugcuuggggauccgcagugcgacggauuucagaauaaaaagugggaucuguucguggagaggagcaaagccuauuccaacuguuaccccuaugacgucccugauuacgcaucuuugcggucgcucguggccucaagcggcacccuggaauuuaauaacgagaguuucaauugggcugguguuacucaaaacgggacauccucugcaugcauucgcggaagcaauuccucauuuuucagucgacugaacuggcucacccauuuaaauuuuaaguauccagcccugaacgugacgaugcccaacaaugagcaguucgacaaguuguacaucuggggcguccaccauccuggcacugauaaagaccagauuuuucuuuaugcucagagcucugggcguaucaccguguccacaaagagaucacaacaggccguaauaccaaacauuggaagcaggccccggauccgcaauauuccuaguagaaucucuaucuacuggacuauuguuaaaccaggugauauacugcuaaucaacuccaccggcaaucucauugcgccgaggggguacuucaagauccggagcggaaaaucgucuauaaugcgcuccgacgcacccauuggcaaguguaagucagaaugcaucacaccuaacgguaguaucccaaaugacaaacccuuucagaacgugaaucgaauuaccuauggggccuguccuagauacgucaagcagagcacgcugaaacuugcuacuggaaugaggaacgugccagagaagcaaacacggggcaucuucggcgccauugcaggguuuauagaaaauggaugggaggguaugguggauggcugguauggguuccgucaccagaacuccgagggacgcggccaggcugccgaccugaaaucuacccaagcggccaucgaucagauuaaugguaaguugaacagacucaucgggaaaacuaaugaaaaguuccaccagaucgagaaggaauuuagcgaggucgaaggcaggauucaggaccuggagaaauacguugaggauacaaagauagacuuauggucauauaacgcagaacugcucguggcucuugagaaccaacauaccaucgaucugacggacagugaaaugaauaaauuguucgagaagaccaaaaagcagcuacgggaaaacgccgaggauaugggaaauggcugcuuuaagauuuaccacaaaugugacaacgcuugcaucggguccauucgaaauggaacauaugaucaugacguauaccgcgacgaggcccugaacaauagauuccagaucaaggguguggaacucaaaagcggcuacaaggauuggauacuguggaucucuuuugcaacuucaugcuuccuucugugugucgccuugcucggguuuauuaugugggcuugccagaaaggaaacaucagguguaauauuugcaucuga

SEQ ID NO: 137920 - RNA, 1701 nt, Artificial Sequence; identical to SEQ ID NO: 137906
  derived and/or modified CDS sequence (opt3) from hemagglutinin__InfluenzaA__AGF44912

SEQ ID NO: 137921 - RNA, 1701 nt, Artificial Sequence; identical to SEQ ID NO: 137906
  derived and/or modified CDS sequence (opt3) from hemagglutinin__InfluenzaA__AGF44913

SEQ ID NO: 137922 - RNA, 1701 nt, Artificial Sequence
  derived and/or modified CDS sequence (opt3) from hemagglutinin__InfluenzaA__AGF44914
augaagaccaucauugcccugagcuacauacucugccuuguguucgcucagaaacugcccggcaacgacaauuccacagcaacuuuguguuuagggcaccaugccgucccuaacggaacgaucguuaagaccauuacaaaugauagaaucgaggugacuaacgcgaccgaacugguacaaaauucuucaauuggugagaucugcgacaguccacaccagauacuagauggcgaaaacuguacacucaucgacgcucugcuuggggauccgcagugcgacggauuucagaauaaaaagugggaucuguucguggagaggagcaaagccuauuccaacuguuaccccuaugacgucccugauuacgcaucuuugcggucgcucguggccucaagcggcacccuggaauuuaauaacgagaguuucaauuggacugguguuacacaaaacgggaccuccucugcuugcauucgccgaagcaauuccucauuuuucagucgucugaacuggcucacgcauuuaaauuuuaaguauccagcacugaacgugacuaugcccaacaaugagcaguucgacaaguuguacaucuggggaguccaccauccuggcaccgauaaagaccagauuuuucuuuaugcccagagcucuggcagaaucacaguguccacuaagaggucacaacaggcuguaauaccaaacauugggagccggccccgcaucagaaauauuccuaguaggaucucuaucuacuggaccauuguuaaaccaggagauauacugcuaaucaacuccacagguaaucucauugccccgcggggcuacuucaagauccgcagcgggaaaucgucuauaaugcgauccgacgcgcccauuggaaaguguaagucagaaugcaucaccccuaacggcaguaucccaaaugacaaacccuuucagaacgugaauaagauuacguauggugcauguccuagauacgucaaacagagcacucugaaacuugccacagggaugaggaacgugccagagaagcaaacccggggaaucuucggcgcuauugccggcuuuauagaaaaugggugggagggaaugguggaugguugguauggcuuccgucaccagaacuccgaggggcgcggacaggcagcugaccugaagucuacucaagccgcgaucgaucagauuaauggcaaauugaacagacucaucgguaagacaaaugaaaaguuccaccagaucgagaaagaauuuagcgaggucgaagggaggauucaggaccuggagaaguacguugaggauaccaaaauagacuuauggucauauaacgccgaacugcucguggcacuugagaaccaacauacgaucgaucugaccgacagugaaaugaauaaguuguucgagaaaacaaagaagcagcuacgggaaaacgcugaggauaugggcaauggaugcuuuaaaauuuaccacaagugugacaacgccugcaucggcuccauucgaaaugggacuuaugaucauaacguauaccgcgacgaggcucugaauaacagauuccagaucaaaggaguggaacucaagagcgguuacaaagacuggauacuguggaucucuuuugccauuucaugcuuccuucugugugucgcauugcucggcuuuaucaugugggccugccagaaggggaauauuagguguaacaucugcauauga

SEQ ID NO: 137923 - RNA, 1701 nt, Artificial Sequence; identical to SEQ ID NO: 137883
  derived and/or modified CDS sequence (opt3) from hemagglutinin__InfluenzaA__AGF44916

SEQ ID NO: 137924 - RNA, 1701 nt, Artificial Sequence
  derived and/or modified CDS sequence (opt3) from hemagglutinin__InfluenzaA__AGF44917
augaagaccaucauugcccugagcuacauacucugccuuguguucgcucagaaaauccccggcaacgacaauuccacagcaacucuguguuuggggcaccaugccgucccuaacggaacgauuguuaagaccaucacaaaugagcaaauugaagugacuaacgcgaccgaguuaguacagucuucaaguacaggugaaaucugcaauagcccacaccagauacuggauggcgagaacuguacccuaaucgacgcucuccugggggauccgcagugcgacggauuucaaaauaaaaagugggaucuuuucguggaaagauccaaagccuauucuaacuguuaccccuaugacgucccugauuacgcaucgcugaggucauugguggccagcaguggcacucucgaguuuaauaacgaguccuucaauuggacagguguuacccagaacgggacgucuagcgcuugcauucggggauccgacucaaguuucuuuagccgccugaauuggcugacucaucucaacuuuaaguauccagcauuaaaugugaccaugcccaacaacgaacaguucgauaagcuguacaucuggggcguccaccauccuggcacagacaaagaucagauuuuucuuuaugcccaggcuucugggcgaaucacuguguccaccaagcguucacaacaggccguaauaccaaauauuggaagcagacccaggauccggaacauuccuagucgcaucucuaucuacuggacaauuguuaaaccaggugacauauugcugaucaauuccaccggcaaccuaauugcgccgagaggguacuucaagaucaggagcggaaaaucgucuauaaugcgguccgaugcacccauuggcaaguguaauucagagugcaucacgccuaacgguaguaucccaaaugacaagcccuuucagaacgugaaucgcauuacuuauggggccuguccucgauacgucaaacaaaacacacucaagcuggcuaccggaaugagaaaugugccagaaaaacagacuaggggcaucuucggcgccauugcaggguuuauagagaacggaugggaggguaugauggacggcugguauggguuccggcaccagaauagcgaaggacguggccaagcugccgaucuuaaguccacacaggcggccaucgaccagauuaacgguaaacugaaucgcuugaucgggaagaccaacgagaaauuccaccagaucgaaaaggaguuuucugaaguggagggcaggauucaagaucucgagaaguacgucgaagacacgaaaauagaucuguggagcuauaacgcagaguuacugguugcucucgaaaaucagcauaccaucgaccuuacagauucagagaugaacaagcuguucgagaaaacuaagaaacaguugagagaaaaugccgaggacaugggaaacggcugcuuuaagauuuaccacaagugugauaaugcuugcaucgggaguauucggaacggaaccuauaaucaugacguguaccgagaugaagcccuaaacaaucgcuuccagaucaaagguguagagcugaaguccggcuacaaagacuggauacucuggaucagcuuugcaauuucuugcuuccugcuuuguguggcccuguugggguuuaucaugugggcuugccaaaagggaaacauuagauguaauaucugcauauga

SEQ ID NO: 137925 - RNA, 1701 nt, Artificial Sequence; identical to SEQ ID NO: 137883
  derived and/or modified CDS sequence (opt3) from hemagglutinin__InfluenzaA__AGF44918

SEQ ID NO: 137926 - RNA, 1701 nt, Artificial Sequence
  derived and/or modified CDS sequence (opt3) from hemagglutinin__InfluenzaA__AGF44919
augaagaccaucauugcccugagcuacauacucugccuuguguucgcucagaaacugcccggcaacgacaauuccacagcaacuuuguguuuagggcaccaugccgucccuaacggaacgaucguuaagaccauuacaaaugauagaaucgaggugacuaacgcgaccgaacugguacaaaauucuucaauuggugagaucugcgacaguccacaccagauacuagauggcgaaaacuguacacucaucgacgcucugcuuggggauccgcagugcgacggauuucagaauaaaaagugggaucuguucguggagaggagcaaagccuauuccaacuguuaccccuaugacgucccugauuacgcaucuuugcggucgcucguggccucaagcggcacccuggaauuuaauaacgagaguuucaauugggcugguguuacucaaaacgggacauccucugcaugcauucgcggaagcaauuccucauuuuucagucgacugaacuggcucacccauuuaaauuuuaaguauccagcccugaacgugacgaugcccaacaaugagcaguucgacaaguuguacaucuggggcguccaccauccuggcacugauaaagaccagauuuuucuuuaugcucagagcucugggcguaucaccguguccacaaagagaucacaacaggccguaauaccaaacauuggaagcaggccccggauccgcaauauuccuaguagaaucucuaucuacuggacuauuguuaaaccaggugauauacugcuaaucaacuccaccggcaaucucauugcgccgaggggguacuucaagauccggagcggaaaaucgucuauaaugcgcuccgacgcacccauuggcaaguguaagucagaaugcaucacaccuaacgguaguaucccaaaugacaaacccuuucagaacgugaaucgaauuaccuauggggccuguccuagauacgucaagcagagcacgcugaaacuugcuacuggaaugaggaacgugccagagaagcaaacacggggcaucuucggcgccauugcaggguuuauagaaaauggaugggaggguaugguggauggcugguauggguuccgucaccagaacuccgagggacgcggccaggcugccgaccugaaaucuacccaagcggccaucgaucagauuaaugguaaguugaacagacucaucgggaaaacuaaugaaaaguuccaccagaucgagaaggaauuuagcgaggucgaaggcaggauucaggaccuggagaaauacguugaggauacaaagauagacuuauggucauauaacgcagaacugcucguggcucuugagaaccaacauaccaucgaucugacggacagugaaaugaauaaauuguucgagaagaccaaaaagcagcuacgggaaaacgccgaggauaugggaaauggcugcuuuaagauuuaccacaaaugugacaacgcuugcaucggguccauucgaaauggaacauaugaucauuacguauaccgcgacgaggcccugaacaauagauuccagaucaaggguguggaacucaaaagcggcuauaaggacuggauacuguggaucucuuuugcaauuucaugcuuccuucugugugucgccuugcucggguuuaucaugugggcuugccagaaaggaaacauuagguguaauaucugcauauga

SEQ ID NO: 137927 - RNA, 1701 nt, Artificial Sequence; identical to SEQ ID NO: 137883
  derived and/or modified CDS sequence (opt3) from hemagglutinin__InfluenzaA__AGF44920

SEQ ID NO: 137928 - RNA, 1701 nt, Artificial Sequence; identical to SEQ ID NO: 137906
  derived and/or modified CDS sequence (opt3) from hemagglutinin__InfluenzaA__AGF44921

SEQ ID NO: 137929 - RNA, 1701 nt, Artificial Sequence
  derived and/or modified CDS sequence (opt3) from hemagglutinin__InfluenzaA__AGG13411
augaagaccaucauugcccugagcuacauacucugccuuguguucgcucaggagcugcccggcaacgacgauuccacagcaacuuuguguuuagggcaccaugccgucccuaauggaacgaucguuaaaaccauuacaaacgacagaaucgaagugacuaaugcgaccgagcugguacaaucuucaaguacaggugaaauuugcaacagcccacaccagauccuagauggcgagaauuguacccucauagacgcucugcuuggggauccgcagugcgacggauuucagaacaagaaaugggaucuguucguggaaagguccaaggcccauucuaauuguuaucccuacgacgucccugauuaugcaucguugcggucacucguggccagcaguggcacucuggaguuuaacaaugaguccuucaacuggacagguguuacccaaaaugggacgucuagcgcuugcauccgccgauccaacaauucauuuuucagucgucugaacuggcucacucacuuaaauuuuaaauacccagcacugaacgugaccaugcccaacaaugaacaguucgacaaacuuuauauuuggggaguccaucacccuggcacagauaaggaccagaucuuuuuguacgcccaggcuagcggcagaauuacugugucuaccaagaggaaccaacagacaguaaucccaaauauagggucccggccccgcguuagaaacauuccuucaagggugagcaucuauuggaccauugucaagccaggagauauccugcuaaucaauaguacggguaaccucauugccccgcggggcuacuucaaaauacgcucugggaaguccagcaucaugcgaucggacgcgcccauuggaaaauguaauucugcaugcaucacuccuaacggcuccauaccaaaugacaagcccuuucagaacgugaauagaauuacauacggugccuguccuagguaugugaagcagaacacccugaaacuugcuacugggaugcggaaugucccagagaagcaaacacguggaaucuucggcgccaucgcaggcuuuauugaaaacgggugggagggaaugguugaugguugguacggcuuccgccaccaaaauucagaggggagaggacaggcugccgaccugaaaaguacccaggcggccaucgaucagauuaacggcaaguugaacaggcucauagguaaaacgaaugaaaaguuccaucagaucgagaaagaauuuagcgagguggaagggcggauucaggaccuggagaaguauguagaggauaccaagaucgacuuaugguccuacaacgcagaacugcucguggcucuugagaaucaacacacaaucgaucugacugacucugaaaugaacaaauuguucgagaagaccaaaaagcagcuacgagaaaaugccgaggauaugggcaacggaugcuuuaaaauuuaucauaagugugacaaugcuugcauaggcagcauccgcaacgggacauacgaucacgacgucuauagagacgaggcccugaauaacagguuccagauuaagggaguggaacucaaaucagguuacaaggauuggauccuguggauuaguuuugcaaucuccugcuuccuucuguguguugccuugcucggcuuuauaaugugggcuugccagaaagggaauauccgguguaacauuugcaucuga

SEQ ID NO: 137930 - RNA, 1701 nt, Artificial Sequence
  derived and/or modified CDS sequence (opt3) from hemagglutinin__InfluenzaA__AGG13447
augaagaccaucauugcccugagcuacauacucugccuuguguucgcucaggagcugcccggcaacgacgauuccacagcaacuuuguguuuagggcaccaugccgucccuaauggaacgaucguuaaaaccauuacaaacgacagaaucgaagugacuaaugcgaccgagcugguacaaucuucaaguacaggugaaauuugcaacagcccacaccagauccuagauggcgagaauuguacccucauagacgcucugcuuggggauccgcagugcgacggauuucagaacaagaaaugggaucuguucguggaaagguccaaggcccauucuaauuguuaucccuacgacgucccugauuaugcaucguugcggucacucguggccagcaguggcacucuggaguuuaacaaugaguccuucaacuggacagguguuacccaaaaugggacgucuagcgcuugcauccgccgauccaacaauucauuuuucagucgucugaacuggcucacucacuuaaauuuuaaauacccagcacugaacgugaccaugcccaacaaugaacaguucgacaaacuuuauauuuggggaguccaucacccuggcacagauaaggaccagaucuuuuuguacgcccaggcuagcggcagaauuacugugucuaccaagaggucccaacagacaguaaucccaaacauagggucacggccccgcguuagaaauauuccuagcagggugaguaucuauuggaccauugucaagccaggagauauccugcuaaucaacucuacggguaaucucauugccccgcggggcuacuucaaaauacgcuccggaaagagcucgaucaugcgaucugacgcgcccauugggaaauguaacuccgcaugcaucacuccuaauggcucaauaccaaacgacaagcccuuucagaaugugaacagaauuacauacggugccuguccuagguaugugaagcagaauacccugaaacuugcuacugggaugcggaacgucccagagaagcaaacacguggaaucuucggcgccaucgcaggcuuuauugaaaaugggugggagggaaugguugaugguugguacggcuuccgccaccagaacagugaggggagaggacaggcugccgaccugaaaagcacccaagcggccaucgaucagauuaauggcaaguugaacaggcucauagguaaaacgaacgaaaaguuccaucagaucgagaaagaauuuuccgagguggaagggcggauucaggaccuggagaaguauguagaggauaccaagaucgacuuauggucuuacaaugcagaacugcucguggcucuugagaaccaacacacaaucgaucugacugacagcgaaaugaauaaauuguucgagaagacccagaaacagcuacgagaaaacgccgaggauaugggcaauggaugcuuuaagauuuaucauaaaugugacaacgcuugcauaggcucaauccgcaaugggacauacgaucacgacgucuauagagacgaggcccugaacaauagguuccagauuaagggaguggaacucaagagugguuacaaagauuggauccuguggauuuccuuugcaaucagcugcuuccuucuguguguugccuugcucggcuuuauaaugugggcuugccaaaaggggaacauccgguguaauauuugcaucuga

SEQ ID NO: 137931 - RNA, 1701 nt, Artificial Sequence
  derived and/or modified CDS sequence (opt3) from hemagglutinin__InfluenzaA__AGG13459
augaagaccaucauugcccugagcuacauacucugccuuguguucgcucagaaacugcccggcaacgacaauuccacagcaacuuuguguuuagggcaccaugccgucccuaacggaacgaucguuaagaccauuacaaaugauagaaucgaggugacuaacgcgaccgaacugguacaaaauucuucaauuggugagaucugcgacaguccacaccagauacuagauggcgaaaacuguacacucaucgacgcucugcuuggggauccgcagugcgacggauuucagaauaaaaagugggaucuguucguggagaggagcaaagccuauuccaacuguuaccccuaugacgucccugauuacgcaucuuugcggucgcucguggccucaagcggcacccuggaauuuaauaacgagaguuucaauuggacugguguuacacaaaacgggaccuccucugcuugcauucgccgaagcaauuccucauuuuucagucgucugaacuggcucacgcauuuaaauuuuaaguauccagcacugaacgugacuaugcccaacaaugagcaguucgacaaacuuuacaucuggggaguccaccauccuggcaccgauaaagaccagaucuuuuuguaugcccagagcucuggcagaauuacaguguccacuaagaggucacaacaggcuguaauaccaaacauugggagccggccccgcaucagaaauauuccuaguaggaucucuaucuacuggaccauuguuaaaccaggagauauacugcuaaucaacuccacagguaaucucauugccccgcggggcuacuucaagauccgcagcgggaaaucgucuauaaugcgauccgacgcgcccauuggaaaguguaagucagaaugcaucaccccuaacggcaguaucccaaaugacaaacccuuucagaacgugaauagaauuacguauggugcauguccuagguacgucaagcagagcacucugaaacuugccacagggaugcggaacgugccagagaagcaaacccguggaaucuucggcgcuauugccggcuuuauagaaaaugggugggagggaaugguggaugguugguauggcuuccgccaccagaacuccgaggggagaggacaggcagcugaccugaaaucuacucaagccgcgaucgaucagauuaauggcaaguugaacaggcucaucgguaaaacaaaugaaaaguuccaccagaucgagaaggaauuuagcgaggucgaagggcggauucaggaccuggagaaauacguugaggauaccaagauagacuuauggucauauaacgccgaacugcucguggcacuugagaaccaacauacgaucgaucugaccgacagugaaaugaauaaauuguucgagaagacaaagaagcagcuacgagaaaacgcugaggauaugggcaauggaugcuuuaagauuuaccacaaaugugacaacgccugcaucggcuccauucgcaaugggacuuaugaucaugacguauacagagacgaggcucugaacaauagguuccagaucaagggaguggaacucaaaagcgguuacaaggauuggauacuguggaucucuuuugccauuucaugcuuccuucugugugucgcauugcucggcuuuaucaugugggccugccagaaagggaacauucgguguaauaucugcauauga

SEQ ID NO: 137932 - RNA, 1701 nt, Artificial Sequence
  derived and/or modified CDS sequence (opt3) from hemagglutinin__InfluenzaA__AGG13495
augaagaccaucauugcccugagcuacauacucugccuuguguucgcucagaaacugcccggcaacgacaauuccacagcaacuuuguguuuagggcaccaugccgucccuaacggaacgaucguuaagaccauuacaaaugaucaaaucgaggugacuaacgcgaccgaacugguacagucuucaaguacaggugagauuugcgacagcccacaccagauccuagauggcgaaaauuguacccucauagacgcucugcuuggggauccgcagugcgacggauuucaaaacaaaaagugggaucuguucguggagagauccaaagccuauucuaauuguuaccccuaugacgucccugauuacgcaucguugaggucacucguggccagcaguggcacucuggaauuuaacaaugaguccuucaacuggacagguguuacccagaaugggacgucuagcgcuugcauccggcgcuccgacucaaguuucuuuagccgacugaacuggcucacucauuuaaauuuuaaguauccagcacugaacgugaccaugcccaauaacgagcaguucgauaaacuuuacauuuggggaguccaccauccuggcacagacaaggaucagaucuuuuuguaugcccaggcuucuggccguauuacuguguccaccaagagaucacaacagagcguaaucccaaacauagggaguaggccccggauucgcaauaucccuucuagaauuuccaucuacuggacaaucguuaaaccaggagacauucugcuaauaaacagcaccgguaaucucaucgccccgaggggcuacuucaagauucagucggggaaaucuuccaucaugcggucagacgcgcccauaggaaaguguaacagugaaugcauuacgccuaauggcagcaucccaaacgauaagcccuuucaaaaugugaaccgcaucacuuauggugcauguccucgauacgucaaacagaauacacugaaacuugccaccgggaugagaaacgugccagagaagcagacuaggggaauuuucggcgcuaucgccggcuuuauugaaaaugggugggagggaaugguggacgguugguauggcuuccggcaccaaaacuccgaggggcguggacaggcagcugaucugaagucuacacaggccgcgauagaccagaucaauggcaaauugaaccgccucauugguaagaccaaugaaaaauuccaccaaaucgagaaggaauuuagcgaggucgaagggagaauccaggaucuggagaaguacguugaggacacgaaaauugauuuauggucauauaacgccgaacugcucguggcacuugagaaccagcauaccauagaccugacagauagugaaaugaauaaguuguucgagaaaacuaagaaacagcuaagggaaaacgcugaggacaugggcaauggaugcuuuaagaucuaccacaagugugauaacgccugcauuggcuccauccggaaugggaccuauaaccaugacguauaccgagacgaggcucugaauaaccgcuuccaaauuaaaggaguggaacucaagagcgguuacaaagauuggauccuguggauaucuuuugccaucucaugcuuccuucugugugucgcauugcucggcuuuauuaugugggccugccagaaggggaauaucagauguaacauuugcaucuga

SEQ ID NO: 137933 - RNA, 1701 nt, Artificial Sequence; identical to SEQ ID NO: 137931
  derived and/or modified CDS sequence (opt3) from hemagglutinin__InfluenzaA__AGG13507

SEQ ID NO: 137934 - RNA, 1701 nt, Artificial Sequence
  derived and/or modified CDS sequence (opt3) from hemagglutinin__InfluenzaA__AGG13519
augaagaccaucauugcccugagcuacauacucugccuuguguucgcucagaaacugcccggcaacgacaauuccacagcaacuuuguguuuagggcaccaugccgucccuaacggaacgaucguuaagaccauuacaaaugaucaaaucgaggugacuaacgcgaccgaacugguacagucuucaaguacaggugagauuugcgacagcccacaccagauccuagauggcgaaaauuguacccucauagacgcucugcuuggggauccgcagugcgacggauuucaaaacaaaaagugggaucuguucguggagagauccaaagccuauucuaauuguuaccccuaugacgucccugauuacgcaucguugaggucacucguggccagcaguggcacucuggaauuuaacaaugaguccuucaacuggacagguguuacccagaaugggacgucuagcgcuugcauccggcgcuccgacucaaguuucuuuagccgacugaacuggcucacucauuuaaauuuuaaguauccagcacugaacgugaccaugcccaauaacgagcaguucgauaaacuuuacauuuggggaguccaccauccuggcacagacaaggaucagaucuuuuuguaugcccaggcuucuggccguauuacuguguccaccaagagaucacaacagagcguaaucccaaacauagggaguaggccccggauucgcaauaucccuucuagaauuuccaucuacuggacaaucguuaaaccaggagacauucugcuaauaaacagcaccgguaaucucaucgccccgaggggcuacuucaagauucagucggggaaaucuuccaucaugcggucagacgcgcccauaggaaaguguaacagugaaugcauuacgccuaauggcagcaucccaaacgauaagcccuuucaaaaugugaaccgcaucacuuauggugcauguccucgauacgucaaacagaauacacugaaacuugccaccgggaugagaaacgugccagagaagcagacuaggggaauuuucggcgcuaucgccggcuuuauugaaaaugggugggagggaaugguggacgguugguauggcuuccggcaccaaaacuccgaggggcguggacaggcagcugaucugaagucuacacaggccgcgauagaccagaucaauggcaaauugaaccgccucauugguaagaccaaugaaaaauuccaccaaaucgagaaggaauuuagcgaggucgaagggagaguucaggaucuggagaaguacguggaggacacgaaaaucgauuuauggucauauaacgccgaacugcucguagcacuugagaaccagcauaccauugaccugacagauagugaaaugaauaaguuguucgagaaaacuaagaaacagcuaagggaaaacgcugaggacaugggcaauggaugcuuuaagauauaccacaagugugauaacgccugcaucggcuccauucggaaugggaccuauaaccaugacguguaccgagacgaggcucugaauaaccgcuuccaaaucaaaggagucgaacucaagagcgguuacaaagauuggauucuguggaucucuuuugccauaucaugcuuccuucuguguguggcauugcucggcuuuaucaugugggccugccagaaggggaauauuagauguaacaucugcauuuga

SEQ ID NO: 137935 - RNA, 1701 nt, Artificial Sequence; identical to SEQ ID NO: 137931
  derived and/or modified CDS sequence (opt3) from hemagglutinin__InfluenzaA__AGG13531

SEQ ID NO: 137936 - RNA, 1701 nt, Artificial Sequence
  derived and/or modified CDS sequence (opt3) from hemagglutinin__InfluenzaA__AGG13543
augaagaccaucauugcccugagcuacauacucugccuuguguucgcucagaaacugcccggcaacgacaauuccacagcaacuuuguguuuagggcaccaugccgucccuaacggaacgaucguuaagaccauuacaaaugauagaaucgaggugacuaacgcgaccgaacugguacaaaauucuucaauuggugagaucugcgacaguccacaccagauacuagauggcgaaaacuguacacucaucgacgcucugcuuggggauccgcagugcgacggauuucagaauaaaaagugggaucuguucguggagaggagcaaagccuauuccaacuguuaccccuaugacgucccugauuacgcaucuuugcggucgcucguggccucaagcggcacccuggaauuuaauaacgagaguuucaauuggacugguguuacacaaaacgggaccuccucugcuugcauucgccgaagcaauuccucauuuuucagucgucugaacuggcucacgcauuuaaauuuuaaguauccagcacugaacgugacuaugcccaacaaugagcaguucgacaaacuuuacaucuggggaguccaccauccuggcaccgauaaagaccagaucuuuuuguaugcccagagcucuggcagaauuacaguguccacuaagaggucacaacaggcuguaauaccaaacauugggagccggccccgcaucagaaauauuccuaguaggaucucuaucuacuggaccauuguuaaaccaggagauauacugcuaaucaacuccacagguaaucucauugccccgcggggcuacuucaagauccgcagcgggaaaucgucuauaaugcgauccgacgcgcccauuggaaaguguaagucagaaugcaucaccccuaacggcaguaucccaaaugacaaacccuuucagaacgugaauagaauuacguauggugcauguccuagguacgucaagcagagcacucugaaacuugccacagggaugcggaacgugccagagaagcaaacccguggaaucuucggcgcuauugccggcuuuauagaaaaugggugggagggaaugguggaugguugguauggcuuccgccaccagaacuccgaggggagaggacaggcagcugaccugaaaucuacucaagccgcgaucgaucagauuaauggcaaguugaacaggcucaucgguaaaacaaaugaaaaguuccaccagaucgagaaggaauuuagcgaggucgaagggcggauucaggacauagagaaauacguugaggauaccaagaucgaccuguggucauauaacgccgaauuacugguggcacucgagaaccaacauacgauugaucuuaccgacagugaaaugaauaaacuguucgagaagacaaagaagcaguugcgagaaaacgcugaggauaugggcaauggaugcuuuaagaucuaccacaaaugugacaacgccugcauuggcuccauccgcaaugggacuuaugaucauaacguauacagagacgaggcucuaaauaacagguuccagauaaagggaguggaacugaaaagcgguuacaaggacuggauccucuggauuucuuuugccaucucaugcuuccugcuuugugucgcacuguugggcuuuauuaugugggccugccagaaagggaauauccgguguaacauaugcauuuga

SEQ ID NO: 137937 - RNA, 1701 nt, Artificial Sequence; identical to SEQ ID NO: 137931
  derived and/or modified CDS sequence (opt3) from hemagglutinin__InfluenzaA__AGG13555

SEQ ID NO: 137938 - RNA, 1701 nt, Artificial Sequence; identical to SEQ ID NO: 137931
  derived and/or modified CDS sequence (opt3) from hemagglutinin__InfluenzaA__AGG13567

SEQ ID NO: 137939 - RNA, 1701 nt, Artificial Sequence
  derived and/or modified CDS sequence (opt3) from hemagglutinin__InfluenzaA__AGG13591
augaagaccaucauugcccugagcuacauacucugccuuguguucgcucagaaacugcccggcaacgacaauuccacagcaacuuuguguuuagggcaccaugccgucccuaacggaacgaucguuaagaccauuacaaaugauagaaucgaggugacuaacgcgaccgaacugguacaaaauucuucaauuggugagaucugcgacaguccacaccagauacuagauggcgaaaacuguacacucaucgacgcucugcuuggggauccgcagugcgacggauuucagaauaaaaagugggaucuguucguggagaggagcaaagccuauuccaacuguuaccccuaugacgucccugauuacgcaucuuugcggucgcucguggccucaagcggcacccuggaauuuaauaacgagaauuucaacuggacugguguuacacaaaaugggaccaguuccgcuugcauucgccgaucuaacagcuccuuuuucucacgucugaauuggcucacgcauuuaaacuuuaaguauccagcacugaacgugacuaugcccaauaacgagcaguucgacaaguuguacaucuggggaguccaccauccuggcaccgauaaagaccagauuuuucuuuaugcccagaguagcggcagaaucacagugucuacuaagaggucccaacaggcuguaauaccaaauauugggucacggccccgcaucagaaacauuccuagcaggaucaguaucuacuggaccauuguuaaaccaggagauauacugcuaaucaauucuacagguaaccucauugccccgcggggcuacuucaagauccgcuccgggaaaagcucgauaaugcgaucugacgcgcccauuggaaaguguaaguccgaaugcaucaccccuaauggcucaaucccaaacgacagacccuuucagaaugugaacaggauuacguauggugcauguccucgguacgucaaacagaguacucugaaacuugccacagggaugcguaaugugccagagaagcaaacccgcggaaucuucggcgcuauugccggcuuuauagaaaacgggugggagggaaugguggaugguugguauggcuucagacaccagaauagcgaggggaggggacaggcagcugaccugaaguccacucaagccgcgaucgaucagauuaacggcaaauugaaucggcucaucgguaagacaaacgaaaaauuccaccagaucgagaaggaauuuucugaggucgaagggcgcauucaggaccuggagaaguacguugaggauaccaaaauagacuuauggagcuauaacgccgaacugcucguggcacuugagaaucaacauacgaucgaucugaccgacucagaaaugaacaaguuguucgagaaaacaaagaaacagcuacgagaaaaugcugaggauaugggcaacggaugcuuuaagauuuaccacaagugugacaaugccugcaucggcaguauuagaaacgggacuuaugaucaugacguauacagggacgaggcucugaauaaccgguuccagaucaaaggaguggaacucaaguccgguuacaaagauuggauacuguggaucagcuuugccauuucuugcuuccuucugugugucgcauugcucggcuuuaucaugugggccugccagaaggggaauauucgcuguaacaucugcauauga

SEQ ID NO: 137940 - RNA, 1701 nt, Artificial Sequence
  derived and/or modified CDS sequence (opt3) from hemagglutinin__InfluenzaA__AGG13615
augaagaccaucauugcccugagcuacauacucugccuuguguucgcucagaaaauccccggcaacgacaauuccacagcaacucuguguuuggggcaccaugccgucccuaacggaacgauuguuaagaccaucacaaaugauagaauugaggugacuaacgcgaccgaauuaguacaaaauucuucaaucggugagauaugcgacaguccacaccagauccuggauggcgaaaacuguacacuaauugacgcucuccugggggauccgcagugcgacggauuucagaauaaaaagugggaucuuuucguggagaggagcaaagccuauuccaacuguuaccccuaugacgucccugauuacgcaucucugcggucguugguggccucaagcggcacccucgaauuuaauaacgagaguuucaauuggacugguguuacacaaaacgggaccuccucugcuugcauccgccgaagcaauuccucauuuuucagucgucugaacuggcugacgcaucucaauuuuaaguauccagcauuaaacgugacuaugcccaacaaugagcaguucgacaagcuguacauuuggggaguccaccauccuggcaccgauaaagaccagaucuuucuuuaugcccagagcucuggcagaauaacaguguccacuaagaggucacaacaggcuguaauuccaaacaucgggagccggccccgcauuagaaauaucccuaguaggaucucuauuuacuggaccauaguuaaaccaggagauaucuugcugauuaacuccacagguaaucuaaucgccccgcggggcuacuucaagauacgcagcgggaaaucgucuauuaugcgauccgacgcgcccaucggaaaguguaagucagaaugcaucaccccuaacggcaguauuccaagcgacaaacccuuucagaaugugaacagaaucacguauggugcauguccuagguacgucaagcaguccacucucaaacuggccacagggaugcggaaugugccagagaagcaaacccguggaauuuucggcgcuauagccggcuuuaucgaaaacgggugggagggaaugguggaugguugguauggcuuccgccaccaaaauucugaggggagaggacaggcagcugaccuuaaaagcacucaggccgcgauugaucagaucaacggcaagcugaauagguugaucgguaaaacaaacgaaaaguuccaccagauugagaaggaauuuucagaggucgaagggcggauacaggaccucgagaaauacguugaggauaccaagaucgaccuguggaguuauaaugccgaauuacugguggcacucgagaaccaacauacgauugaucuuaccgacuccgaaaugaacaaacuguucgagaagacuaaaaagcaguugcgagaaaaugcugaggauaugggcaacggaugcuuuaagaucuaccacaaaugugacaaugccugcauuggcagcauccgcaacgggacauaugaucaugacguauacagagacgaggcucuaaauaacagguuccagauaaagggaguggaacugaaaucugguuacaaggauuggauccucuggauuucauuugccaucaguugcuuccugcuuugugucgcacuguugggcuuuauuaugugggccugccagaaagggaauauccgguguaacauaugcauuuga

SEQ ID NO: 137941 - RNA, 1701 nt, Artificial Sequence; identical to SEQ ID NO: 137939
  derived and/or modified CDS sequence (opt3) from hemagglutinin__InfluenzaA__AGG13627

SEQ ID NO: 137942 - RNA, 1701 nt, Artificial Sequence
  derived and/or modified CDS sequence (opt3) from hemagglutinin__InfluenzaA__AGG13639
augaagaccaucauugcccugagcuacauacucugccuuguguucgcucagaaacugcccggcaacgacaauuccacagcaacuuuguguuuagggcaccaugccgucccuaacggaacgaucguuaagaccauuacaaaugauagaaucgaggugacuaacgcgaccgaacugguacaaaauucuucaauuggugagaucugcgacaguccacaccagauacuagauggcgaaaacuguacacucaucgacgcucugcuuggggauccgcagugcgacggauuucagaauaaaaagugggaucuguucguggagaggagcaaagccuauuccaacuguuaccccuaugacgucccugauuacgcaucuuugcggucgcucguggccucaagcggcacccuggaauuuaauaacgagaguuucaauugggcugguguuacucaaaacgggacauccucugcaugcauucgcggaagcaauuccucauuuuucagucgacugaacuggcucacccauuuaaauuuuaaguauccagcccugaacgugacgaugcccaacaaugagcaguucgacaaguuguacaucuggggcguccaccauccuggcacuaacaaagaucagauuuuucuuuaugcucagagcucugggcguaucaccguguccacaaagagaucacaacaggccguaauaccaaauauuggaagcaggccccggauccgcaacauuccuaguagaaucucuaucuacuggacuauuguuaaaccaggugacauacugcuaaucaauuccaccggcaaccucauugcgccgaggggguacuucaagauccggagcggaaaaucgucuauaaugcgcuccgaugcacccauuggcaaguguaagucagaaugcaucacaccuaaugguaguaucccaaacgacaaacccuuucagaaugugaaccgaauuaccuauggggccuguccuagauacgucaagcagagcacgcugaaacuugcuacuggaaugaggaaugugccagagaagcaaacacggggcaucuucggcgccauugcaggguuuauagaaaacggaugggaggguaugguggacggcugguauggguuccgucaccaaaauuccgagggacgcggccaggcugccgaucugaaaucuacccaggcggccaucgaccagauuaacgguaaguugaauagacucaucgggaaaacuaacgaaaaguuccaccagaucgagaaggaauuuagcgaggucgaaggcaggauucaggaucuggagaaauacguugaggacacaaagauagauuuauggucauauaacgcagaacugcucguggcucuugagaaucaacauaccaucgaccugacggauagugaaaugaacaaauuguucgagaagaccaaaaagcagcuacgggaaaaugccgaggacaugggaaacggcugcuuuaagauuuaccacaaaugugauaaugcuugcaucggguccauucgaaacggaacauaugaccaugauguauaccgcgacgaggcccugaauaacagauuccagaucaaggguguggaacucaaaagcggcuacaaggacuggauacuguggaucucuuuugcaauuucaugcuuccuucugugugucgccuugcucggguuuaucaugugggcuugccagaaaggaaauauuagguguaacaucugcauauga

SEQ ID NO: 137943 - RNA, 1701 nt, Artificial Sequence; identical to SEQ ID NO: 137932
  derived and/or modified CDS sequence (opt3) from hemagglutinin__InfluenzaA__AGG13651

SEQ ID NO: 137944 - RNA, 1701 nt, Artificial Sequence; identical to SEQ ID NO: 137931
  derived and/or modified CDS sequence (opt3) from hemagglutinin__InfluenzaA__AGG13663

SEQ ID NO: 137945 - RNA, 1701 nt, Artificial Sequence; identical to SEQ ID NO: 137932
  derived and/or modified CDS sequence (opt3) from hemagglutinin__InfluenzaA__AGG13675

SEQ ID NO: 137946 - RNA, 1701 nt, Artificial Sequence; identical to SEQ ID NO: 137931
  derived and/or modified CDS sequence (opt3) from hemagglutinin__InfluenzaA__AGG13687

SEQ ID NO: 137947 - RNA, 1701 nt, Artificial Sequence; identical to SEQ ID NO: 137932
  derived and/or modified CDS sequence (opt3) from hemagglutinin__InfluenzaA__AGG13711

SEQ ID NO: 137948 - RNA, 1701 nt, Artificial Sequence; identical to SEQ ID NO: 137931
  derived and/or modified CDS sequence (opt3) from hemagglutinin__InfluenzaA__AGG13723

SEQ ID NO: 137949 - RNA, 1701 nt, Artificial Sequence; identical to SEQ ID NO: 137931
  derived and/or modified CDS sequence (opt3) from hemagglutinin__InfluenzaA__AGG13735

SEQ ID NO: 137950 - RNA, 1701 nt, Artificial Sequence; identical to SEQ ID NO: 137931
  derived and/or modified CDS sequence (opt3) from hemagglutinin__InfluenzaA__AGG13747

SEQ ID NO: 137951 - RNA, 1701 nt, Artificial Sequence
  derived and/or modified CDS sequence (opt3) from hemagglutinin__InfluenzaA__AGG13759
augaagaccaucauugcccugagcuacauacucugccuuguguucgcucaggagcugcccggcaacgacgauuccacagcaacuuuguguuuagggcaccaugccgucccuaauggaacgaucguuaaaaccauuacaaacgacagaaucgaagugacuaaugcgaccgagcugguacaaucuucaaguacaggugaaauuugcaacagcccacaccagauccuagauggcgagaauuguacccucauagacgcucugcuuggggauccgcagugcgacggauuucagaacaagaaaugggaucuguucguggaaagguccaaggcccauucuaauuguuaucccuacgacgucccugauuaugcaucguugcggucacucguggccagcaguggcacucuggaguuuaacaaugaguccuucaacuggacagguguuacccaaaaugggacgucuagcgcuugcauccgccgauccaacaauucauuuuucagucgucugaacuggcucacucacuuaaauuuuaaauacccagcacugaacgugaccaugcccaacaaugaacaguucgacaaacuuuauauuuggggaguccaucacccuggcacagauaaggaccagaucuuuuuguacgcccaggcuagcggcagaauuacugugucuaccaagaggucccaacagacaguaaucccaaacauagggucacggccccgcguuagaaauauuccuagcagggugaguaucuauuggaccauugucaagccaggagauauccugcuaaucaacucuacggguaaucucauugccccgcggggcuacuucaaaauacgcuccggaaagagcucgaucaugcgaucugacgcgcccauugggaaauguaacuccgcaugcaucacuccuaauggcucaauaccaaacgacaagcccuuucagaaugugaacagaauuacauacggugccuguccuagguaugugaagcagaauacccugaaacuugcuacugggaugcggaacgucccagagaagcaaacacguggaaucuucggcgccaucgcaggcuuuauugaaaaugggugggagggaaugguugaugguugguacggcuuccgccaccagaacagugaggggagaggacaggcugccgaccugaaaagcacccaagcggccaucgaucagauuaauggcaaguugaacaggcucauagguaaaacgaacgaaaaguuccaucagaucgagaaagaauuuuccgagguggaagggcggauucaggaccuggagaaguauguagaggauaccaagaucgacuuauggucuuacaaugcagaacugcucguggcucuugagaaccaacacacaaucgaucugacugacagcgaaaugaauaaauuguucgagaagaccaaaaagcagcuacgagaaaacgccgaggauaugggcaauggaugcuuuaaaauuuaucauaagugugacaacgcuugcauaggcucaauccgcaaugggacauacgaucacgacgucuauagagacgaggcccugaacaauagguuccagauuaagggaguggaacucaaaagugguuacaaggauuggauccuguggauuuccuuugcaaucagcugcuuccuucuguguguugccuugcucggcuuuauaaugugggcuugccagaaagggaacauccgguguaauauuugcaucuga

SEQ ID NO: 137952 - RNA, 1701 nt, Artificial Sequence
  derived and/or modified CDS sequence (opt3) from hemagglutinin__InfluenzaA__AGG13771
augaagaccaucauugcccugagcuacauacucugccuuguguucgcucagaaacugcccggcaacgacaauuccacagcaacuuuguguuuagggcaccaugccgucccuaacggaacgaucguuaagaccauuacaaaugaucaaaucgaggugacuaacgcgaccgaacugguacagucuucaaguacaggugagauuugcgacagcccacaccagauccuagauggcgaaaauuguacccucauagacgcucugcuuggggauccgcagugcgacggauuucaaaacaaaaagugggaucuguucguggagagauccaaagccuauucuaauuguuaccccuaugacgucccugauuacgcaucguugaggucacucguggccagcaguggcacucuggaauuuaacaaugaguccuucaacuggacagguguuacccagaaugggacgucuagcgcuugcauccggcgcuccgacucaaguuucuuuagccgacugaacuggcucacucauuuaaauuuuaaguauccagcacugaacgugaccaugcccaauaacgagcaguucgauaaacuuuacauuuggggaguccaccauccuggcacagacaaggaucagaucuuuuuguaugcccaggcuucuggccguauuacuguguccaccaagagaucacaacagagcguaaucccaaacauagggaguaggccccggauucgcaauaucccuucuagaauuuccaucuacuggacaaucguuaaaccaggagacauucugcuaauaaacagcaccgguaaucucaucgccccgaggggcuacuucaagauucagucggggaaaucuuccaucaugcggucagacgcgcccauaggaaaguguaacagugaaugcauuacgccuaauggcagcaucccaaacgauaagcccuuucaaaaugugaaccgcaucacuuauggugcauguccucgauacgucaaacagaauacacugaaacuugccaccgggaugagaaacgugccagagaagcagacuaggggaauuuucggcgcuaucgccggcuuuauugaaaaugggugggagggaaugguggacgguugguauggcuuccggcaccaaaacuccgaggggcguggacaggcagcugaucugaagucuacacaggccgcgauagaccagaucaauggcaaauugaaccgccucauugguaagaccaaugaaaaauuccaccaaaucgagaaggaauuuagcgaggucgaagggagaauccaggaucuggagaaguacguugaggacaacaaaauugauuuauggucauauaacgccgaacugcucguggcacuugagaaucagcauacgauagaccugaccgauagugaaaugaacaaguuguucgagaaaacaaagaaacagcuaagggaaaaugcugaggacaugggcaacggaugcuuuaagaucuaccacaagugugauaaugccugcauuggcuccauccggaacgggacuuauaaucaugacguauaccgagacgaggcucugaacaaucgcuuccaaauuaaaggaguggaacucaagagcgguuacaaagauuggauccuguggauaucuuuugccaucucaugcuuccuucugugugucgcauugcucggcuuuauuaugugggccugccagaaggggaacaucagauguaauauuugcaucuga

SEQ ID NO: 137953 - RNA, 1701 nt, Artificial Sequence
  derived and/or modified CDS sequence (opt3) from hemagglutinin__InfluenzaA__AGG13783
augaagaccaucauugcccugagcuacauacucugccuuguguucgcucagaaacugcccggcaacgacaauuccacagcaacuuuguguuuagggcaccaugccgucccuaacggaacgaucguuaagaccauuacaaaugaucaaaucgaggugacuaacgcgaccgaacugguacaaaauucuucaaugggugagauuugcgacaguccacaccagauccuagauggcgaaaacuguacacucauagacgcucugcuuggggauccgcagugcgacggauuucagaauaaaaagugggaucuguucguggagagaagcaaagccuauuccaacuguuaccccuaugacgucccugauuacgcaucuuugaggucgcucguggccucaagcggcacccuggaauuuaauaacgagaguuucaauugggcugguguuacucagaacgggacauccucugcaugcauccggggaagcaauuccucauuuuucagucgccugaacuggcucacccauuuaaauuuuaaguauccagcccugaacgugacgaugcccaacaaugagcaguucgacaaacuuuacauuuggggcguccaccauccuggcacugauaaggaccagaucuuuuuguaugcucaaagcucugggcgaauuaccguguccacaaagcguucacagcaggccguaaucccaaacauaggaagcagacccaggauucggaauguuccuagucgcaucucuauuuacuggacuaucgugaaaccaggugauauccugcuaauuaacuccaccggcaaucucauagcgccgagaggguacuucaagaucaggagcggaaaaucgucuauuaugcgguccgacgcacccaucggcaaguguaagucagaaugcauaacaccuaacgguaguauuccaaaugacaaacccuuucagaacgucaaucgcaucaccuauggggccuguccucgauacgugaagcaaagcacgcugaaacuugcuacuggaaugagaaacgugccagagaagcagacaaggggcaucuucggcgccauugcaggguuuaucgaaaauggaugggaggguauggucgauggcugguauggguuccggcaccagaacuccgagggacguggccaagcugccgaccugaaaucuacccaggcggccauugaucagauaaaugguaaguugaaccgccucaucgggaaaacuaaugaaaaguuccaccagauugagaaggaauuuagcgagguugaaggcagaauccaagaccuggagaaauacguggaggauacaaagaucgacuuauggucauauaacgcagaacugcucguagcucuugagaaccagcauaccauugaucugacggacagugaaaugaauaaauuguucgagaagaccaaaaagcagcuaagggaaaacgccgaggauaugggaaauggcugcuuuaagauauaccacaaaugugacaacgcuugcaucggguccauucggaauggaacauaugaucaugacguguaccgagacgaggcccugaacaaucgcuuccagaucaagggugucgaacucaaaagcggcuacaaggauuggauucuguggaucucuuuugcaauaucaugcuuccuucuguguguggccuugcucggguuuaucaugugggcuugccaaaaaggaaacauuagauguaauaucugcauuuga

SEQ ID NO: 137954 - RNA, 1701 nt, Artificial Sequence; identical to SEQ ID NO: 137932
  derived and/or modified CDS sequence (opt3) from hemagglutinin__InfluenzaA__AGG13795

SEQ ID NO: 137955 - RNA, 1701 nt, Artificial Sequence; identical to SEQ ID NO: 137883
  derived and/or modified CDS sequence (opt3) from hemagglutinin__InfluenzaA__AGG13807

SEQ ID NO: 137956 - RNA, 1701 nt, Artificial Sequence; identical to SEQ ID NO: 137932
  derived and/or modified CDS sequence (opt3) from hemagglutinin__InfluenzaA__AGG13819

SEQ ID NO: 137957 - RNA, 1701 nt, Artificial Sequence; identical to SEQ ID NO: 137932
  derived and/or modified CDS sequence (opt3) from hemagglutinin__InfluenzaA__AGG13831

SEQ ID NO: 137958 - RNA, 1701 nt, Artificial Sequence; identical to SEQ ID NO: 137931
  derived and/or modified CDS sequence (opt3) from hemagglutinin__InfluenzaA__AGG13855

SEQ ID NO: 137959 - RNA, 1701 nt, Artificial Sequence
  derived and/or modified CDS sequence (opt3) from hemagglutinin__InfluenzaA__AGG13867
augaagaccaucauugcccugagcuacauacucugccuuguguucgcucagaaacugcccggcaacgacaauuccacagcaacuuuguguuuagggcaccaugccgucccuaacggaacgaucguuaagaccauuacaaaugauagaaucgaggugacuaacgcgaccgaacugguacaaaauucuucaauugguaaaaucugcgacaguccacaccagauacuagauggcgagaacuguacacucauggacgcucugcuuggggauccgcagugcgacggauuucagaauaagaaaugggaucuguucguggaaaggagcaaggccuauuccaacuguuaccccuaugacgucccugauuacgcaucuuugcggucgcucguggccucaagcggcacccuggaguuuaauaacgaaaguuucaauuggacugguguuacacaaaacgggaccuccucugcuugcauccgccgaagcaauuccucauuuuucagucgucugaacuggcucacgcauuuaaauuuuaaguauccagcacugaacgugacuaugcccaacaaugagcaguucgacaaacuuuacauuuggggaguccaccauccuggcaccgauaaggaccagaucuuuuuguaugcccagagcucuggcagaauuacaguguccacuaaaaggucacaacaggcuguaaucccaaacauagggagccggccccgcauuagaaauaucccuaguaggauuucuaucuacuggaccaucguuaagccaggagauauucugcuaauaaacuccacagguaaucucaucgccccgcggggcuacuucaaaauucgcagcgggaagucgucuaucaugcgauccgacgcgcccauaggaaaguguaaaucagagugcauuaccccuaacggcaguaucccaaaugacaagcccuuucagaacgugaauagaaucacguauggugcauguccuagguacgucaaacagagcacucugaaacuugccacagggaugcggaacgugccagaaaaacaaacccguggaauuuucggcgcuaucgccggcuuuauugagaaugggugggaaggaaugguggaugguugguauggcuuccgccaccagaacuccgaggggagaggacaggcagcugaccugaagucuacucaagccgcgauagaucagaucaauggcaaauugaacaggcucauugguaagacaaaugagaaguuccaccagaucgaaaaagaguuuagcgaagucgaggggcggauccaggaccuggaaaaguacguugaggauaccaaaauugacuuauggucauauaacgccgagcugcucguggcacuugaaaaccaacauacgauagaucugaccgacagugagaugaauaaguuguucgaaaagacaaagaagcagcuacgagagaacgcugaagauaugggcaauggaugcuuuaaaaucuaccacaagugugacaacgccugcauuggcuccauccgcaaugggacuuaugaucauaacguauacagagacgaggcucugaauaacagguuccagauuaaaggaguggagcucaagagcgguuacaaagacuggauccuguggauaucuuuugccaucucaugcuuccuucugugugucgcauugcucggcuuuauuaugugggccugccagaaggggaauauccgguguaacauuugcaucuga

SEQ ID NO: 137960 - RNA, 1701 nt, Artificial Sequence; identical to SEQ ID NO: 137931
  derived and/or modified CDS sequence (opt3) from hemagglutinin__InfluenzaA__AGG13879

SEQ ID NO: 137961 - RNA, 1701 nt, Artificial Sequence; identical to SEQ ID NO: 137931
  derived and/or modified CDS sequence (opt3) from hemagglutinin__InfluenzaA__AGG13891

SEQ ID NO: 137962 - RNA, 1701 nt, Artificial Sequence
  derived and/or modified CDS sequence (opt3) from hemagglutinin__InfluenzaA__AGG13903
augaagaccaucauugcccugagcuacauacucugccuuguguucgcucagaaacugcccggcaacgacaauuccacagcaacuuuguguuuagggcaccaugccgucccuaacggaacgaucguuaagaccauuacaaaugaucaaaucgaggugacuaacgcgaccgaacugguacagucuucaaguacaggugagauuugcgacagcccacaccagauccuagauggcgaaaauuguacccucauagacgcucugcuuggggauccgcagugcgacggauuucaaaacaaaaagugggaucuguucguggagagauccaaagccuauucuaauuguuaccccuaugacgucccugauuacgcaucguugaggucacucguggccagcaguggcacucuggaauuuaacaaugaguccuucaacuggacagguguuacccagaaugggacgucuagcgcuugcauccggcgcuccgacucaaguuucuuuagccgacugaacuggcucacucauuuaaauuuuaaguauccagcacugaacgugaccaugcccaauaacgagcaguucgauaagcuguacauuuggggaguccaccauccuggcacagacaaagaucagaucuuuuuguaugcccaggcuucuggccguauuacuguguccaccaagagaucacaacagagcguacugccaaacaucgggaguaggccccggauacgcaauauuccuucuagaaucuccauuuacuggacaaucguuaaaccaggagacauccuacucauuaacagcaccgguaaucugauagccccgaggggcuacuucaagauccagucggggaaaucuuccauuaugcggucagacgcgcccaucggaaaguguaacagugaaugcauaacgccuaauggcagcauuccaaacgauaagcccuuucaaaaugugaaccgcaucacuuauggugcauguccucgauacgucaaacagaauacacuuaagcuggccaccgggaugagaaacgugccagagaaacagacuaggggaaucuucggcgcuauugccggcuuuaucgaaaaugggugggagggaaugguggacgguugguauggcuuccggcaccaaaacuccgaggggcguggacaggcagcugauuugaagucuacacaggccgcgauugaccagauaaauggcaaacucaaccgccugaucgguaagaccaaugaaaaauuccaccaaauugagaaggaauuuagcgaggucgaagggagaauccaggauuuagagaaguacguugaggacacgaaaaucgaucuguggucauauaacgccgaacuccuuguggcacuggagaaccagcauaccauugacuugacagauagugaaaugaauaagcuauucgagaaaacuaagaaacagcugagggaaaacgcugaggacaugggcaauggaugcuuuaagauauaccacaagugugauaacgccugcaucggcuccauucggaaugggaccuauaaccaugacguauaccgagacgaggcucucaauaaccgcuuccaaaucaaaggaguggaacuuaagagcgguuacaaagauuggauucuuuggaucucuuuugccauaucaugcuuccuguugugugucgcacuccugggcuuuaucaugugggccugccagaaggggaauauuagauguaacaucugcauuuga

SEQ ID NO: 137963 - RNA, 1701 nt, Artificial Sequence; identical to SEQ ID NO: 137931
  derived and/or modified CDS sequence (opt3) from hemagglutinin__InfluenzaA__AGG13927

SEQ ID NO: 137964 - RNA, 1701 nt, Artificial Sequence; identical to SEQ ID NO: 137939
  derived and/or modified CDS sequence (opt3) from hemagglutinin__InfluenzaA__AGG13939

SEQ ID NO: 137965 - RNA, 1701 nt, Artificial Sequence
  derived and/or modified CDS sequence (opt3) from hemagglutinin__InfluenzaA__AGG13962
augaaggccauccuggugguccuccuuuacaccuucgcuacagcaaacgccgacacucugugcauuggcuaucacgcgaauaacagcacggauaccguugacacaguguuggagaaaaauguaacugugacccauuccgucaacuuacuggaagauaagcacaaugggaaacuauguaagcucagaggaguggcuccccugcaucuugguaaaugcaacauagccggcuggauccuggggaauccugagugugaaucuuugucaacagcaaguagcugguccuacauuguugagaccucuucgucagacaacggaacuugcuauccaggcgauuuuaucaauuacgaagaacucagggagcagcugagcaguguguccucuuucgaagguuuugagauuuucccgaagacaagcuccuggcccaaccacgacucaaauaagggggucaccgccgcuuguccucaugcaggagccaaaaguuuuuauaagaaccugaucuggcucgugaaaaagggcaauagcuacccaaaauuaucuaaguccuauauaaacgauaagggcaaagaaguacugguucuuugggggauccaccaccccucaacgacugcugaccaacagagcuuguaccagaaugccgaugcguacguguucgucggaaccagucgguauucuaagaaauuuaagccugagauugcaauccgcccaaaagugcgagaccaggagggucguaugaacuacuauuggacacugauugaacccggcgauaagaucacuuucgaggccaccgggaaccuaguggucccuagauacgcuuuugccauggaaaggaaugcagaguccggaauaauuaucagcgacacaccaguucaugauugcaacaccacgugucaaacuccggaaggcgcuauuaauacaucgcuccccuuccagaacauccacccuaucaccauugguaaaugcccaaaguaugugaagucuacuaaacugcggcuugccacagggcugcgcaauguacccuccauacagucaagaggauuguuuggcgcgaucgccggcuucauugaagggggauggaccgguaugguggacggcugguacggguaucaucaccagaacgagcaaggaaguggcuacgcagcugaccucaagagcacgcagaaugccaucgauaaaauaaccaacaaggucaauuccgugauugagaaaaugaacacacaguuuacugcuguugguaaggaguucaaucaccuggaaaagaggaucgagaacuuaaauaaaaagguggacgauggguuccuggacaucuggaccuacaacgccgaacuccuuguccuguuggagaaugagcggacacuagauuaucaugacucuaacgugaaaaaccuguacgaaaagguacgcaaucagcucaaaaacaaugcaaaggagauuggcaacggauguuuugaguucuaucacaagugcgauaauacuuguauggagagcguuaaaaacggcaccuacgacuauccuaaguacucagaagaggccaaacugaaucgagagaagaucgauggggugaaacuugaaaguacaagaauuuaucaaauacuggcuaucuacuccaccgucgcgagcucuuuggugcucgucgugucacugggagcaauuaguuuuuggaugugcagcaacgguuccuuacagugcaggaucuguaucuga

SEQ ID NO: 137966 - RNA, 1701 nt, Artificial Sequence; identical to SEQ ID NO: 137931
  derived and/or modified CDS sequence (opt3) from hemagglutinin__InfluenzaA__AGG13973

SEQ ID NO: 137967 - RNA, 1701 nt, Artificial Sequence; identical to SEQ ID NO: 137931
  derived and/or modified CDS sequence (opt3) from hemagglutinin__InfluenzaA__AGG13985

SEQ ID NO: 137968 - RNA, 1701 nt, Artificial Sequence; identical to SEQ ID NO: 137931
  derived and/or modified CDS sequence (opt3) from hemagglutinin__InfluenzaA__AGG13997

SEQ ID NO: 137969 - RNA, 1701 nt, Artificial Sequence; identical to SEQ ID NO: 137931
  derived and/or modified CDS sequence (opt3) from hemagglutinin__InfluenzaA__AGG14009

SEQ ID NO: 137970 - RNA, 1701 nt, Artificial Sequence
  derived and/or modified CDS sequence (opt3) from hemagglutinin__InfluenzaA__AGG14021
augaagaccaucauugcccugagcuacauacucugccuuguguucgcucaggagcugcccggcaacgacgauuccacagcaacuuuguguuuagggcaccaugccgucccuaauggaacgaucguuaaaaccauuacaaacgaccaaaucgaagugacuaaugcgaccgagcugguacagucuucaaguacaggugaaauuugcaacagcccacaccagauccuagauggcgagaauuguacccucauagacgcucugcuuggggauccgcagugcgacggauuucaaaacaagaaaugggaucuguucguggaaagauccaaggcccauucuaauuguuaucccuacgacgucccugauuaugcaucguugaggucacucguggccagcaguggcacucuggaguuuaacaaugaguccuucaacuggacagguguuacccagaaugggacgucuagcgcuugcauccggcgcuccaacaauucauuuuucagucgacugaacuggcucacucacuuaaauuuuaaauacccagcacugaacgugaccaugcccaacaaugaacaguucgacaaacuuuauauuuggggaguccaucacccuggcacagauaaggaccagaucuuuuuguacgcccaagcuagcggccguauuacugugucuaccaagagaucccagcaggccguaaucccaaacauagggucaaggccccggguucgcaauauuccuagcagagugaguaucuauuggacaauugucaagccaggagauauccugcuaaucaacucuaccgguaaucucauugcgccgaggggcuacuucaaaauacgguccggaaagagcucgaucaugcgcucugacgcacccauugggaaauguaacuccgccugcaucacgccuaauggcucaauaccaaacgacaagcccuuucagaaugugaaccgaauuacuuacggugcuuguccuagauaugugaagcaaaauacacugaaacuugccaccgggaugaggaacgucccagagaagcagacucggggaaucuucggcgcaaucgcuggcuuuauugaaaaugggugggagggaaugguugaugguugguacggcuuccgucaccagaacagugaggggcgcggacaagccgcggaccugaaaagcacacaggccgcaaucgaucagauuaauggcaaguugaacagacucauagguaaaaccaacgaaaaguuccaucagaucgagaaagaauuuuccgagguggaagggaggauucaagaccuggagaaguauguagaggauacgaagaucgacuuauggucuuacaaugcugaacugcucguggcccuugagaaccagcacaccaucgaucugacagacagcgaaaugaauaaauuguucgagaagacuaaaaagcagcuacgggaaaacgcugaggauaugggcaauggaugcuuuaaaauuuaucauaagugugacaacgccugcauaggcucaauccgaaaugggaccuacgaucacgacgucuaucgcgacgaggcacugaacaauagauuccagauuaagggaaucgaacucaaaagugguuacaaggauuggauucuguggaucuccuuugccauaagcugcuuccuucuguguguggcuuugcucggcuuuaucaugugggcgugccaaaaagggaacauuagguguaauaucugcauuuga

SEQ ID NO: 137971 - RNA, 1701 nt, Artificial Sequence; identical to SEQ ID NO: 137932
  derived and/or modified CDS sequence (opt3) from hemagglutinin__InfluenzaA__AGG14033

SEQ ID NO: 137972 - RNA, 1701 nt, Artificial Sequence; identical to SEQ ID NO: 137951
  derived and/or modified CDS sequence (opt3) from hemagglutinin__InfluenzaA__AGG14318

SEQ ID NO: 137973 - RNA, 1701 nt, Artificial Sequence
  derived and/or modified CDS sequence (opt3) from hemagglutinin__InfluenzaA__AGG14330
augaagaccaucauugcccugagcuacauacucugccuuguguucgcucagaaacugcccggcaacgacaauuccacagcaacuuuguguuuagggcaccaugccgucccuaacggaacgaucguuaagaccauuacaaaugauagaaucgaggugacuaacgcgaccgaacugguacaaaauucuucaauuggugagaucugcgacaguccacaccagauacuagauggcgaaaacuguacacucaucgacgcucugcuuggggauccgcagugcgacggauuucagaauaaaaagugggaucuguucguggagaggagcaaagccuauuccaacuguuaccccuaugacgucccugauuacgcaucuuugcggucgcucguggccucaagcggcacccuggaauuuaauaacgagaguuucaauuggacugguguuacacaaaacgggaccuccucugcuugcauucgccgaagcaauuccucauuuuucagucgucugaacuggcucacgcauuuaaauuuuaaguauccagcacugaacgugacuaugcccaacaaugagcaguucgacaaacuuuacaucuggggaguccaccauccuggcaccgauaaagaccagaucuuuuuguaugcccagagcucuggcagaauuacaguguccacuaagaggucacaacaggcuguaauaccaaacauugggagccggccccgcaucagaaauauuccuaguaggaucucuaucuacuggaccauuguuaaaccaggagauauacugcuaaucaacuccacagguaaucucauugccccgcggggcuacuucaagauccgcagcgggaaaucgucuauaauucgauccgacgcgcccaucggaaaguguaagucagaaugcaucaccccuaacggcaguauuccaaaugacaaacccuuucagaacgugaauagaaucacguauggugcauguccuagguacgucaagcagagcacucugaaacuugccacagggaugcggaacgugccagagaagcaaacccguggaauuuucggcgcuauagccggcuuuaucgaaaaugggugggagggaaugguggaugguugguauggcuuccgccaccagaacuccgaggggagaggacaggcagcugaccugaaaucuacucaagccgcgauugaucagaucaauggcaaguugaacaggcucaucgguaaaacaaaugaaaaguuccaccagauugagaaggaauuuagcgaggucgaagggcggauacaggaccuggagaaauacguugaggauaccaagaucgacuuauggucauauaacgccgaacugcucguggcacuugagaaccaacauacgauugaucugaccgacagugaaaugaauaaauuguucgagaagacaaagaagcagcuacgagaaaacgcugaggauaugggcaauggaugcuuuaagaucuaccacaaaugugacaacgccugcauuggcuccauccgcaaugggacuuaugaucaugacguauacagagacgaggcucugaacaauagguuccagauaaagggaguggaacucaaaagcgguuacaaggauuggauccuguggauuucuuuugccaucucaugcuuccuucugugugucgcauugcucggcuuuauuaugugggccugccagaaagggaacauccgguguaauauaugcauuuga

SEQ ID NO: 137974 - RNA, 1701 nt, Artificial Sequence
  derived and/or modified CDS sequence (opt3) from hemagglutinin__InfluenzaA__AGG84179
augaagaccaucauugcccugagcuacauacucugccuuguguucgcucagaaacugcccggcaacgacaauuccacagcaacuuuguguuuagggcaccaugccgucccuaacggaacgaucguuaagaccauuacaaaugaucaaaucgaggugacuaacgcgaccgaacugguacagucuucaagugcuagcgagauuugcgacuccccacaccauauccuagauggugaaaauuguacacucauagacgcccugcuuggcgauccgcagugcgacggguuucagaacaaaaagugggaucuguucguggagagaucuagggcauauucgaauuguuaccccuaugacgucccugauuacgccucauugcggagccucguggcuaguuccggaacccuggaauuuaacaaugagucuuucaacuggacuggcguuacacaaaaugguaccagcuccgcaugcauccgccgaucaaacaauuccuuuuucagccgucugaacuggcucacgcacuuaaauuuuaaauauccagcccugaacgugacuaugcccaacaaugagcaguucgacaaacuuuacauuuggggaguccaucacccugggaccgauaaggaccagaucuuuuuguaugcucaggccucuggcagaauuacaguguccacuaaaaggucacaacaggcgguaaucccaaacauaggcagccggccccgcguuagaaauauuccuaguaggaucucuauuuacuggaccaucgugaagccaggggauauccugcuaauuaacuccacaggaaaucucauagcaccgcgggguuacuucaaaauccgcagcggcaagucgucuauuaugcgauccgacgcccccaucgggaaauguaacucagaaugcauaaccccuaauggaaguauuccaaacgacaagcccuuucagaaugucaacagaaucacguauggcgcuuguccuagguacgugaagcagagcacucugaaacuugccacagguaugcggaaugugccagagaagcaaacccgugggaucuucggagcaauugcuggcuuuaucgaaaacggcugggaggggaugauggauggaugguaugguuuccgccaccagaauagugagggcagagggcaggccgcggaccugaaaucuacucaagccgcaauugaucagauaaacggaaaguugaauaggcucaucggcaaaacaaacgaaaaguuccaucagauugagaaagaauuuagcgaggucgaaggucggauccaggaccuggagaaguacguugaggauaccaagaucgacuuauggucauauaacgcugaacugcucguggcccuugagaaucaacacacgauugaucugaccgacagugaaaugaacaaauuguucgagaagacaaagaagcagcuacgagaaaaugcugaggauauggggaacggcugcuuuaaaauauaccauaagugugacaaugccugcaucggauccauucgcaacggcacuuaugaucacgacguauacagagacgaggcacugaauaacagguuccagaucaaggggguggaacucaaaagcggauacaaggauuggauucuguggaucucuuuugccauaucaugcuuccuucugugugucgcuuugcucgguuuuaucaugugggcgugccagaaaggcaauauucgguguaacaucugcauuuga

SEQ ID NO: 137975 - RNA, 1704 nt, Artificial Sequence
  derived and/or modified CDS sequence (opt3) from hemagglutinin__InfluenzaA__AGI02564
auggagaagaucgugcugcuccuugccauugucagccugguuaaauccgaccagauaugcaucggcuaccacgcuaacaauucuaccgaacaaguggauacaauuauggagaagaacguaacugugacgcaugcacaggacaucuuggaaaagacccacaaugggaaguuaugugaucuggacggagucaaaccccuaauucucagagauugcucaguggccgguuggcugcuuggcaacccuaugugugacgaguucaucaauguuccagaauggaguuauauaguggagaaggcgaacccgacaaaugaucugugcuaccccgggaacuuuaaugacuaugaggaauugaagcaucuccugagcaggaucaaccacuucgagaaaauucagaucauuccuaaguccucuuggucgggacaugaggcuucaagcggcgucaguuccgccuguccauaccaggguacucccagcuuuuuccggaaugugguauggcugaucaaaaagaacaauaccuauccuacaauaaaacgcagcuacaacaauaccaaccaagaagaucucuuaauucugugggggauccaccacuccaacgacgcagccgagcagacuaaacuuuaucagaauccaacaaccuacauuucaguuggaacgaguacuuugaaccagcgacuggugcccaagaucgcuacccguagcaaagucaauggccaaucuggcagaauggauuucuucuggacaauccuaaagccuaacgacgcaauuaauuuugaauccaacgggaauuucauagccccagaguacgcuuauaaaaucgugaagaaaggagauucagccauuaugaagucugaaguggaguacgguaacugcaauacuaaaugucagaccccgaucggcgcgauaaacaguucuaugcccuuucauaauauucacccucucacaaucggggaaugcccaaaguaugucaaguccaacaaacugguucuugcaaccggacugaggaauagccccuugcgggagcgcagaaggaagcggggccucuucggugccaucgcuggguuuauugagggaggcuggcagggcaugguggacgggugguacggauaucaucacucgaacgaacaggguucuggcuacgccgcagacaaagaguccacgcaaaaggcuaucgaugggguaacuaauaaagugaacucaauuauagacaagaugaacacacaguucgaagccgucggacgcgaguuuaauaaccuggaacgaagaaucgagaauuuaaacaagaaaauggaggauggcuuccuggacguguggaccuauaaugcggaacuccuuguucugauggagaacgaaaggacuuuggauuuccacgacaguaaugugaagaaccuauacgauaaaguccggcugcagcuccguaauaacgccaaggagcuggguaauggguguuuugaauuuuaccauaaaugcgacaacgaguguauggagagcgugcgcaauggcacauaugauuacccucaauauuccgaagaggcaagacuuaagagggaagagauuucuggaguaaagcuggagagcaucggcaccuaccagaucuugucaauuuauaguacgguugcuuccagccucgcccuggcuauaaugguggccggguuaucucuguggaugugcucaaacggaagucuacagugccggaucuguauuuga

SEQ ID NO: 137976 - RNA, 1707 nt, Artificial Sequence
  derived and/or modified CDS sequence (opt3) from hemagglutinin__InfluenzaA__AGI02565
auggagaagaucgugcugcuccuugccauugucagccugguuaaauccgaccagauaugcaucggcuaccacgcuaacaauucuaccgaacaaguggauacaauuauggagaagaacguaacugugacgcaugcacaggacaucuuggaaaagacccacaaugggaaauuaugugaucuggacggagucaaaccccuaauucucagagauugcucaguggccgguuggcugcuuggcaacccuaugugugacgaguucaucaauguuccagaauggaguuauauaguggagaaggcgaucccggcuaacgaucugugcuaccccggggacuuuaaugauuaugaggaauugaagcaucuccugagcaggauuaaccacuucgagaaaauccagauuaucccuaaguccucuuggucgaaucaugaagccucacugggagucagcagugcauguccauaccucggcaaacccuccuuuuuccggaacgugguaugguuaauaaagaaaaauucuacauauccuacuauuaagcgcagcuacaacaauaccaaccaggaggaccugcuuguuuugugggguauccaccacccaaaugaugccgcugagcaaacaaagcuguaucagaaccccaccacuuacauuuccguggggacaucaacccuaaaccagcgacucgucccuaaaaucgcaacgcguaguaaggugaauggacagagcggcagaauggaauuuuucuggacuauccugaaaccaaacgacgccauuaauuuugagucuaacggcaauuucauagcuccggaauacgccuauaagaucgugaaaaagggggauuccgcgauuaugaaaucagagcuugaauacggaaacugcaauaccaagugucaaacacccaugggugcaaucaacagcaguaugccuuuucauaauauacacccacugacuauuggcgagugccccaaguaugucaaaucuaacagguugguucucgccaccgggcugcgcaauuccccucagggagagcggagaaggaagaaacggggcuuauucggugcuaucgccggguuuaucgaaggaggcuggcagggcaugguggacgggugguacggauaucaucacagcaacgagcaggguucgggcuacgcagcugacaaggaaucuacacaaaaagccauugaugggguaaccaauaaggugaacuccaucauugacaagaugaauacgcaguucgaggcggucggacgcgaauuuaacaaccuggagcgaagaauagagaaucucaacaaaaagauggaagauggcuuccuugacguguggacuuauaaugccgagcuguugguucuaauggaaaacgagaggacacuggauuuccacgacucaaaugugaaaaaccucuacgauaagguccggcugcagcuucgugacaaugcaaaagaacuggguaacggguguuuugaguucuaccauaagugcgauaaugaguguauggaaagugugcgcaacggcaccuaugacuacccacaauauagcgaggaagcuagauugaagagggaggagaucuccggaguaaaacucgaaucuauuggcacuuaccagauccugagcaucuauucaacaguugccaguuccuuagcucuggccauuaugguggcagggcuaagccucuggaugugcucuaauggaucacugcagugccggauauguaucuga

SEQ ID NO: 137977 - RNA, 1704 nt, Artificial Sequence
  derived and/or modified CDS sequence (opt3) from hemagglutinin__InfluenzaA__AGI02566
auggagaagaucgugcugcuccuugccauugucagccugguuaaauccgaccagauaugcaucggcuaccacgcuaacaauucuaccgaacaaguggauacaauuauggagaagaacguaacugugacgcaugcacaggacaucuuggaaaagacccacaaugggaaguuaugugaucuggacggagucaaaccccuaauucucagagauugcucaguggccgguuggcugcuuggcaacccuaugugugacgaguucaucaauguuccagaauggaguuauauaguggagaaggcgaacccggcuaaugaucugugcuaccccgggaacuuuaaugacuaugaggaauugaagcaucuccugagcaggaucaaccacuucgagaaaauucagaucauuccuaaguccucuuggucggaucaugaagccucaagcggagucaguuccgcauguccauaccagggcacacccagcuuuuuccggaaugugguauggcugaucaaaaagaacaauacuuauccuaccauaaaacgcucuuacaacaauacaaaccaagagaaccucuuaauucugugggguauccaccacuccaaugacgccgcugagcagauuaaacuuuaucagaacccaaccacuuacaucucaguugggacaaguaccuugaaucagcgacuggugcccaagaucgcaacgcguagcaaagucaacggacaaucuggcagaauggacuuuuucuggacuauucuaaagccuaaugaugccauaaacuuugaauccaauggcaacuucaucgcuccagaguacgccuauaaaauugugaaggaaggggauucagcgaucaugaaaagcgagguggaauacggaaauugcaacaccaagugucagacaccgauaggugcaauuaauaguucuaugcccuuucauaacauccacccucucacuaucggcgagugcccaaaauaugucaaguccaauaagcugguucuugccaccgggcugaggaacagccccuugcgggagcgcagaaggaaacggggacucuucggcgcuauugccgguuuuaucgaagggggauggcagggcaugguggacggcugguacggguaucaucacucgaaugagcagggaucugguuacgcagcugacaaggaauccacacaaaaagccauugauggcguaaccaacaaggugaacucaauaaucgacaaaaugaauacgcaguucgaggcggucgggcgcgaauuuaacaaucuggagcgaagaauugagaacuuaaauaagaagauggaagauggauuccuggacguguggacuuauaacgccgagcuccuuguucugauggaaaaugagaggacauuggauuuccacgacaguaacgugaaaaaucuauacgauaagguccggcugcagcuccgugacaacgcaaaagaacugggcaaugguuguuuugaguucuaccauaagugcgauaacgaguguauggaaagcgugcgcaaugggaccuaugacuacccucaauauuccgaggaagcuagacuuaaaagggaggagaucucuggcguaaagcuggaaagcaucggaacuuaccagauuuugucaauauauaguacaguugccuccagccucgcucuggccaucaugguggcaggcuuaucucuguggaugugcucaaacgggagucuacagugccggauuuguaucuga

SEQ ID NO: 137978 - RNA, 1707 nt, Artificial Sequence
  derived and/or modified CDS sequence (opt3) from hemagglutinin__InfluenzaA__AGI02567
auggagaagaucgugcugcuccuugccauugucagccugguuaaauccgaccagauaugcaucggcuaccacgcuaacaauucuaccgaacaaguggauacaauuauggagaagaacguaacugugacgcaugcacaggacaucuuggaaaagacccacaaugggaaauuaugugaucuggacggagucaaaccccuaauucucagagauugcucaguggccgguuggcugcuuggcaacccuaugugugacgaguuccugaauguuccagaauggaguuauaucguggagaaggcgaacccggcuaaugauuugugcuaccccgggaacuuuaaugacuaugaggaacucaagcaucugcugagcaggauaaaccacuucgagaaaauccagauuaucccuaaguccucuuggucggaucaugaagccucaagcggagucaguuccgcauguccauaccagggccggucuagcuuuuuccgcaaugugguauggcucauuaaaaagaacaaugccuaucccacaaucaaacgauccuacaacaauacuaaccaagaggacuuacugguucuuugggguauacaccacccuaacgaugcugcagagcagacccguuuguaucagaauccaacaaccuacauuucaguggggacaaguacucugaaccagaggcuaguccccaagaucgccaccagaagcaaggugaauggacaaucuggccggauggaauuuuucuggacgauucucaaaccuaacgacgcuaucaauuuugaguccaacggcaauuucaucgccccagaauacgcguauaagauugugaaaaagggggauucaacuauaaugaaaagcgagcuggaauacggaaacugcaauaccaagugucagacaccgaucggugcaauuaacaguucuaugcccuuucauaauauccacccucuuacuauaggcgagugcccaaaauaugucaaguccaaccgccugguuuuggccaccgggcucagaaauagcccccagggagagaggcggcgcaagaaacgaggccuguucggugcuauugccggguuuaucgaaggaggcuggcagggcaugguggacgggugguacggauaucaucacucgaacgagcaagguucuggcuacgcagcugacaaggaauccacacagaaagccaucgaugggguaaccaauaaggugaacucaauuaucgacaaaaugaacacgcaguucgaggcggucggaagagaauuuaauaacuuagagaggcggauugagaaucugaacaagaagauggaagauggcuuccucgacguguggacuuauaaugccgagcuucugguuuugauggaaaacgagcguacacuagauuuccacgacaguaaugugaaaaaccuguacgauaagguccgccuccaacugagagacaaugcaaaagaacuugguaacggguguuuugaguucuaccauaggugcgauaaugaguguauggaaagcgugcggaacggcaccuaugacuacccucaguauuccgaggaagcucgacugaagcgcgaggagauaucuggaguaaaauuggaaagcaucggcacuuaccagauucucucaaucuauaguacaguugccuccagccuggcuuuagccaucaugguggcagggcugucucuauggaugugcucaaauggaagucuccagugcagaauuuguauauga

SEQ ID NO: 137979 - RNA, 1704 nt, Artificial Sequence
  derived and/or modified CDS sequence (opt3) from hemagglutinin__InfluenzaA__AGI02568
auggagaagaucgugcugcuccuugccauugucagccugguuaaauccgaccagauaugcaucggcuaccacgcuaacaauucuaccgaacaaguggauacaauuauggagaagaacguaacugugacgcaugcacaggacaucuuggaaaagacccacaaugggaaguuaugugaucuggacggagucaaaccccuaauucucagagauugcucaguggccgguuggcugcuuggcaacccuaugugugacgaguucaucaauguuccagaauggaguuauauaguggagaaggcgaacccggcuaaugaucugugcuaccccgggaacuuuaaugacuaugaggaauugaagcaucuccugagcaggaucaaccacuucgagaaaauucagaucauuccuaaguccucuuggucggaucaugaagccucaagcggagucaguuccgcauguccauaccagggcacacccagcuuuuuccggaaugugguauggcugaucaaaaagaacaauacuuauccuaccauaaaacgcucuuacaacaauacaaaccaagagaaccucuuaauucugugggguauccaccacuccaaugacgccaccgagcagauuaaacuuuaucagaacccaacuacauacaucucaguugggaccaguacguugaaucagcgacuggugcccaagaucggaacucguagcaaagucaacggccaaucuggcagaauggacuuuuucuggaccauucuaaagccuaaugaugcuauaaacuuugaauccaaugggaacuucaucgcaccagaguacgccuauaaaauugugaaggaaggagauucagcuaucaugaaaagcgagguggaauacgguaauugcaacacaaagugucagacuccgauaggcgccauuaauaguucuaugcccuuucauaacauccacccucucaccaucggggagugcccaaaauaugucaaguccaauaagcugguucuugcgacaggacugaggaacagccccuugcgggagcgcagaaggaaacggggccucuucggugcaauugccggguuuaucgaaggaggcuggcagggcaugguggacgggugguacggauaucaucacucgaaugagcaggguucuggcuacgcugccgacaaggaauccacccaaaaagcaauugaugggguaacgaacaaggugaacucaauaaucgacaaaaugaauacucaguucgaggcugucggacgcgaauuuaacaaucuggagcgaagaauugagaacuuaaauaagaagauggaagauggcuuccuggacguguggacauauaacgccgagcuccuuguucugauggaaaaugagaggaccuuggauuuccacgacaguaacgugaaaaaucuauacgauaagguccggcugcagcuccgugacaacgcgaaagaacuggguaauggguguuuugaguucuaccauaagugcgauaacgaguguauggaaagcgugcgcaauggcacuuaugacuacccucaauauuccgaggaagccagacuuaaaagggaggagaucucuggaguaaagcuggaaagcaugggcaucuaccagauuuugucaauauauaguacaguugcauccagccucgcucuggccaucaugguggcuggguuaucucuguggaugugcucaaacggaagucuacagugccggauuuguaucuga

SEQ ID NO: 137980 - RNA, 1683 nt, Artificial Sequence
  derived and/or modified CDS sequence (opt3) from hemagglutinin__InfluenzaA__AGI60301
augaacacccagauccugguguucgcccucauugcuauaauccccacaaaugcagacaagauuugccuuggccaccaugccgucagcaacgggacuaaaguuaauacgcugaccgagagaggaguggaaguagugaacgcgacagagacugucgaaaggaccaauaucccucggauuuguuccaaggguaaacgcacaguggauuugggccaaugcggguuacugggaaccaucacuggcccaccgcagugugaccaguuucuagaguucucugcugaucucauaaucgaacgacgugaggguucagacguuugcuaccccgggaaguuugugaacgaggaagcccugagacagauucuuagggagaguggaggcaucgauaaagaagcaaugggcuucacauauagcgggauucggaccaauggagccacguccgcuugucgcagaucugguucgucauuuuacgcagagaugaaguggcuguugagcaacacugacaaugccgcuuucccucaaaugaccaagaguuauaaaaacacaaggaaguccccagcccucaucgucuggggcauacaccauucugugagcacugcggagcagaccaaacuguacggguccggaaauaagcugguaacaguuggcucaaguaacuaucagcagagcuuugugcccucuccuggugcacggccacaagucaaugggauuuccggacgcaucgauuuccacuggcucauguuaaaccccaaugacaccgugacguuuucauucaacggcgccuuuauugcuccugaucgagccagcuuccugagaggcaaaaguauggggauccagucuggagugcaggucgacgcaaacugcgaaggugauuguuaccauuccggcgggacuaucauuagcaaucuuccauuucagaacauagacucgagggcuguuggaaagugcccgcgguaugugaagcaacguucuuugcugcuagccacaggcaugaaaaauguacccgagaucccuaagggucgcgggcuuuucggcgcgauugccggauucaucgaaaacggcugggaggggcugauagauggaugguacgguuuuagacaccagaaugcacagggcgaagggaccgcugccgacuacaaauccacucaaucagcuauugaccagaucacaggaaagcucaacaggcugaucgagaaaaccaaucagcaguucgaguugauugauaacgaauuuaaugagguggaaaagcaaaucggcaacgucauuaauuggacgcgggacaguauaaccgagguguggagcuauaacgccgaacuccugguugcaauggagaaucagcacacaaucgauuuagccgacuccgagauggauaaacuguacgaacgagugaagcgccagcucagagagaacgcugaagaggacgguacuggguguuucgaaauuuuucauaagugcgaugacgauuguauggcgucuaucaggaauaacaccuaugaccacagcaaauaccgggaggaggcaaugcagaaccgcauccaaauugauccagucaaacuuucaaguggcuauaaggacgugauacugugguucuccuuuggagccagcugcuucaucuugcuagcuauuguaaugggccugguuuuuaucugcgugaagaaugggaacaugagauguacaauuugcaucuga

SEQ ID NO: 137981 - RNA, 1683 nt, Artificial Sequence
  derived and/or modified CDS sequence (opt3) from hemagglutinin__InfluenzaA__AGJ72861
augaacacccagauccugguguucgcccucauugcuauaauccccacaaaugcagacaagauuugccuuggccaccaugccgucagcaacgggacuaaaguuaauacgcugaccgagagaggaggugaagugguaaacgcgacagagacuguggaaaggaccaauaucccucggauuuguuccaagggcaaaaagacagucgauuuggggcaaggaggcccacgcgguaccaucacugggccgccccagugcgaccaguuuuuagaguucucugcugaucugauaauggaacgacgugagggaucagacguguguuacccuggcaaauuuguuaacgaggaagcccuaagacagauccucagggagaguggcgggauugauaaggaagcaaugggauucacauauagcgguauccggaccaauggcgccacguccgcuugccgcagaucugggucgucauuuuacgcagagaugaaguggcugcuuagcaacacugacaaugccgcuuucccacaaaugaccaaaaguuauaagaacacaaggaaaucccccgcccugauuguguggggaauccaccauucugucagcacugcggagcagaccaaguuguacggcuccgguaauaaacucgugacaguagggucaaguaacuaucagcagagcuuuguuccuucuccaggagcacggccccaagugaauggccaguccggccgcauagauuuccacuggcugaugcugaacccuaaugacaccgucacguuuucauucaacggggccuuuauugcuccagaucgagccagcuuccucagaggaaagaguauggguauccagucuggcguccagguggacgcaaacugugaaggggauugcuaccauuccggaggcacuauuaucagcaauuuaccguuucaaaacaucgacucgagggcuguggguaaguguccccgguauguuaaacagcguucucugcuuuuggccacagggaugaagaaugugccugagauuccaaaaggccgcggacuguucggcgcgauagccggguucaucgaaaacggaugggagggucuaauugauggcugguacggguuuagacaccagaaugcacaaggagaaggcaccgcugccgacuacaaguccacucagucagcuaucgaccagauaacagguaaacucaacaggcugauugagaagaccaaucagcaauucgagcuuaucgauaacgaauuuaaugagguagaaaaacagaucgggaacgugauuaauuggacgcgggacaguaucaccgaggucuggagcuauaacgccgaacuguugguggcaauggagaaucagcacacaauugaucucgccgacuccgagauggauaagcuguacgaacgaguuaagcgccaguuaagagagaacgcugaagaggacggcacuggaugcuucgaaauauuucauaaaugugaugacgauugcauggcgucuaucaggaauaacaccuaugaccacagcaaguaccgggaggaggcaaugcaaaaccgcauucagaucgaucccgugaaacugucaaguggcuauaaggacgucauccucugguucuccuuuggggccagcuguuucauucuucuggcuauagugaugggauugguauuuaucugcguuaaaaaugguaacaugagaugcacaauuuguaucuga

SEQ ID NO: 137982 - RNA, 1701 nt, Artificial Sequence
  derived and/or modified CDS sequence (opt3) from hemagglutinin__InfluenzaA__AGJ73327
augaaggccauccuggugguccuccuuuacaccuucgcuacagcaaacgccgacacucugugcauuggcuaucacgcgaauaacagcacggauaccguugacacaguguuggagaaaaauguaacugugacccauuccgucaacuuacuggaagauaagcacaaugggaaacuauguaagcucagaggaguggcuccccugcaucuugguaaaugcaacauagccggcuggauccuggggaauccugagugugaaucuuugucaacagcaaguagcugguccuacauuguugagaccucuucgucagacaacggaacuugcuauccaggcgauuuuaucaauuacgaagaacucagggagcagcugagcaguguguccucuuucgaacgguuugagauuuucccgaagacaagcuccuggcccaaccacgacucaaauaagggugucaccgccgcuuguccucaugcaggggccaaaaguuuuuauaagaaccugaucuggcucgugaaaaagggaaauagcuacccaaaauuaucuaaguccuauauaaacgauaagggcaaagaaguacugguucuuuggggcauccaccaccccucaacgacugcugaccaucaaagccuuuaccagaaugccgaugcguacguguucgucgggaccagucgcuauucuaagaaauuuaagccugagauugcaauccgaccaaaagugcgugaccaggagggaagaaugaacuacuauuggacacugauugaacccggugauaagaucacuuucgaggccaccggcaaccuaguggucccuagguacgcuuuugccauggaacggaaugcaggguccggaauaauuaucccagacacaccgguucacgauugcaacaccacgugucagacucccaaaggcgcuauuaauacaagccucccuuuccaaaacauccauccaaucaccauugguaagugccccaaguaugugaaaucgacuaagcugcgccuugccacagggcugagaaauguaccuucuauacaguccaggggauuguuuggcgcgaucgccggcuucauugaagggggauggaccgguaugguggacggcugguacggguaucaccaccagaacgaacagggaucaggcuacgcagcugaccucaaaaguacgcaaaaugccaucgauaagauaaccaacaaagucaauagcgugauugagaagaugaacacacaguuuacugcuguugguaaggaguucaaucaucuggaaaaacggaucgagaacuuaaauaagaaacuggacgauggguuccucgacaucuggaccuacaacgccgaacuucugguguugcuagagaaugaacgcacacuggauuaucacgacuccaacgucaagaaccucuacgagaaagugcgaaaucagcugaagaacaaugcaaaggagauuggcaacggauguuuugaguucuaucauaaaugcgauaauacuuguauggagucuguaaagaacggcaccuacgacuauccaaaauacagcgaagaggccaaguugaauagagagaaaaucgaugggguuaagcuggagucaacaaggauuuaucagauauuggcuaucuacaguaccguggcguccagccucguccugguggucucuuuaggagagauuucauuuuggaugugcaguaacgguagccugcaaugccggaucuguaucuga

SEQ ID NO: 137983 - RNA, 1701 nt, Artificial Sequence
  derived and/or modified CDS sequence (opt3) from hemagglutinin__InfluenzaA__AGJ73329
augaaggccauccuggugguccuccuuuacaccuucgcuacagcaaacgccgacacucugugcauuggcuaucacgcgaauaacagcacggauaccguugacacaguguuggagaaaaauguaacugugacccauuccgucaacuuacuggaagauaagcacaaugggaaacuauguaagcucagaggaguggcuccccugcaucuugguaaaugcaacauagccggcuggauccuggggaauccugagugugaaucuuugucaacagcaaguagcugguccuacauuguugagaccucuucgucagacaacggaacuugcuauccaggcgauuuuaucgacuacgaagaacucagggagcagcugagcaguguguccucuuucgaacgguuugagauuuucccgaagacaagcuccuggcccaaucacgauucaaacaagggugucaccgccgcuuguccucaugcaggggccaaaggauuuuauaagaaucugaucuggcucgugaaaaagggcaacaguuacccaaaauuaagcaagucuuauauaaaugacaagggcaaagaaguacugguucuuugggggauccaccaccccuccacgacugcugaucaacagucauuguaccagaacgccgacaccuacguguucgucggaacaagccgcuauaguaagaaauuuaagccugagauugcgauccgaccaaaagugcgugaucaggaggguagaaugaauuacuauuggacucugguggaacccggcgacaagauuaccuucgaggcaacagggaaccuagucguuccuagguacgccuuugcuauggaacggaacgccggaucuggcaucauaauuuccgaugcaccagugcaugacugcaauaccacgugucaaacuccgaaaggugcuaucaacacaagccuccccuuccagaauauucacccuaucaccaucgggaagugcccaaaguauguaaaaucgacuaagcugcgccuugccacaggacugagaaacgugcccucuauucaguccaggggcuuguuuggcgcgauagccggguucaucgagggagguuggaccggcauggucgacgggugguacggauaucaucaccagaaugaacaaggcucagguuacgcagcugaucucaaaaguacgcagaacgccauugacaagaucaccaauaaagugaacagcguuauagagaagaugaauacacaguuuacugcuguggggaaggaguucaaccaccuggaaaaacggauugagaauuuaaacaagaaagucgaugacggcuuccuggauaucuggaccuacaaugccgaacuccuugugcuguuggagaacgaacgcacacuagacuaucaugauuccaauguaaagaaccuguacgagaaaguucgaaaccagcucaagaauaacgcaaaggagaucggaaauggcuguuuugaguucuaucacaaaugcgacaacacuuguauggagucugugaagaaugggaccuacgauuauccuaaauacagcgaagaggccaagcugaacagagaagagauugacggagucaaacuugagucaacaaggaucuaucaaauucuggcuauauacaguaccguggcguccagcuugguccucgugguuucucugggugcaaucucauuuuggaugugcaguaauggcagcuuacagugccggauuuguaucuga

SEQ ID NO: 137984 - RNA, 1701 nt, Artificial Sequence
  derived and/or modified CDS sequence (opt3) from hemagglutinin__InfluenzaA__AGJ73331
augaaggccauccuggugguccuccuuuacaccuucgcuacagcaaacgccgacacucugugcauuggcuaucacgcgaauaacagcacggauaccguugacacaguguuggagaaaaauguaacugugacccauuccgucaacuuacuggaagauaagcacaaugggaaacuauguaagcucagaggaguggcuccccugcaucuugguaaaugcaacauagccggcuggauccuggggaauccugagugugaaucuuugucaacagcaaguagcugguccuacauuguugagaccucuucgucagacaacggaacuugcuauccaggcgauuuuaucgacuacgaagaacucagggagcagcugagcaguguguccucuuucgaacgguuugagauuuucccgaagacaagcuccuggcccaaucacgauucaaacaagggugucaccacggccuguccucaugcuggggcaaaaaguuuuuauaagaaucugaucuggcucgugaaaaagggaaacagcuacccaaaauuaucuaaguccuauauaaaugacaagggcaaagaaguacugguucuuuggggcauccaccaucccccuacuucagccgaucaacagagcuuguaccagaacgcugacgccuacguguucgucgggaccagucgcuauucuaagaaauuuaagccagagauugcgauccgacccaaagugcguggacaggaggguagaaugaauuacuauuggacacugguggaaccuggcgauaagauuacuuucgaggcaaccgggaaccuagucguuccaagguacgccuuugcuauggaacggaacgccggauccggcaucauaauuagcgacacaccggugcacgauugcaauaccacgugucaaacucccaaaggugcaaucaacacaucgcucccuuuccagaauauucacccaaucaccaucgggaagugccccaaguauguaaaaucuacuaagcugcgccuugcuacaggacugagaaacgugccuuccauucagucaaggggcuuguuuggcgccauagcgggguucaucgagggagguuggaccggcauggucgacgggugguacggauaucaucaccagaaugaacaaggcagugguuacgccgcagaccucaaaagcacgcagaacgcuauugaugagaucaccaauaaggugaacuccguuauagagaaaaugaauacacaguuuacugccguggggaaggaguucaaccaccuggagaagcggauugaaaauuuaaacaaaaaggucgacgauggcuuccuggacaucuggaccuacaaugcugagcuccuugugcuguuggaaaacgagcgcacacuagauuaucaugacucuaaaguaaagaaucuguacgagaaaguucgaagccagcucaagaacaacgccaaggaaaucggaaauggcuguuuugaguucuaucacaaaugcgauaacacuuguauggaaucagugaagaaugggaccuacgacuauccaaaauacagugaggaagcaaagcugaacagagaggagauugauggagucaaacuugaauccacaaggaucuaucaaauucuggccauauacagcaccguggcuucuucauugguccucgugguuagucugggugcgaucagcuuuuggaugugcuccaauggcucuuuacagugccggauuuguaucuga

SEQ ID NO: 137985 - RNA, 1701 nt, Artificial Sequence
  derived and/or modified CDS sequence (opt3) from hemagglutinin__InfluenzaA__AGJ73333
augaaggccauccuggugguccuccuuuacaccuucgcuacagcaaacgccgacacucugugcauuggcuaucacgcgaauaacagcacggauaccguugacacaguguuggagaaaaauguaacugugacccauuccgucaacuuacuggaagauaagcacaaugggaaacuauguaagcucagaggaguggcuccccugcaucuugguaaaugcaacauagccggcuggauccuggggaauccugagugugaaucuuugucaacagcaaguagcugguccuacauuguugagaccucuucgucagacaacggaacuugcuauccaggcgauuuuaucgacuacgaagaacucagggagcagcugagcaguguguccucuuucgaacgguuugagauuuucccgaagacaagcuccuggcccaaucacgauucaaacaagggugucaccgccgcuuguccucaugcaggggccaaaggauuuuauaagaaucugaucuggcucgugaaaaagggcaacaguuacccaaaauuaagcaagucuuauauaaaugacaagggcaaagaaguacugguucuuugggggauccaccaccccuccacgucagcugaucaacagagcuuguaccagaacgccgacacuuacguguucgucggaaccagucgcuauucuaagaaauuuaagccugagauugcgauccgaccaaaagugcgugaucaggaggguagaaugaauuacuauuggacacugguggaacccggcgacaagauuacuuucgaggcaaccgggaaccuagucguuccuagguacgccuuugcuauggaacggaacgccggauccggcaucauaauuagcgauacaccagugcaugacugcaauaccacgugucaaacuccgaaaggugcaaucaacacaucgcuccccuuccagaauauucacccuaucaccaucgggaagugcccaaaguauguaaaaucuacuaagcugcgccuugcuacaggacugagaaacgugcccuccauucagucaaggggcuuguuuggcgccauagcgggguucaucgagggagguuggaccggcauggucgacgggugguacggauaucaucaccagaaugaacaaggcagugguuacgccgcagaucucaaaagcacgcagaacgcuauugacaagaucaccaauaaagugaacuccguuauagagaagaugaauacacaguuuacugccguggggaaggaguucaaccaccuggaaaaacggauugagaauuuaaacaagaaagucgaugacggcuuccuggauaucuggaccuacaaugcugaacuccuugugcuguuggagaacgaacgcacacuagacuaucaugauucuaauguaaagaaccuguacgagaaaguucgaaaccagcucaagaauaacgccaaggagaucggaaauggcuguuuugaguucuaucacaaaugcgacaacacuuguauggagagcgugaagaaugggaccuacgauuauccuaaauacucagaagaggcaaagcugaacagagaagagauugacggagucaaacuugagaguacaaggaucuaucaaauucuggccauauacuccaccguggcuagcucuuugguccucgugguuucacugggugcgaucaguuuuuggaugugcagcaauggcuccuuacagugccggauuuguaucuga

SEQ ID NO: 137986 - RNA, 1701 nt, Artificial Sequence
  derived and/or modified CDS sequence (opt3) from hemagglutinin__InfluenzaA__AGJ73335
augaaggccauccuggugguccuccuuuacaccuucgcuacagcaaacgccgacacucugugcauuggcuaucacgcgaauaacagcacggauaccguugacacaguguuggagaaaaauguaacugugacccauuccgucaacuuacuggaagauaagcacaaugggaaacuauguaagcucagaggaguggcuccccugcaucuugguaaaugcaacauagccggcuggauccuggggaauccugagugugaaucuuugucaacagcaaguagcugguccuacauuguugagaccucuucgucagacaacggaacuugcuauccaggcgauuuuaucgacuacgaagaacucagggagcagcugagcaguguguccucuuucgaacgguuugagauuuucccgaagacaagcuccuggcccaaucacgauucaaacaagggugucaccgccgcuuguccucaugcaggggccaaaaguuuuuauaagaaucugaucuggcucgugaaaaagggaaacagcuacccaaaauuaucuaaguccuauauaaaugacaagggcaaagaaguacugguucuuuggggcauccaccaccccucaacgacugcugaucaacagagcuuguaccagaacgccgacaccuacguguucgucgggacaagucgcuauucuaagaaauuuaagccugagauugcgauccgaccaaaagugcgugaucaggagggaagaaugaauuacuauuggacucugguggaacccagggacaagauuaccuucgaggcaacagguaaccuagucguuccucgguacgccuuugcuauggaacgcaacgccggcuccgggaucauaauuagcgauaccccagugcaugacugcaauacgacuugucaaacaccgaaaggagcaaucaacaccucgcuccccuuccagaauauucacccuaucacuaucggcaagugcccaaaguauguaaaaucuacaaagcugagacuugcuaccggucugaggaacgugcccuccauucagucacggggguuguuuggagccauagcgggcuucaucgagggcggguggacgggaauggucgacgguugguacggcuaucaucaccagaaugaacaagggaguggauacgccgcagaucucaaaagcacccagaacgcuauugacaagaucacaaauaaagugaacuccguuauagagaagaugaauacucaguuuaccgccgugggcaaggaguucaaccaccuggaaaaacgcauugagaauuuaaacaagaaagucgaugacgguuuccuggauaucuggacauacaaugcugaacuccuugugcuguuggagaacgaacgaacucuagacuaucaugauucuaauguaaagaaccuguacgagaaaguuagaaaccagcucaagaauaacgccaaggagaucgggaauggcuguuuugaguucuaucacaaaugcgacaacaccuguauggagagcgugaagaauggaacauacgauuauccuaaauacucagaagaggcaaagcugaacagggaagagauugacggcgucaaacuugagaguacccggaucuaucaaauucuggccauauacuccacuguggcuagcucuuugguccucgugguuucacugggggcgaucaguuuuuggaugugcagcaauggauccuuacagugccguauuuguaucuga

SEQ ID NO: 137987 - RNA, 1701 nt, Artificial Sequence; identical to SEQ ID NO: 134502
  derived and/or modified CDS sequence (opt3) from hemagglutinin__InfluenzaA__AGJ73337

SEQ ID NO: 137988 - RNA, 1701 nt, Artificial Sequence; identical to SEQ ID NO: 134502
  derived and/or modified CDS sequence (opt3) from hemagglutinin__InfluenzaA__AGJ73339

SEQ ID NO: 137989 - RNA, 1701 nt, Artificial Sequence; identical to SEQ ID NO: 134502
  derived and/or modified CDS sequence (opt3) from hemagglutinin__InfluenzaA__AGJ73341

SEQ ID NO: 137990 - RNA, 1701 nt, Artificial Sequence
  derived and/or modified CDS sequence (opt3) from hemagglutinin__InfluenzaA__AGJ73343
augaaggccauccuggugguccuccuuuacaccuucgcuacagcaaacgccgacacucugugcauuggcuaucacgcgaauaacagcacggauaccguugacacaguguuggagaaaaauguaacugugacccauuccgucaacuuacuggaagauaagcagaaugggaaacuauguaagcucagaggaguggcuccccugcaccuugguaaaugcaacauagccggcuggauccuggggaauccugagugugaaucuuugucaacagcaaguagcugguccuacauuguugagaccucuucgucagacaacggaacuugcuauccaggcgauuuuaucaauuacgaggagcucagggagcaacugagcaguguguccucuuucgaacgguuugagauuuucccgaagacaagcuccuggcccaaccaugacucaaauaagggugucaccgccgcuuguccucacgcaggggccaaaaguuuuuauaagaaccugaucuggcucgugaaaaagggaaauagcuacccaaaauuaucuaaguccuauauaaacgauaagggcaaagaaguacugguucuuuggggcauccaucaccccucaacgagcgcugaccagcagaguuuguaccagaaugccgaugcguacguguucgucgggacuucuaaguauuccaaaaaguuuaaaccugagauugcagugcgcccaaaggugcgagaccaagagggacguaugaacuacuauuggacccuggucgaacccggugauaaaaucacauucgaggccacuggcaaccuacucguuccuagauacgcuuuugccauggaaaggaaugcagggagcggaauuaucauaucggacaccccagugcacgauugcaacacaaccugucagacgccgaagggcgcuauuaauacuucucugcccuuccagaacauccauccuauuacaaucgguaagugcccaaaauauguaaaguccaccaaacuucggcuggccacuggguugcgcaaugugcccucaauccagaguagaggacucuuuggcgcgauugccggcuucauagaagggggauggacagguauggucgacggcugguacggguaucaccaucaaaacgaacagggaagcggcuacgcagcugaccugaaguccacccagaaugccaucgauaaaauuacgaacaagguaaauucuguuaucgagaagaugaacacccaguuuacagcuguggguaaagaguucaaucacuuagaaaagaggauagagaaccugaauaaaaaggucgacgauggguuccucgacauuuggacuuacaacgccgaacuucugguguugcuagagaaugaacggacccuggauuaucacgacagcaacgugaaaaaccucuacgagaagguucgcucacaacugaagaauaacgcaaaagagaucggcaauggauguuuugaguucuaucauaagugcgauaacacauguauggaaagugugaaaaauggcacuuacgacuauccuaaguacuccgaagaggccaaacuuaaccgagaagagaucgauggggucaagcuggagagcaccagaauuuaucagaucuuggcuauuuacucuacaguggcgucaagucucguccuggugguuagcuuaggagcaauauccuuuuggaugugcucuaaugguucgcugcagugcaggaucuguauuuga

SEQ ID NO: 137991 - RNA, 1701 nt, Artificial Sequence
  derived and/or modified CDS sequence (opt3) from hemagglutinin__InfluenzaA__AGJ73345
augaaggccauccuggugguccuccuuuacaccuucgcuacagcaaacgccgacacucugugcauuggcuaucacgcgaauaacagcacggauaccguugacacaguguuggagaaaaauguaacugugacccauuccgucaacuuacuggaagauaagcacaaugggaaacuauguaagcucagaggaguggcuccccugcaucuugguaaaugcaacauagccggcuggauccuggggaauccugagugugaaucuuugucaacagcaaguagcugguccuacauuguugagaccucuucgucagacaacggaacuugcuauccaggcgauuuuaucaauuacgaagaacucagggagcagcugagcaguguguccucuuucgaacgguuugagauuuucccgaagacaagcuccuggcccaaccacgacucaaauaagggugucaccgccgcuuguccucaugcaggggccaaaaguuuuuauaagaaccugaucuggcucgugaaaaagggaaauagcuacccaaaauuaucuaaguccuauauaaacgauaagggcaaagaaguacugguucuuuggggcauccaccaccccucaacgagcgcugaccaacagaguuuguaccagaaugaggaugccuacguguucgucgggacuucuaaguauuccaaaaaguuuaaaccugagauugcggugcgcccaaaggugcgagaccaggaaggacguaugaacuacuauuggacccuggucgagcccgguaacaaaaucacauucgaagcaacuggcaaucuacucguuccuagauacgccuuugcuauggagaggaacgccgggagcggaauuaucauaucggauaccccagugcaugacugcaauacaaccugucaaacgccgaagggcgcaauuaacacuucucugcccuuccagaauauccacccuauuacaaucgguaagugcccaaaauauguaaaguccaccaaacuucggcuggcuacuggguugcgcaacgugcccucaauccagaguagaggacucuuuggcgccauugcgggcuucauagaagggggauggacagguauggucgauggcugguacggguaucaucaccagaaugagcaaggaagcggcuacgccgcagaccugaaguccacccagaacgcuaucgacaaaauuacgaauaaggugaacucuguuaucgagaagaugaauacccaguuuacagccguggguaaagaguucaaccacuuagagaagaggauagaaaaucugaacaaaaaggucgaugacggguuccucgauauuuggacuuacaaugcugagcuucugguguugcuagaaaacgagcggacccuggacuaucaugauagcaacguuaaaaaucucuacgagaagguacgcucacagcugaagaacaaugccaaagaaaucggcaacggauguuuugaguucuaucacaagugcgacaauacauguauggaaagugugaaaaacggcacuuacgauuauccuaaguacuccgaggaagcaaaacuuaaucgagaggagaucgacggggucaagcuggaaagcaccagaauuuaucaaaucuuggccauuuacucuacaguggcuucaagucucguccuggugguuagcuuaggagcgauauccuuuuggaugugcucuaacgguucgcugcagugcaggaucuguauuuga

SEQ ID NO: 137992 - RNA, 1701 nt, Artificial Sequence; identical to SEQ ID NO: 135098
  derived and/or modified CDS sequence (opt3) from hemagglutinin__InfluenzaA__AGJ73347

SEQ ID NO: 137993 - RNA, 1701 nt, Artificial Sequence; identical to SEQ ID NO: 135098
  derived and/or modified CDS sequence (opt3) from hemagglutinin__InfluenzaA__AGJ73349

SEQ ID NO: 137994 - RNA, 1701 nt, Artificial Sequence
  derived and/or modified CDS sequence (opt3) from hemagglutinin__InfluenzaA__AGJ73351
augaaggccauccuggugguccuccuuuacaccuucgcuacagcaaacgccgacacucugugcauuggcuaucacgcgaauaacagcacggauaccguugacacaguguuggagaaaaauguaacugugacccauuccgucaacuuacuggaagauaagcacaaugggaaacuauguaagcucagaggaguggcuccccugcaucuugguaaaugcaacauagccggcuggauccuggggaauccugagugugaaucuuugucaacagcaaguagcugguccuacauuguugagaccucuucgucagacaacggaacuugcuauccaggcgauuuuaucgacuacgaagaacucagggagcagcugagcaguguguccucuuucgaacgguuugagauuuucccgaagacaagcuccuggcccaaucacgauucaaacaagggugucaccgccgcuuguccucaugcaggggccaaaggauuuuauaagaaucugaucuggcucgugaaaaagggcaacaguuacccaaaauuaagcaagucuuauauaaaugacaagggcaaagaaguacugguucuuugggggauccaccaccccuccacgacugcugaucaacagucauuguaccagaacgccgacaccuacguguucgucggaacaagccgcuauaguaagaaauuuaagccugagauugcgauccgaccaaaaaugcgugaucaggaggguagaaugaauuacuauuggacucugguggaacccggcgacaagauuaccuucgaggcaacagggaaccuaguggucccuagguacgccuuugcuauggaacggaacgccggaucuggcaucauaauuuccgauaccccaguucaugacugcaauacgacuugucaaacaccgaaaggugcaaucaacaccagccuccccuuccagaauauucacccuaucacuaucgggaagugcccaaaguaugugaaaucgacaaagcugcgccuugcuaccggacugagaaacguacccucuauucaguccaggggcuuguuuggcgccauagcgggguucaucgagggagguuggacgggcaugguggacgggugguacggauaucaucaccagaaugaacaaggcucagguuacgccgcagaucucaaaaguacccagaacgcuauugacaagaucacaaauaaagucaacagcgugauagagaagaugaauacucaguuuaccgccguugggaaggaguucaaccaccuggaaaaacggauugagaauuuaaacaagaaaguggaugacggcuuccuggauaucuggacauacaaugcugaacuccuuguccuguuggagaacgaacgcacucuagacuaucaugauuccaaugugaagaaccuguacgagaaaguacgaaaccagcucaagaauaacgccaaggagaucggaaauggcuguuuugaguucuaucacaaaugcgacaacaccuguauggagucuguuaagaaugggacauacgauuauccuaaauacagcgaagaggcaaagcugaacagagaagagauugacggagugaaacuugagucaaccaggaucuaucaaauucuggccauauacaguacugucgcuuccagcuuggugcucgucgugucucugggugcgaucucauuuuggaugugcaguaauggcagcuuacagugccggauuuguaucuga

SEQ ID NO: 137995 - RNA, 1701 nt, Artificial Sequence
  derived and/or modified CDS sequence (opt3) from hemagglutinin__InfluenzaA__AGJ73353
augaaggccauccuggugguccuccuuuacaccuucgcuacagcaaacgccgacacucugugcauuggcuaucacgcgaauaacagcacggauaccguugacacaguguuggagaaaaauguaacugugacccauuccgucaacuuacuggaagauaagcacaaugggaaacuauguaagcucagaggaguggcuccccugcaucuugguaaaugcaacauagccggcuggauccuggggaauccugagugugaaucuuugucaacagcaaguagcugguccuacauuguugagaccucuucgucagacaacggaacuugcuauccaggcgauuuuaucaauuacgaggagcucagggagcagcugagcaguguguccucuuucgaacgguuugagauuuucccgaagacaagcuccuggcccaaccacgacucaaauaagggugucaccgccgcuuguccucaugcaggggccaaaaguuuuuauaagaaccugaucuggcucgugaaaaagggaaauagcuacccaaaauuaucuaaguccuauauaaacgauaagggcaaagaaguacugguucuuuggggcauccaccaccccucaacgagcgcugaccaacagaguuuguaccagaaugccgaugcguacguguucgucgggacuucuaaguauuccaaaaaguuuaaaccugagauugcagugcgcccaaaggugcgagaccaggagggacguaugaacuacuauuggacccuggucgaacccggugauaaaaucacauucgaggccacuggcaaccuacucguuccuagauacgcuuuugccauggaaaggaaugcagggagcggaauuaucauaucggacaccccagugcaugauugcaacacaaccugucaaacgccgaagggcgcuauuaauacuucucugcccuuccaguccauccacccuauuacaaucgguaagugcccaaaauauguaaagucaaccaaacuucggcuggccacuggguugcgcaacgugcccaguauccagagcagaggacucuuuggcgcgauugccggcuucauagaagggggauggacagguauggucgacggcugguacggguaucaucaccagaaugaacaaggauccggcuacgcagcugaccugaagucuacccagaacgccaucgauaaaauuacgaauaaggugaacagcguuaucgagaagaugaauacccaguuuacagcuguggguaaagaguucaaccacuuagaaaagaggauagagaaucugaacaaaaaggucgacgauggguuccucgacauuuggacuuacaaugccgaacuucugguguugcuagagaacgaacggacccuggauuaucaugacucaaauguuaaaaaccucuacgagaagguacgcagucagcugaagaacaaugcaaaagagaucggcaacggauguuuugaguucuaucacaagugcgauaauacauguauggaauccgugaaaaacggcacuuacgacuauccuaaguacagcgaagaggccaaacuuaaucgagaagagaucgauggggucaagcuggagucuaccagaauuuaucaaaucuuggcuauuuacucaacaguggcgaguagccucguccuggugguuuccuuaggagcaauaucuuuuuggaugugcucgaacgguagccugcagugcaggaucuguauuuga

SEQ ID NO: 137996 - RNA, 1701 nt, Artificial Sequence
  derived and/or modified CDS sequence (opt3) from hemagglutinin__InfluenzaA__AGJ73355
augaaggccauccuggugguccuccuuuacaccuucgcuacagcaaacgccgacacucugugcauuggcuaucacgcgaauaacagcacggauaccguugacacaguguuggagaaaaauguaacugugacccauuccgucaacuuacuggaagauaagcacaaugggaaacuauguaagcucagaggaguggcuccccugcaucuugguaaaugcaacauagccggcuggauccuggggaauccugagugugaaucuuugucaacagcaaguagcugguccuacauuguugagaccucuucgucagacaacggaacuugcuauccaggcgauuuuaucgacuacgaagaacucagggagcagcugagcaguguguccucuuucgaacgguuugagauuuucccgaagacaagcuccuggcccaaucacgauucaaacaagggugucaccgccgcuuguccucaugcaggggccaaaggauuuuauaagaaucugaucuggcucgugaaaaagggcaacaguuacccaaaauuaagcaagucuuauauaaaugacaagggcaaagaaguacugguucuuugggggauccaccaccccuccacgacugcugaucaacagucauuguaccagaacgccgacaccuacguguucgucggaacaagccgcuauaguaagaaauuuaagccugagauugcgauccgaccaaaagugcgugaucaggaggguagaaugaauuacuauuggacucugguggaacccggcgacaagauuaccuucgaggcaacagggaaccuagucguuccuagguacgccuuugcuauggaacggaacgccggaucuggcaucauaauuuccgauaccccagugcaugacugcaauacgacuugucaaacaccgaaaggugcaaucaacaccagccuccccuuccagaauauucacccuaucacuaucgggaagugcccaaaguauguaaaaucgacaaagcugcgccuugcuaccggacugagaaacgugcccucuauucaguccaggggcuuguuuggcgccauagcgggguucaucgagggagguuggacgggcauggucgacgggugguacggauaucaucaccagaaugaacaaggcucagguuacgccgcagaucucaaaaguacccagaacgcuauugacaagaucacaaauaaagugaacagcguuauagagaagaugaauacucaguuuaccgccguggggaaggaguucaaccaccuggaaaaacggauugagaauuuaaacaagaaagucgaugacggcuuccuggauaucuggacauacaaugcugaacuccuugugcuguuggagaacgaacgcacucuagacuaucaugauuccaauguaaagaaccuguacgagaaaguucgaaaccagcucaagaauaacgccaaggagaucggaaauggcuguuuugaguucuaucacaaaugcgacaacaccuguauggagucugugaagaaugggacauacgauuauccuaaauacagcgaagaggcaaagcugaacagagaagagauugacggagucaaacuugagucaaccaggaucuaucaaauucuggccauauacaguacuguggcuuccagcuugguccucgugguuucucugggugcgacgucauuuuggaugugcaguaauggcagcuuacagugccggaucuguauuuga

SEQ ID NO: 137997 - RNA, 1701 nt, Artificial Sequence; identical to SEQ ID NO: 134915
  derived and/or modified CDS sequence (opt3) from hemagglutinin__InfluenzaA__AGJ73357

SEQ ID NO: 137998 - RNA, 1701 nt, Artificial Sequence
  derived and/or modified CDS sequence (opt3) from hemagglutinin__InfluenzaA__AGJ73361
augaaggccauccuggugguccuccuuuacaccuucgcuacagcaaacgccgacacucugugcauuggcuaucacgcgaauaacagcacggauaccguugacacaguguuggagaaaaauguaacugugacccauuccgucaacuuacuggaagauaagcacaaugggaaacuauguaagcucagaggaguggcuccccugcaucuugguaaaugcaacauagccggcuggauccuggggaauccugagugugaaucuuugucaacaaguagcuccuggucuuacauuguugagaccucgucaagcgacaacggaacuugcuauccaggcgauuuuaucgacuacgaggaacucagggagcagcugaguuccgugucuagcuucgaacgguuugagauuuucccgaagacauccucauggcccaaucacgauaguaacaagggugucaccgcagccuguccucaugcuggggcaaaaggauuuuauaagaaucugaucuggcucgugaaaaagggcaacagcuacccaaaauuaucuaaguccuauauaaaugacaagggcaaagaaguacugguucuuugggggauccaccaccccucaacgacugccgaucaacagagcuuguaccagaacgcugacaccuacguguucgucggaacaagucgcuauucuaagaaauuuaagccugagauugccauccgaccaaaagugcgugaucaggaggguagaaugaauuacuauuggacucugguggaacccggcgacaagauuaccuucgaggcgacagggaaccuagucguuccuagguacgcauuugccauggaacggaacgcuggauccggcaucuucauaagcgauaccccagugcaugacugcaauacgacuugucaaacaccgaaaggugccauuaacaccucgcuccccuuucagaauauccacccuauuacuaucgggaagugcccaaaguauguaaaaucuacaaagcugcgccuugcaaccggacugagaaacgugcccuccauccagucaaggggcuuguucggcgcuauugccggguuuauagagggagguuggacgggcauggucgacgggugguacggauaucaucaccagaaugaacaaggcagugguuacgcggccgaucucaaaagcacccagaacgcaaucgacaagauuacaaauaaagugaacuccguuaucgagaagaugaauacucaguucaccgcuguggggaaggaguucaaccaccuggaaaaacggauagagaauuuaaacaagaaagucgaugacggcuuucuggauauuuggacauacaaugccgaacuccuugugcuguuggagaacgaacgcacucuagacuaucaugauucuaauguaaagaaccuguacgagaaaguucgaaaccagcucaagaauaacgcuaaggagaucggaaauggcuguuucgaauuuuaucacaaaugcgacaacaccuguauggagagcgugaagaaugggacauacgauuauccuaaauacucagaagaggccaagcugaacagagaagagaucgacggagucaaacuugagaguaccaggauuuaucaaauccuggcaauuuacuccacuguggccagcucuuugguccucgugguuucacugggugcuauaaguuucuggaugugcagcaauggcuccuuacagugccggaucuguauuuga

SEQ ID NO: 137999 - RNA, 1701 nt, Artificial Sequence; identical to SEQ ID NO: 135098
  derived and/or modified CDS sequence (opt3) from hemagglutinin__InfluenzaA__AGJ73363

SEQ ID NO: 138000 - RNA, 1701 nt, Artificial Sequence; identical to SEQ ID NO: 134915
  derived and/or modified CDS sequence (opt3) from hemagglutinin__InfluenzaA__AGJ73365

SEQ ID NO: 138001 - RNA, 1701 nt, Artificial Sequence
  derived and/or modified CDS sequence (opt3) from hemagglutinin__InfluenzaA__AGJ73367
augaaggccauccuggugguccuccuuuacaccuucgcuacagcaaacgccgacacucugugcauuggcuaucacgcgaauaacagcacggauaccguugacacaguguuggagaaaaauguaacugugacccauuccgucaacuuacuggaagauaagcacaaugggaaacuauguaagcucagaggaguggcuccccugcaucuugguaaaugcaacauagccggcuggauccuggggaauccugagugugaaucuuugucaacagcaaguagcuggccauacauuguugagaccuccucuucggacaacggaacuugcuauccgggcgauuuuaucaauuacgaggagcucagggagcagcugucaagcgugaguuccuucgaacgguuugagauuuuccccaagacaucuagcuggccuaaccacgacuccaauaagggugucgccgcugcauguccacaugccggggcuaaaucauuuuauaagaaccugaucuggcucgugaaaaagggaaauaguuaccccaaauuaagcaagucuuauauaaacgauaagggcaaagaaguacugguucuuuggggcauccaccacccuuccaccucagccgaccaacagagcuuguaccagaaugcggaugcauacguguucgucgggacgaguaaguauucuaaaaaguuuaaaccagagauugccgugcgccccaaggugcgagaccaggagggacguaugaacuacuauuggacucuggucgaaccuggugauaaaaucaccuucgaggcuacaggcaaccuacucguuccaagauacgccuuugcaauggaaaggaaugcuggguccggaauuaucauaagcgacacuccggugcaagauugcaacaccacaugucagacccccaagggcgccauuaauacgucgcugccuuuccagaacauccauccaauuacuaucgguaagugccccaaauauguaaagucuacaaaacuucggcuggcgaccggguugcgcaaugugccuuccauccagucaagaggacucuuuggcgccauugcaggcuucauagaagggggauggacugguauggucgacggcugguacggguaucaccaucaaaacgaacagggaaguggcuacgcugccgacuuaaagagcacacagaaugcuaucgauaaaauuaccaacaagguaaauuccguuaucgagaagaugaacacgcaguuuaccgccguggguaaagaguucaaucaccuggaaaagaggauagagaaccugaauaaaaaggucgacgauggguuccucgacauuuggacauacaacgcagaacuucugguguugcuagagaaugaacggacucuggauuaucacgacucuaacgugaaaaaccucuacgagaagguucgcaaucaacugaagaacaaugccaaagagaucggcaacggauguuuugaguucuaucauaagugcgauaauaccuguauggaaagcgugaaaaacggcacauacgacuauccaaaguacucagaagaggcuaaacuuaaucgagaagagaucgauggggucaagcuggagaguacuagaauuuaucagaucuuggcgauuuacuccaccguggcaagcucucucguccuggugguuucauuaggagccauaaguuuuuggaugugcagcaacgguucccugcagugcaggaucuguauuuga

SEQ ID NO: 138002 - RNA, 1701 nt, Artificial Sequence
  derived and/or modified CDS sequence (opt3) from hemagglutinin__InfluenzaA__AGJ73369
augaaggccauccuggugguccuccuuuacaccuucgcuacagcaaacgccgacacucugugcauuggcuaucacgcgaauaacagcacggauaccguugacacaguguuggagaaaaauguaacugugacccauuccgucaacuuacuggaagauaagcacaaugggaaacuauguaagcucagaggaguggcuccccugcaucuugguaaaugcaacauagccggcuggauccuggggaauccugagugugaaucuuugucaacagcaaguagcugguccuacauuguugagaccucuucgucagacaacggaacuugcuauccaggcgauuuuaucgacuacgaagaacucagggagcagcugagcaguguguccucuuucgaacgguuugagauuuucccgaagacaagcuccuggcccaaucacgauucaaacaagggugucaccgccgcuuguccucaugcaggggccaaaggauuuuauaagaaucugaucuggcucgugaaaaagggcaacaguuacccaaaauuaagcaagucuuauauaaaugacaagggcaaagaaguacugguucuuugggggauccaccaccccuccacgacugcugaucaacagucauuguaccagaacgccgacaccuacguguucgucggaacaagccgcuauaguaagaaauuuaagccugagauugcgauccgaccaaaagugcgugaucaggaggguagaaugaauuacuauuggacucugguggaacccggcgacaagauuaccuucgaggcaacagggaaccuagucguuccuagguacgccuuugcuauggaacggaacgccggaucuggcaucauaauuuccgauaccccagugcaugacugcaauacgacuugucaaacaccgaaaggugcaaucaacaccagccuccccuuccagaauauucacccuaucacuaucgggaagugcccaaaguauguaaaaucgacaaagcugcgccuugcuaccggacugagaaacgugcccucuauucaguccaggggcuuguuuggcgccauagcgggguucaucgagggagguuggacgggcauggucgacgggugguacggauaucaucaccagaaugaacaaggcucagguuacgccgcagaucucaaaaguacccagaacgcuauugacaagaucacaaauaaagugaacagcguuauagagaagaugaauacucaguuuaccgccguggggaaggaguucaaccaccuggaaaaacggauugagaauuuaaacaagaaagucgaugacggcuuccuggauaucuggacauacaaugcugaacuccuugugcuguuggagaacgaacgcacucuagacuaucaugauuccaauguaaagaaccuguacgagaaaguucgaaaccagcucaagaauaacgccaaggagaucggaaauggcuguuuugaguucuaucacaaaugcgacaacaccuguauggagucugugaagaaugggacauacgauuauccuaaauacagcgcagaagccaagcugaacagagaggaaauugacggagucaaacuugagucaaccaggaucuaucaaauucuggcuauauacaguacuguggcguccagcuugguccucgugguuucucugggugcaaucucauuuuggaugugcaguaauggcagcuuacagugccggauuuguaucuga

SEQ ID NO: 138003 - RNA, 1701 nt, Artificial Sequence; identical to SEQ ID NO: 134502
  derived and/or modified CDS sequence (opt3) from hemagglutinin__InfluenzaA__AGJ73371

SEQ ID NO: 138004 - RNA, 1701 nt, Artificial Sequence
  derived and/or modified CDS sequence (opt3) from hemagglutinin__InfluenzaA__AGJ73373
augaaggccauccuggugguccuccuuuacaccuucgcuacagcaaacgccgacacucugugcauuggcuaucacgcgaauaacagcacggauaccguugacacaguguuggagaaaaauguaacugugacccauuccgucaacuuacuggaagauaagcacaaugggaaacuauguaagcucagaggaguggcuccccugcaucuugguaaaugcaacauagccggcuggauccuggggaauccugagugugaaucuuugucaacagcaaguagcugguccuacauuguugagaccucuucgucagacaacggaacuugcuauccaggcgauuuuaucgacuacgaagaacucagggagcagcugagcaguguguccucuuucgaacgguuugagauuuucccgaagacaagcuccuggcccaaucacgauucaaacaagggugucaccgccgcuuguccucaugcaggggccaaaggauuuuauaagaaucugaucuggcucgugaaaaagggcaacaguuacccaaaauuaagcaagucuuauauaaaugacaagggcaaagaaguacugguucuuugggggauccaccaccccuccacgacugcugaucaacagucauuguaccagaacgccgacaccuacguguucgucggaacaagccgcuauaguaagaaauuuaagccugagauugcgauccgaccaaaagugcgugaucaggaggguagaaugaauuacuauuggacucugguggaacccggcgacaagauuaccuucgaggcaacagggaaccuagucguuccuagguacgccuuugcuauggaacggaacgccggaucuggcaucauaauuuccgauaccccagugcaugacugcaauacgacuugucaaacaccgaaaggugcaaucaacaccagccaccccuuccagaauauucauccuaucacuaucgggaagugcccaaaguauguaaaaucgacaaagcuccgccuggcuaccggacuuagaaacgugcccucuauucaguccaggggccuguuuggcgccauagcgggguucaucgagggagguuggacgggcauggucgacgggugguacggauaucaccaccagaaugaacaaggcucagguuacgccgcagauuugaaaaguacccagaacgcuauugacaagaucacaaauaaagugaacagcguuauagagaagaugaauacucaguuuaccgccguggggaaggaguucaaccaucucgaaaaacggauugagaaucugaacaagaaagucgaugacggcuucuuagauaucuggacauacaaugcugaacugcucgugcuucuggagaacgaacgcacuuuggacuaucacgauuccaauguaaagaaccuauacgagaaaguucgaaaccagcugaagaauaacgccaaggagaucggaaauggcuguuuugaguucuaucauaaaugcgacaacaccuguauggagucugugaagaaugggacauacgauuauccuaaauacagcgaagaggcaaagcucaacagagaagagauugacggagucaaacuggagucaaccaggaucuaucaaauucuugccauauacaguacuguggcuuccagccuggucuuggugguuucucucggugcgaucucauuuuggaugugcaguaauggcagccugcagugccggauuuguaucuga

SEQ ID NO: 138005 - RNA, 1701 nt, Artificial Sequence
  derived and/or modified CDS sequence (opt3) from hemagglutinin__InfluenzaA__AGJ73375
augaaggccauccuggugguccuccuuuacaccuucgcuacagcaaacgccgacacucugugcauuggcuaucacgcgaauaacagcacggauaccguugacacaguguuggagaaaaauguaacugugacccauuccgucaacuuacuggaagauaagcacaaugggaaacuauguaagcucagaggaguggcuccccugcaucuugguaaaugcaacauagccggcuggauccuggggaauccugagugugaaucuuugucaacagcaaguagcugguccuacauuguugagaccucuucgucagacaacggaacuugcuauccaggcgauuuuaucaauuacgaggagcucagggagcagcugagcaguguguccucuuucgaacgguuugagauuuucccggaaacaagcuccuggcccaaccacgacucaaauaagggugucaccgccgcuuguccucaugcaggggccaagaguuuuuauaaaaaccugaucuggcucgugaagaaaggaaauagcuacccaaaguuaucuaaauccuauauaaacgauaagggcaaggagguacugguucuuuggggcauccaccaccccucaacgacugcugaccaacagagcuuguaccagaaugccgaugcguacguguucgucgggaccagucgcuauucuaaaaaguuuaaaccugagauugcaauccgaccaaaggugcgugaccaggaaggaagaaugaacuacuauuggacacugauugagcccggugauaaaaucacuuucgaagccaccggcaaccuaguggucccuagguacgcuuuugccauggagcggaaugcaggguccggaauaauuaucagcgacacaccaguucaugauugcaacaccacgugucaaacuccggaaggcgcuauuaauacaucgcuccccuuccagaacauccacccuaucaccauugguaagugcccaaaauaugugaagucuacuaagcugcgccuugccacagggcugagaaauguacccuccauacagucaaggggauuguuuggcgcgaucgccggcuucauugaagggggauggaccgguaugguggacggcugguacggguaucaucaccagaacgagcaaggaaguggcuacgcagcugaccucaaaagcacgcagaaugccaucgauaagauaaccaacaaagucaauuccgugauugaaaagaugaacacacaguuuacugcuguugguaaagaguucaaucaccuggaaaagcggaucgagaacuuaaauaagaaaguggacgauggguuccuggacaucuggaccuacaacgccgaacuccuuguccuguuggagaaugagcgcacacuagauuaucaugacucuaacgugaagaaccuguacgaaaaaguacgaaaucagcucaagaacaaugcaaaagagauuggcaacggauguuuugaguucuaucacaagugcgauaauacuuguauggaaagcguuaagaacggcaccuacgacuauccuaaauacucagaagaggccaagcugaauagagaggaaaucgauggggugaaacuugagaguacaaggauuuaucaaauacuggcuaucuacuccaccgucgcgagcucuuuggugcucgucgugucacugggagcaauuaguuuuuggaugugcagcaacgguuccuuacagugccggaucuguaucuga

SEQ ID NO: 138006 - RNA, 1701 nt, Artificial Sequence
  derived and/or modified CDS sequence (opt3) from hemagglutinin__InfluenzaA__AGJ73377
augaaggccauccuggugguccuccuuuacaccuucgcuacagcaaacgccgacacucugugcauuggcuaucacgcgaauaacagcacggauaccguugacacaguguuggagaaaaauguaacugugacccauuccgucaacuuacuggaagauaagcacaaugggaaacuauguaagcucagaggaguggcuccccugcaucuugguaaaugcaacauagccggcuggauccuggggaauccugagugugaaucuuugucaacagcaaguagcugguccuacauuguugagaccucuucgucagacaacggaacuugcuauccaggcgauuuuaucaauuacgaggagcucagggagcagcugagcaguguguccucuuucgaacgguuugagauuuucccgaagacaagcuccuggcccaaccacgacucaaauaagggugucaccgccaguuguccucgcgcuggggcaaagagcuuuuauaagaaccugaucuggcucgugaaaaagggaaauucuuacccaaaauuauccaagucauauauaaacgauaagggcaaagaaguacugguucuuuggggcauccaucaccccagcacgacugccgaccaacagaguuuguaccagaaugcugaugccuacguguucgucgggaccucucgauauuccaagaaauuuaagccugagauugcgauccguccaaaagugagagaccaggagggaaggaugaacuacuauuggacacugguggaacccggugauaagauuacuuucgaggcaaccggcaaccuacucgucccucgguacgccuuugcuauggaacgcaaugccgggagcggaaucauaauuucggacacaccaguucacgauugcaacaccacgugucaaacuccgaaaggcgcaaucaauacaucucugcccuuccagaacauucauccuaucaccaucgguaagugcccaaaguaugugaaauccacuaaacuuagacuggcuacaggguugaggaauguacccucaauucagagucggggacucuuuggcgccauagcgggcuucaucgaagggggauggaccgguaugguggacggcugguacggguaucaccaucagaacgaacaaggaagcggcuacgccgcagaccugaaauccacgcagaaugcuauugauaagaucaccaacaaagucaauucugugauagagaagaugaacacacaguuuacugccguugguaaggaguucaaucacuuagaaaaacgcauugagaaccugaauaagaaaguggacgauggguuccucgacaucuggaccuacaacgcugaacuucuggucuugcuagagaaugaacgaacacuggauuaucacgacagcaacgugaagaaccucuacgagaaaguaagaaaucagcugaagaacaaugccaaggagaucggcaacggauguuuugaguucaaucauaaaugcgauaacacuuguauggaaucaguuaagaauggcaccuaugacuacccuaaauauagugaagaggcaaaacuuaacaaggaagagauugauggggugaagcuggaguccacaaggaucuaccaaauuuuggccauauauagcaccgucgcuucuucacucgugcuggucgugaguuuaggagcgaucagcuuuuggaugugcuccaaugguucucugcagugccggauuuguaucuga

SEQ ID NO: 138007 - RNA, 1701 nt, Artificial Sequence
  derived and/or modified CDS sequence (opt3) from hemagglutinin__InfluenzaA__AGJ73380
augaaggccauccuggugguccuccuuuacaccuucgcuacagcaaacgccgacacucugugcauuggcuaucacgcgaauaacagcacggauaccguugacacaguguuggagaaaaauguaacugugacccauuccgucaacuuacuggaagauaagcacaaugggaaacuauguaagcucagaggaguggcuccccugcaucuugguaaaugcaacauagccggcuggauccuggggaauccugagugugaaucuuugucaacagcaaguagcugguccuacauuguugagaccucuucgucagacaacggaacuugcuauccaggcgauuuuaucaauuacgaagaacucagggagcagcugagcaguguguccucuuucgaacgguuugagauuuucccgaagacaagcuccuggcccaaccacgacucaaauaagggugucaccgccgcuuguccucaugcaggggccaaaaguuuuuauaagaaccugaucuggcucgugaaaaagggaaauagcuacccaaaauuaucuaaguccuauauaaacgauaagggcaaagaaguacugguucuuuggggcauccaccaccccucaacgacugcugaccaacagagcuuguaccagaaugccgaugcguacguguucgucgggaccagucgcuauucuaagaaauuuaagccugagauugcaauccgaccaaaagugcguggacaggaggguagaaugaacuacuauuggacacugauugaacccggcgacaagaucacuuucgaggccaccgggaaccuaguggucccuagguacgcuuuugccauggaacggaaugcaggauccggcauaauuaucagcgauacaccaguucaugacugcaacucgaccugucaaacgccgaaaggugcuauuaauacuucucuccccuuccagaacauccacccuaucacaauugggaagugcccaaaguaugugaaauccaccaagcugcgccuugccacuggacugagaaauguacccucaauacagaguaggggcuuguuuggcgcgaucgccggguucauugagggagguuggacaggcaugguggaugggugguacggauaucaucaccagaacgaacaaggcagcgguuacgcagcugaccucaaauccacccagaaugccaucgacaagauaacgaacaaagucaauucugugauugagaagaugaacacccaguuuacagcuguugggaaggaguucaaucaccuggaaaaacggaucgagaacuuaaauaagaaaguggaugacggcuuccuggauaucuggacuuacaacgccgaacucuuuguccuucuggagaaugaacgcaccuuggacuaucaugauagcaacgugaaggaccuauacgagaaaguacgaaaccagcugaagaauaacgcaaaggagauuggaaauggcuguuucgaauuuuaucacaaaugcgauaacacauguauggagucaguuaagaaugggacuuacgacuauccuaaauacagugaagaggccaagcucaacagagagaaaaucgauggagugaagcuggaguccaccaggauuuaucaaauacuugcuaucuacagcacagucgcgucuucacugguguuggucgugagucucggugcaauuagcuucuggaugugcuccaauggcucucugcagugccggaucuguaucuga

SEQ ID NO: 138008 - RNA, 1701 nt, Artificial Sequence
  derived and/or modified CDS sequence (opt3) from hemagglutinin__InfluenzaA__AGK62991
augaagaccaucauugcccugagcuacauacucugccuuguguucgcucagaaacugcccggcaacgacaauuccacagcaacuuuguguuuagggcaccaugccgucccuaacggaacgaucguuaagaccauuacaaaugaucaaaucgaggugacuaacgcgaccgaacugguacagucuucaaguacaggugagauuugcgacagcccacaccagauccuagauggcgaaaauuguacccucauagacgcucugcuuggggauccgcagugcgacggauuucaaaacaaaaagugggaucuguucguggagagauccaaagccuauucuaauuguuaccccuaugacgucccugauuacgcaucguugaggucacucguggccagcaguggcacucuggaauuuaacaaugaguccuucaacuggacagguguuacccagaaugggacgucuagcgcuugcauccggcgcuccaacucaaguuucuuuagccgacugaauuggcucacucauuuaaacuuuaaguauccagcacugaaugugaccaugcccaacaacgagcaguucgacaaacuuuacauuuggggaguccaccauccuggcacagauaaggaccagaucuuuuuguaugcccaggcuucuggccguauuacuguguccaccaagagaucacaacaggccguaaucccaaauauagggagcaggccccggauucgcaacaucccuaguagaauuucuaucuacuggacaaucguuaaaccaggagauauucugcuaauaaauuccaccgguaaccucaucgcgccgaggggcuacuucaagauucggagcgggaaaucgucuaucaugcgcuccgacgcacccauaggaaaguguaauucagaaugcauuacgccuaacggcaguaucccaaaugacaagcccuuucagaacgugaaucgaaucacuuauggugccuguccuagauacgucaaacaaagcacacugaaacuugcuaccgggaugaggaacgugccagagaagcagacucggggaauuuucggcgccaucgcaggcuuuauugaaaaugggugggagggaaugguggaugguugguauggcuuccgucaccagaacuccgaggggcgcggacaagcugccgaccugaagucuacacaggcggccauagaucagaucaauggcaaauugaacagacucauugguaagaccaaugaaaaauuccaccagaucgagaaggaauuuagcgaggucgaagggaggauccaagaccuggagaaguacguugaggauacgaaaauugacuuauggucauauaacgcagaacugcucguggcucuugagaaccagcauaccauagaucugacagacagugaaaugaauaaguuguucgagaaaacuaagaaacagcuacgggaaaacgccgaggauaugggcaauggaugcuuuaagaucuaccacaagugugacaacgcuugcauuggcuccauccgaaaugggaccuauaaccaugauguauaccgcgacgaggcccugaauaacagauuccagauuaaaggaguggaacucaagagcgguuacaaagacuggauccuguggauaucuuuugcaaucucaugcuuccuucugugugucgccuugcucggcuuuauuaugugggcuugccaaaaggggaauaucagguguaacauuugcaucuga

SEQ ID NO: 138009 - RNA, 1701 nt, Artificial Sequence
  derived and/or modified CDS sequence (opt3) from hemagglutinin__InfluenzaA__AGK62993
augaagaccaucauugcccugagcuacauacucugccuuguguucgcucagaaacugcccggcaacgacaauuccacagcaacuuuguguuuagggcaccaugccgucccuaacggaacgaucguuaagaccauuacaaaugaucaaaucgaggugacuaacgcgaccgaacugguacagucuucaaguacaggugagauuugcaauagcccacaccagauccuagacggcgaaaacuguacccucauagaugcucugcuuggggacccgcagugcgauggauuucaaaauaaaaagugggaccuguucguggagagauccaaagcccauucuaacuguuaucccuacgaugucccugacuaugcaucguugaggucacucguggccagcaguggcacucuggaauuuaauaacgaguccuucaauuggacagguguuacccagaacgggacgucuagcgcuugcauccggcgcuccaauaacucauuuuucagucgacugaauuggcucacucacuuaaacuuuaaguacccagcacugaacgugaccaugcccaauaacgagcaguucgauaaacuuuauauuuggggaguccaucacccuggcacagacaaagaucagaucuuuuuguacgcccaagcuagcggccguauuacugugucuaccaagagaucccagcaggccguaaucccaaauauagggucaaggccccggguucgcaacauuccuagcagagugaguaucuauuggacaauugucaaaccaggagacauccugcuaaucaauucuaccgguaaccucauugcgccgaggggcuacuucaagauacgguccgggaaaagcucgaucaugcgcucugaugcacccauuuccaaguguaauucagccugcaucacgacuaacggaaguauaccuaaugacaagccauuucagaacgugaaucgaauuacauacggcgcuugucccagauaugugaaacaaaacacccugaaacuugccacugguaugaggaaugucccugaaaagcagacacgggggaucuucggagcaaucgcuggcuuuauugagaacggcugggaagggaugguugacggaugguacgguuuccgucaccagaauagcgagggccgcgggcaagccgcggaucugaaguccacccaggccgcaaucgaccagauuaacggaaaauugaacagacucauaggcaagacgaaugagaaauuccaucagaucgaaaaggaguuuucugaaguggaggguaggauucaagaucuggaaaaguauguagaggacaccaaaaucgauuuauggagcuacaacgcugagcugcucguggcccuugaaaaucagcacacaaucgaccugacugauucagagaugaacaaguuguucgaaaagaccaagaaacagcuacgggagaaugcugaagacauggggaacggcugcuuuaagauuuaucauaagugugauaaugccugcauaggaaguauccgaaacggcacauacgaccacgaugucuaucgcgacgaggcacugaauaacagauuccagauuaaagggguggagcucaaguccggauacaaagacuggauccuguggauuagcuuugccaucucuugcuuccuucuguguguugcuuugcucgguuuuauaauguggucaugccaaaagggcaauaucagguguaacauuugcaucuga

SEQ ID NO: 138010 - RNA, 1701 nt, Artificial Sequence
  derived and/or modified CDS sequence (opt3) from hemagglutinin__InfluenzaA__AGK62995
augaagaccaucauugcccugagcuacauacucugccuuguguucgcucagaaacugcccggcaacgacaauuccacagcaacuuuguguuuagggcaccaugccggaccuaacgguacgaucgucaagaccauuacaaaugaucaaaucgagguuacuaacgcgaccgaacuggugcagucuucaaguacaggcgagauuugcgacagcccacaccagauccuagauggggaaaauuguacccucauagacgcucugcuuggagauccgcagugcgacggcuuucaaaacaaaaagugggaucuguucguagagagauccaaagccuauucuaauuguuaccccuaugacgugccugauuacgcaucguugaggucacucgucgccagcagugguacucuggaauuuaacaaugaguccuucaacuggacaggggugacccagaauggaacgucuagcgcuugcauccggcgcuccaacaauucauuuuucagucgacugaacuggcucacucauuuaaauuuuaaguauccagcacugaacguuaccaugcccaacaaugagcaguucgacaaacuuuacauuuggggcgugcaccauccuggcacagauaaggaccagaucuuuuuguaugcccaaagcucugggcguauuacugucuccaccaagagaucacagcaggcugugaucccaaacauaggaagcaggccccggauucgcaauaucccuaguagaauuucuaucuacuggacaaucguaaaaccaggugauauucugcuaauaaacuccaccggcaaucucaucgccccgaggggguacuucaagauucggagcggaaaaucgucuaucaugcgcuccgacgcgcccauaggcaaguguaacucagaaugcauuacgccuaaugguaguaucccaaacgacaagcccuuucagaauguuaaccgaaucacuuauggggcauguccuagauacgugaaacaaagcacacugaaacuugccaccggaaugaggaaugucccagagaagcagacucggggcauuuucggcgcuaucgccggguuuauugaaaacggaugggaggguaugguggauggcugguauggguuccgucaccaaaauuccgagggacgcggccaggcagcugaccugaagucuacacaggccgcgauagaucagaucaacgguaaauugaauagacucauugggaagaccaacgaaaaauuccaccagaucgagaaggaauuuagcgagguggaaggcaggauccaagaccuggagaaguacgucgaggauacgaaaauugacuuauggucauauaacgccgaacugcucguugcacuugagaaucagcauaccauagaucugacagacagugaaaugaacaaguuguucgagaaaacuaagaaacagcuacgggaaaaugcugaggauaugggaaacggcugcuuuaagaucuaccacaagugugacaaugccugcauuggguccauccgaaacggaaccuauaaucaugauguguaccgcgacgaggcucugaacaauagauuccagauuaaagguguagaacucaagagcggcuacaaagacuggauccuguggauaucuuuugccaucucaugcuuccuucuguguguggcauugcucggguuuauuaugugggccugccaaaagggaaacaucagguguaauauuugcaucuga

SEQ ID NO: 138011 - RNA, 1701 nt, Artificial Sequence
  derived and/or modified CDS sequence (opt3) from hemagglutinin__InfluenzaA__AGK62997
augaagaccaucauugcccugagcuacauacucugccuuguguucgcucagaaacugcccggcaacgacaauuccacagcaacuuuguguuuagggcaccaugccgucccuaacggaacgaucguuaagaccauuacaaaugaucaaaucgaggugacuaacgcgaccgaacugguacagucuucaaguacaggugagauuugcaauagcccacaccagauccuagacggcgaaaacuguacccucauagaugcucugcuuggggacccgcagugcgauggauuucaaaauaaaaagugggaccuguucguggagagauccaaagcccauucuaacuguuaucccuacgaugucccugacuaugcaucguugaggucacucguggccagcaguggcacucuggaauuuaauaacgaguccuucaauuggacagguguuacccagaacgggacgucuagcgcuugcauccggcgcuccaauaacucauuuuucagucgacugaauuggcucacucacuuaaacuuuaaguacccagcacugaacgugaccaugcccaauaacgauaaguucgacaaacuuuauauuuggggaguccaucacccuggcacagauaaggaccagaucuuuuuguacgcccaggcuagcggccguauuacugugucuaccaaaagaucccaacaggccguaaucccaaauauagggucaaggccccggguucgcaacauuccuagcagagugaguaucuauuggacaauugucaagccaggagauauccugcuaaucaauucuaccgguaaccucauugcgccgaggggcuacuucaaaauacgguccggaaagagcucgaucaugcgcucugacgcacccauugggaaguguaauuccgccugcaucacgccuaacggcucaauaccaaaugacaaacccuuucagaacgugaaucgaauuacuuguggugcuugcgccagauacgugaagcagaacacacugaaacuugcaaccgggaugaggaaugucccugagaagcaaacucggggaaucuucggcgcuaucgccguuuuuauugaaaacggcugggaggggaugguggauggaugguaugguuuccgucaccagaauagugaaggccgcgagcaggcggccgcauuccaaagcacacaggcugccaucgaccagauuauagggaaacugaacagauugaucggagagaccaacgaaaaguuucaucagauugagaaagaguucuccgaaguagaaaggcggauccaagcucucgagaaguacguggaggauacgaagaucgaccuguggucuuauaaugccgaauuacuggucgcacucgagaaccagcacaccauugaucuuacagacagcgaaaugaauaaacuguuugagaagacuaaaaagcaguugcgagaaaacgccgaggauaugggcaaugguuguuucaaaauauaccauaagugcgacaacgcuugcaucgggucaauucgcaauggcaccuaugaucacgacguguacagagaugaggcgcuaaacaauagguuucagaucaagggaguugaacugaaaaguggcuauaaggacuggauucucuggaucuccuucgcaauaagcuguuuucugcuuugcguggcccuguugggguucaucauguggucuugucaaaaaggaaacauucggugcaauaucuguauuuga

SEQ ID NO: 138012 - RNA, 1701 nt, Artificial Sequence
  derived and/or modified CDS sequence (opt3) from hemagglutinin__InfluenzaA__AGK62999
augaagaccaucauugcccugagcuacauacucugccuuguguucgcucagaaacugcccggcaacgacaauuccacagcaacuuuguguuuagggcaccaugccgucccuaacggaacgaucguuaagaccauuacaaaugaucaaaucgaggugacuaacgcgaccgaacugguacagucuucaaguacaggugagauuugcaauagcccacaccagauccuagacggcgaaaacuguacccucauagaugcucugcuuggggacccgcagugcgauggauuucaaaauaaaaagugggaccuguucguggagagauccaaagccuauucuaacuguuaccccuaugaugucccugacuacgcaucguugaggucacucguggccagcaguggcacucuggaauuuaauaacgaguccuucaauuggacagguguuacccagaacgggacgucuagcgcuugcauccggcgcuccaauaacucauuuuucagucgacugaauuggcucacucauuuaaacuuuaaguauccagcacugaacgugaccaugcccaauaacgagcaguucgauaagcuguacauuuggggaguccaccauccuggcacagacaaagaucagaucuuuuuguaugcccaagcuagcggccguauuacugugucuaccaagagaucccagcaggccguaaucccaaauauagggucaaggccccggguucgcaacauuccuagcagagugaguaucuacuggacaauugucaaaccaggagacauccugcuaaucaauucuaccgguaaccucauugcgccgaggggcuacuucaagauacgguccgggaaaagcucgaucaugcgcucugaugcacccauuggaaaguguaauuccgccugcaucacgccuaacggcucaauaccaaaugacaagcccuuucagaacgugaaucgaauuacuuauggugcuuguccuagauacgugaaacaaaacacacugaaacuugccaccgggaugaggaaugucccagaaaaacagacucggggaaucuucggcgcaaucgcuggcuuuauugagaacgggugggaaggaaugguugacgguugguauggcuuccgucaccagaauagugaggggcgcggacaagccgcggaucuuaagagcacacaggccgcaaucgaccagauuaacggcaaauugaacagacucauagguaagaccaaugagaaauuccaccagaucgaaaaggaguuuuccgaaguggaggggaggauucaagaucuggaaaaguacguagaggacacgaaaaucgauuuauggucuuauaacgcugagcugcucguggcccuugaaaaucagcauaccaucgaccugacagauagcgagaugaacaaguuguucgaaaagacuaagaaacagcuacgggagaaugcugaagacaugggcaacggaugcuuuaagauuuaccacaagugugauaaugccugcauaggcucaauccgaaacgggaccuaugaccaugaugucuaccgcgacgaggcacugaauaacagauuccagauuaaaggaguggagcucaagagugguuacaaagacuggauccuguggauuuccuuugccaucagcugcuuccuucuguguguugcuuugcucggcuuuauaaugugggcgugccaaaaggggaauaucagguguaacauuugcaucuga

SEQ ID NO: 138013 - RNA, 1701 nt, Artificial Sequence
  derived and/or modified CDS sequence (opt3) from hemagglutinin__InfluenzaA__AGK63001
augaagaccaucauugcccugagcuacauacucugccuuguguucgcucagaaacugcccggcaacgacaauuccacagcaacuuuguguuuaguccaccaugccguuccuaacgggacgaucgugaagaccauuacaaaugaucaaaucgagguaacuaacgcgaccgaacuggugcagucuucaaguacaggagagauuugcgacagcccacaccagauccuagauggugaaaauuguacccucauagacgcucugcuuggcgauccgcagugcgacggguuucaaaacaaagagugggaucuguucgucgaaagauccaaggccuauucuaauuguuaccccuaugacgugccugauuacgcaucguugaggucacucguugccagcaguggaacucuggaguuuaacaaugaguccuucaacuggacaggcgugacccagaaugguacgucuagcgcuugcauccggcgcuccaacucaaguuucuucagccgacugaaugggcucacucauuuaaacuuuaaauauccagcacugaaugucaccaugcccaacaacgaacaguucgacaaacuuuacauuuggggagugcaccauccuggcacagauaaggaccagaucuuuuuguaugcccaaucuuccggccguauuacuguaucaaccaagagaagccagcaggcuguuaucccaaauauagggaguaggccccggauucgcaacaucccuucuagaauuuccaucuacuggacaaucgugaagccaggagauauucugcuaauaaauagcaccgguaaccucaucgccccgaggggcuacuucaaaauucggucggggaagucuuccaucaugcgcucagacgcgcccauaggaaaauguaauagugagugcauuacgccuaacggcagcaucccaaaugacaagcccuuucagaacgucaaucgaaucacuuauggugcauguccuagauacgugaagcaauccacacugaaacuugccaccgggaugaggaacgugccagaaaagcagacucggggaauuuucggcgcuaucgccggcuuuauugagaaugggugggagggaauggucgaugguugguauggcuuccgucaccagaacucugaagggcgcgagcaagcagcugacuuccagagcacacaggccgcgauagaucagaucauuggaaaacugaauagauugaucggcaagaccaacgaaaaauuucaccaaaucgagaaggaauuuucagagguugagaggcggauucaggaccucgaaaaauacguggaggauacgaagauagaccuguggaguuauaaugccgaauuacugguagcacucgagaaccagcauaccaucgaucuuacagacuccgaaaugaacaagcuguuugagaaaacuaagaaacaguugcgagagaaugcugaagauauggguaacgggugcuucaagauuuaccacaaaugugacaaugccugcaucggcagcauucgcaacggaaccuauaaucaugauguguacagagacgaggcucuaaacaauagguuucaaaucaagggcgucgaacugaagucuggguacaaagacuggauacucuggaucucauucgccauuaguugcuuucugcuuuguguggcacuguugggauucaucauguggagcugccagaaggguaacauucgguguaauaucugcauauga

SEQ ID NO: 138014 - RNA, 1701 nt, Artificial Sequence
  derived and/or modified CDS sequence (opt3) from hemagglutinin__InfluenzaA__AGK63003
augaagaccaucauugcccugagcuacauacucugccuuguguucgcucagaaacugcccggcaacgacaauuccacagcaacuuuguguuuagggcaccaugccggaccuaacgguacgaucgucaagaccauuacaaaugaucaaaucgagguuacuaacgcgaccgaacuggugcagucuucaaguacaggcgagauuugcgacagcccacaccagauccuagauggggaaaauuguacccucauagacgcucugcuuggagauccgcagugcgacggcuuucaaaacaaaaagugggaucuguucaucgagagauccaaagccuauucuaauuguuaccccuaugacguaccugauuacgcaucguugaggucacucguggccagcagugguacucuggaauuuaacaaugaguccuucaacuggacaggggucacccagaauggaacgucuagcgcuugcauucggcgcuccaacucaaguuucuuuagccgacugaauuggcucacucauuuaaacuuuaaguauccagcacugaaugugaccaugcccaacaacgagcaguucgacaagcuguacaucuggggcguucaccauccuggcacagauaaagaccagaucuuuuuguaugcccaaucuuccgggcguauuacugugucaaccaagagaagccagcaggcugucauaccaaauauuggaaguaggccccggauccgcaacauuccuucuagaaucuccaucuacuggacaauugugaaaccaggugauauacugcuaaucaauagcaccggcaaccucauugccccgaggggguacuucaagauccggucgggaaaaucuuccauaaugcgcucagacgcgcccauuggcaaguguaauagugcaugcaucacgccuaacgguagcaucccaaaugacaagcccuuucagaacguaaaucgaauuacuuauggggccuguccuagauacguuaaacaauccacacugaaacuugcuaccggaaugaggaacgugccagaaaaacagacucggggcaucuucggcgccauugcaggguuuauagagaauggaugggaagguauggucgauggcugguauggguuccgucaccagaacucugagggacgcggccaagcugccgaccuuaagagcacacaggcggccaucgaucagauuaaugguaaauugaacagacucaucgggaagaccaaugagaaauuccaccagaucgaaaaggaguuuucagaaguggagggcaggauucaagaccuggaaaaguacguggaggauacgaaaauagacuuauggaguuauaacgcagagcugcucgucgcucuugaaaaccagcauaccaucgaucugacagacuccgagaugaauaaguuguucgaaaagacuaagaaacagcuacgggagaacgccgaagauaugggaaauggcugcuuuaagauuuaccacaagugugacaacgcuugcaucgggagcauucgaaauggaaccuauaaccaugauguuuaccgcgacgaggcccugaauaacagauuccagaucaaagguguggagcucaagucuggcuacaaagacuggauacuguggaucucauuugcaauuaguugcuuccuucuguguguagccuugcucggguuuaucaugugggcuugccaaaagggaaauauuagguguaacaucugcauauga

SEQ ID NO: 138015 - RNA, 1701 nt, Artificial Sequence
  derived and/or modified CDS sequence (opt3) from hemagglutinin__InfluenzaA__AGK63005
augaagaccaucauugcccugagcuacauacucugccuuguguucgcucagaaacugcccggcaacgacaauuccacagcaacuuuguguuuaguccaccaugccguuccuaacgggacgaucgugaagaccauuacaaaugaucaaaucgagguaacuaacgcgaccgaacuggugcagucuucaaguacaggagagauuugcgacagcccacaccagauccuagauggugaaaauuguacccucauagacgcucugcuuggcgauccgcagugcgacggguuucaaaacaaaaagugggaucuguucgucgagagauccaaagccuauucuaauuguuaccccuaugacgugccugauuacgcaucguugaggucacucguugccagcaguggaacucuggaauuuaacaaugaguccuucaacuggacaggcgugacccagaaugguacgucuagcgcuugcauccggcgcuccaacucaaguuucuucagccgacugaaugggcucacucauuuaaacuuuaaguauccagcacuggacgucaccaugcccaauaacgauaaguucgacaaacuuuacauuuggggagugcaccauccuggcacagauaaggaccagaucuuuuuguaugcccagucuuccggccguauuacuguaucaaccaaaagaagccaacaggcuguuaucccaaacauagggaguaggccccggauucgcaauaucccuucuagaauuuccaucuacuggacaaucgugaagccaggagacauucugcuaauaaacagcaccgguaaucucaucgccccgaggggcuacuucaaaauucggucggggaagucuuccaucaugcgcucagaugcgcccauaggaaaguguaacagugagugcauuacgccuaauggcagcaucccaaacgacaaacccuuucagaaugucaaccgaaucacuuauggugcauguccuagauacgugaagcaguccacacugaaacuugccaccgggaugaggaaugugccagaaaagcaaacucggggaauuuucggcgcuaucgccgucuuuauugagaacggcugggaagggaugguugauggaugguaugguuuccgucaccaaaauucugagggccgcgagcaggcagcugacuuccagagcacacaggccgcgauagaucagaucaacgggaaacugaauagauugauuggaaagaccaacgaaaaauuucaccagaucgagaaggaauuuucagagguggaaggcaggauccaagaccucgagaaguacguagaggauacgaaaauugaccuguggaguuauaaugccgaauuacugguggcacucgagaaccagcauaccauagaucuuacagacuccgaaaugaacaagcuguuugagaaaacuaagaaacaguugcgggaaaaugcugaggauauggguaacgggugcuucaagaucuaccacaagugugacaaugccugcauuggcagcauccgaaacggaaccuauaaucaugacgucuaccgcgaugaggcucuaaacaauagauuucagauuaaaggcguggaacugaagucuggguacaaagacuggauccucuggauaucauucgccaucaguugcuuucugcuuuguguugcacuguugggauucauuaugugggccugccaaaaggguaacaucagguguaauauuugcaucuga

SEQ ID NO: 138016 - RNA, 1701 nt, Artificial Sequence
  derived and/or modified CDS sequence (opt3) from hemagglutinin__InfluenzaA__AGK63007
augaagaccaucauugcccugagcuacauacucugccuuguguucgcucagaaacugcccggcaacgacaauuccacagcaacuuuguguuuagggcaccaugccgucccuaacggaacgaucguuaagaccauuacaaaugaucaaaucgaggugacuaacgcgaccgaacugguacagucuucaaguacaggugagauuugcgacagcccacaccagauccuagauggcgaaaauuguacccucauagacgcucugcuuggggauccgcagugcgacggauuucaaaacaaaaagugggaucuguucguggagagauccaaagcccauucuaauuguuaucccuacgacgucccugauuaugcaucguugaggucacucguggccagcaguggcacucuggaauuuaacaaugaguccuucaacuggacagguguuacccagaaugggacgucuagcgcuugcauccggcgcuccaacaauucauuuuucagucgacugaacuggcucacucacuuaaauuuuaaguacccagcacugaacgugaccaugcccaacaaugagcaguucgacaagcuguauauuuggggaguccaucacccuggcacagauaaagaccagaucuuuuuguacgcccaagcuagcggccguauuacugugucuaccaagagaucccagcaggccguaaucccaaacauagggucaaggccccggguucgcaauauuccuagcagagugaguaucuauuggacaauugucaaaccaggagauauccugcuaaucaacucuaccgguaaucucauugcgccgaggggcuacuucaagauacgguccgggaaaagcucgaucaugcgcucugacgcacccauuggaaaguguaacuccgaaugcaucacgccuaauggcucaauaccaaacgacaagcccuuucagaaugugaaccgaauuacuuacggugccuguccuagauaugugaaacaaaauacacugaaacuugcuaccgggaugaggaacgucccagagaagcagacucggggaaucuucggcgccaucgcaggcuuuauugaaaaugggugggagggaaugguugaugguugguacggcuuccgucaccagaacagugaggggcgcggacaagcugccgaccuuaagagcacacaggcggccaucgaucagauuaauggcaaauugaacagacucauagguaagaccaacgaaaaauuccaucagaucgagaaggaauuuuccgagguggaagggaggauucaagaccuggagaaguauguagaggauacgaaaaucgacuuauggucuuacaaugcagaacugcucguggcucuugagaaccagcacaccaucgaucugacagacagcgaaaugaauaaguuguucgagaaaacuaagaaacagcuacgggaaaacgccgaggauaugggcaauggaugcuuuaagauuuaucauaagugugacaacgcuugcauaggcucaauccgaaaugggaccuacgaucacgacgucuaucgcgacgaggcccugaacaauagauuccagauuaaaggaguggaacucaagagugguuacaaagauuggauccuguggauuuccuuugcaaucagcugcuuccuucuguguguugccuugcucggcuuuauaaugugggcuugccaaaaggggaacaucagguguaauauuugcaucuga

SEQ ID NO: 138017 - RNA, 1701 nt, Artificial Sequence
  derived and/or modified CDS sequence (opt3) from hemagglutinin__InfluenzaA__AGK63009
augaagaccaucauugcccugagcuacauacucugccuuguguucgcucagaaacugcccggcaacgacaauuccacagcaacuuuguguuuagggcaccaugccgucccuaacggaacgaucguuaagaccauuacaaaugaucaaaucgaggugacuaacgcgaccgaacugguacagucuucaaguacaggugagauuugcaauagcccacaccagauccuagacggcgaaaacuguacccucauagaugcucugcuuggggacccgcagugcgauggacugcaaaauaaaaagugggacuuguuuguggagagauccaaagcccauucuaacuguuaucccuacgaugucccugacuaugcaucgcucaggucacugguggccagcaguggcacucuggaguucaauaacgaauccuuuaauuggacagguguuacccagaacgggacgucuagcgcuugcauccggcgcuccaauaacucauucuuuagucgacucaauugguuaacucaccugaacuucaaguacccagcacuuaacgugaccaugcccaauaacgagcaguuugauaaguuguauauuuggggaguccaucacccuggcacagacaaagaucagaucuuccuguacgcccaagcuagcggccguauuacugugucuaccaagagaucccagcaggccguaaucccaaauauagggucaaggccccggguucgcaacauuccuagcagagugaguaucuauuggacaauugucaaaccaggagacauccuacucaucaauucuaccgguaaccugauugcgccgaggggcuacuuuaagauacgguccgggaaaagcucgaucaugcgcucugaugcacccauuggaaaguguaauuccgccugcaucacgccuaacggcucaauaccaaaugacaagcccuuccagaacgugaaucgaauuacuuacggugcuuguccuagauaugugaaacaaaacacacuuaagcuggccaccgggaugaggaaugucccagaaaaacagacucggggaaucuuuggcgcaaucgcuggcuucauugagaacgggugggaaggaaugguugacgguugguacggcuuucgucaccagaauagugaggggcgcggacaagccgcggauuugaaaagcacacaggccgcaaucgaccagauuaacggcaaacucaacagacugauagguaagaccaaugagaaauuccaucagaucgaaaaggaguucuccgaaguggaggggaggauucaagauuuagaaaaguauguagaggacacgaaaaucgaucuguggucuuacaacgcugagcuccuuguggcccuggaaaaucagcacaccaucgacuugacagauagcgagaugaacaagcuauuugaaaagacuaagaaacagcugcgggagaaugcugaagacaugggcaacggaugcuucaagauuuaucauaagugugauaaugccugcauaggcucaauccgaaacgggaccuacgaccacgaugucuaucgcgacgaggcacucaauaacagauuucagauuaaaggaguggagcugaagagugguuacaaagacuggauccuuuggauuuccuucgccaucagcugcuuucuguuguguguugcucuccugggcuucauaaugugggcgugccaaaaggggaauaucagguguaacauuugcaucuga

SEQ ID NO: 138018 - RNA, 1701 nt, Artificial Sequence
  derived and/or modified CDS sequence (opt3) from hemagglutinin__InfluenzaA__AGK63011
augaagaccaucauugcccugagcuacauacucugccuuguguucgcucagaaacugcccggcaacgacaauuccacagcaacuuuguguuuagggcaccaugccgucccuaacggaacgaucguuaagaccauuacaaaugaucaaaucgaggugacuaacgcgaccgaacugguacagucuucaaguacaggugagauuugcgacagcccacaccagauccuagauggcgaaaauuguacccucauagacgcucugcuuggggauccgcagugcgacggauuucaaaacaaaaagugggaucuguucguggagagauccaaagccuauucuaauuguuaccccuaugacgucccugauuacgcaucguugaggucacucguggccagcaguggcacucuggaauuuaacaaugaguccuucaacuggacagguguuacccagaaugggacgucuagcgcuugcauccggcgcuccaacaauucauuuuucagucgacugaacuggcucacucauuuaaauuuuaaguauccagcacugaacgugaccaugcccaacaaugagcaguucgacaaacuuuacauuuggggaguccaccauccuggcacagauaaggaccagaucuuuuuguaugcccaagcuagcggccguauuacugugucuaccaagagaucccagcaggccguaaucccaaacauagggucaaggccccggguucgcaauauuccuagcagaaucaguauuuacuggacaaucgugaaaccaggagauauccugcuaauuaacucuaccgguaaucucauagcgccgaggggcuacuucaagauccgguccgggaaaagcucgauuaugcgcucugacgcacccaucggaaaguguaacuccgaaugcauaacgccuaauggcucaauuccaaacgacaagcccuuucagaaugucaaccgaaucacuuauggugccuguccuagauacgugaaacaaaguacacugaaacuugcuaccgggaugaggaaugugccagagaagcagacucggggaaucuucggcgccauugcaggcuuuaucgaaaacgggugggagggaauggucgaugguugguauggcuuccgucaccagaauagcgaggggcgcggacaagcugccgaccugaaguccacacaggcggccauugaucagauaaacggcaaauugaauagacucaucgguaagaccaacgaaaaauuccaccagauugagaaggaauuuucugagguugaagggaggauccaagaccuggagaaguacguggaggauacgaaaaucgacuuauggagcuauaacgcagaacugcucguagcucuugagaaucagcauaccauugaucugacagacucagaaaugaacaaguuguucgagaaaacuaagaaacagcuacgggaaaaugccgaggauaugggcaacggaugcuuuaagauauaccacaagugugacaaugcuugcaucggcaguauucgaaacgggaccuaugaucaugacguguaccgcgacgaggcccugaauaacagauuccagaucaaaggagucgaacucaaguccgguuacaaagauuggauucuguggaucagcuuugcaauaucuugcuuccuucuguguguggccuugcucggcuuuaucaugugggcuugccaaaaggggaauauuagguguaacaucugcauuuga

SEQ ID NO: 138019 - RNA, 1701 nt, Artificial Sequence
  derived and/or modified CDS sequence (opt3) from hemagglutinin__InfluenzaA__AGK63013
augaagaccaucauugcccugagcuacauacucugccuuguguucgcucagaaacugcccggcaacgacaauuccacagcaacuuuguguuuagggcaccaugccgucccuaacggaacgaucguuaagaccauuacaaaugaucaaaucgaggugacuaacgcgaccgaacugguacagucuucaaguacaggugagauuugcaauagcccacaccagauccuagacggcgaaaacuguacccucauagaugcucugcuuggggacccgcagugcgauggauuucaaaauaaaaagugggaccuguucguggagagauccaaagcccauucuaacuguuaucccuacgaugucccugacuaugcaucguugaggucacucguggccagcaguggcacucuggaauuuaauaacgaguccuucaauuggacagguguuacccagaacgggacgucuagcgcuugcauccggcgcuccaauaacucauuuuucagucgacugaauuggcucacucacuuaaacuuuaaguacccagcacuggaugugaccaugcccaacaaugagcaguucgacaaacuuuauauuuggggaguccaucacccuggcacagauaaggaccagaucuuuuuguacgcccaagcuagcggccguauuacugugucuaccaagagaucccagcaggccguaaucccaaacauagggucaaggccccggguucgcaauauuccuagcagagugaguaucuauuggacaauugucaaaccaggagauauccugcuaaucaacucuaccgguaaucucauugcgccgaggggcuacuucaagauacgguccgggaaaagcucgaucaugcgcucugacgcacccauuggaaaguguaacuccgccugcaucacgccuaauggcucaauaccaaacgacaagcccuuucagaaugugaaccgaauuacuuacggugcuugugccagauaugugaaacaaaauacacugaaacuugcaaccgggaugaggaacgucccugaaaagcagacucggggaaucuucggcgcuaucgccguuuuuauugagaauggcugggaagggaugguggauggaugguacgguuuccgucaccagaacagugagggccgcgggcaagcggccgcacugcagagcacacaggcugccaucgaccagauuaccggaaaguugaauagacucauaggcgagacgaacgaaaaauuccaucaaaucgagaaggaauuuuccgagguagaagguaggauucaggcucuggagaaauauguggaggauaccaagaucgacuuauggucuuacaacgccgaacugcucgucgcacuugagaaucagcacacaaucgaucugacugacagcgaaaugaacaaguuguucgagaaaaccaagaaacagcuacgggaaaaugccgaggauauggggaacggcugcuuuaagauuuaucauaaaugugacaaugcuugcauaggaucaauccgaaacggcacauacgaucacgacguguaucgcgaugaggcgcugaauaacagauuccaaauuaaggggguugaacucaagaguggauacaaagacuggauccuguggauuuccuuugcaaucagcugcuuccuucuguguguggccuugcucgguuuuauaauguggucuugccagaagggcaauaucagguguaacauuugcaucuga

SEQ ID NO: 138020 - RNA, 1701 nt, Artificial Sequence
  derived and/or modified CDS sequence (opt3) from hemagglutinin__InfluenzaA__AGK63015
augaagaccaucauugcccugagcuacauacucugccuuguguucgcucagaaacugcccggcaacgacaauuccacagcaacuuuguguuuagggcaccaugccgucccuaacggaacgaucguuaagaccauuacaaaugaucaaaucgaggugacuaacgcgaccgaacugguacagucuucaaguacaggugagauuugcgacagcccacaccagauccuagauggcgaaaauuguacccucauagacgcucugcuuggggauccgcagugcgacggauuucaaaacaaaaagugggaucuguucguggagagauccaaagccuauucuaauuguuaccccuaugacgucccugauuacgcaucguugaggucacucguggccagcaguggcacucuggaauuuaacaaugaguccuucaacuggacagguguuacccagaaugggacgucuagcgcuugcauccggaaguccaacucaaguuucuuuagccgccugaauuggcucacucauuuaaacuuuaaguauccagcacugaaugugaccaugcccaacaacgagcaguucgacaaacuuuacauuuggggaguccaccauccuggcacagauaaggaccagaucuuuuuguaugcccaaucuuccggccgaauuacugugucaaccaaacguagccagcaggcuguaaucccaaauauagggaguagacccaggauucggaacaucccuucucgcauuuccaucuacuggacaaucguuaagccaggagauauucugcuaauaaauagcaccgguaaccucaucgccccgagaggcuacuucaaaauuaggucggggaagucuuccaucaugcggucagacgcgcccauaggaaaguguaauagugaaugcauuacgccuaacggcagcaucccaaaugacaaacccuuucagaacgugaaucgcaucacuuauggugcauguccucgauacgucaagcaauccacacugaaacuugccaccgggaugagaaacgugccagagaagcagacuaggggaauuuucggcgcuaucgccggcuuuauugaaaaugggugggagggaaugguggaugguugguauggcuuccggcaccagaacucugaggggcguggacaagcagcugaccugaaaagcacacaggccgcgauagaucagaucaauggcaaguugaaccgccucauugguaaaaccaaugaaaaguuccaccagaucgagaaggaauuuucagaggucgaagggagaauccaagaccuggagaaauacguugaggauacgaagauugacuuauggaguuauaacgccgaacugcucguggcacuugagaaccagcauaccauagaucugacagacuccgaaaugaauaaauuguucgagaagacuaaaaagcagcuaagggaaaacgcugaggauaugggcaauggaugcuuuaagaucuaccacaaaugugacaacgccugcauuggcagcauccggaaugggaccuauaaccaugauguauaccgagacgaggcucugaauaaccgcuuccagauuaagggaguggaacucaaaucugguuacaaggacuggauccuguggauaucauuugccaucaguugcuuccuucugugugucgcauugcucggcuuuauuaugugggccugccaaaaagggaauaucagauguaacauuugcaucuga

SEQ ID NO: 138021 - RNA, 1701 nt, Artificial Sequence; identical to SEQ ID NO: 135030
  derived and/or modified CDS sequence (opt3) from hemagglutinin__InfluenzaA__AGK63017

SEQ ID NO: 138022 - RNA, 1701 nt, Artificial Sequence
  derived and/or modified CDS sequence (opt3) from hemagglutinin__InfluenzaA__AGK63019
augaagaccaucauugcccugagcuacauacucugccuuguguucgcucagaaacugcccggcaacgacaauuccacagcaacuuuguguuuagggcaccaugccgucccuaacggaacgaucguuaagaccauuacaaaugaucaaaucgaggugacuaacgcgaccgaacugguacagucuucaaguacaggugagauuugcgacagcccacaccagauccuagauggcgaaaauuguacccucauagacgcucugcuuggggauccgcagugcgacggauuucaaaacaaaaagugggaucuguucguggagagauccaaagccuauucuaauuguuaccccuaugacgucccugauuacgcaucguugaggucacucguggccagcaguggcacucuggaauuuaacaaugaguccuucaacuggacagguguuacccagaaugggacgucuagcgcuugcauccggcgcuccaacucaaguuucuuuagccgacugaauuggcucacucauuuaaacuuuaaguauccagcacugaaugugaccaugcccaacaacgagcaguucgacaagcuguacauuuggggaguccaccauccuggcacagauaaagaccagaucuuuuuguaugcccaaucuuccggccguauuacugugucaaccaagagaagccagcaggcuguaaucccaaauauagggaguaggccccggauucgcaacaucccuucuagaauuuccaucuacuggacaaucguuaaaccaggagauauucugcuaauaaauagcaccgguaaccucaucgccccgaggggcuacuucaagauucggucggggaaaucuuccaucaugcgcucagacgcgcccauaggaaaguguaauagugaaugcauuacgccuaacggcagcaucccaaaugacaagcccuuucagaacgugaaucgaaucacuuauggugcauguccuagauacgucaaacaauccacacugaaacuugccaccgggaugaggaacgugccagagaagcagacucggggaauuuucggcgcuaucgccggcuuuauugaaaaugggugggagggaaugguggaugguugguauggcuuccgucaccagaacucugaggggcgcggacaagcagcugaccuuaagagcacacaggccgcgauagaucagaucaauggcaaauugaacagacucauugguaagaccaaugaaaaauuccaccagaucgagaaggaauuuucagaggucgaagggaggauccaagaccuggagaaguacguugaggauacgaaaauugacuuauggaguuauaacgccgaacugcucguggcacuugagaaccagcauaccauagaucugacagacuccgaaaugaauaaguuguucgagaaaacuaagaaacagcuacgggaaaacgcugaggauaugggcaauggaugcuuuaagaucuaccacaagugugacaacgccugcauuggcagcauccgaaaugggaccuaugaucaugacguauaccgcgacgaggcucugaacaauagauuccagauuaaaggaguggaacucaagucugguuacaaagauuggauccuguggauaucauuugccaucaguugcuuccuucugugugucgcauugcucggcuuuauuaugugggccugccaaaaggggaacaucagguguaauauuugcaucuga

SEQ ID NO: 138023 - RNA, 1701 nt, Artificial Sequence; identical to SEQ ID NO: 137897
  derived and/or modified CDS sequence (opt3) from hemagglutinin__InfluenzaA__AGK63021

SEQ ID NO: 138024 - RNA, 1701 nt, Artificial Sequence
  derived and/or modified CDS sequence (opt3) from hemagglutinin__InfluenzaA__AGK63025
augaagaccaucauugcccugagcuacauacucugccuuguguucgcucagaaacugcccggcaacgacaauuccacagcaacuuuguguuuagggcaccaugccgucccuaacggaacgaucguuaagaccauuacaaaugaucaaaucgaggugacuaacgcgaccgaacugguacagucuucaaguacaggugagauuugcgacagcccacaccagauccuagauggcgaaaauuguacccucauagacgcucugcuuggggauccgcagugcgacggauuucaaaacaaaaagugggaucuguucaucgagagauccaaagccuauucuaauuguuaccccuaugacgugccugauuacgcaucguugaggucacucgucgccagcaguggcacucuggaauuuaacaaugaguccuucaacuggacaggugugacccagaaugggacgucuagcgcuugcauucggaaguccaacucaaguuucuuuagccgccugaauuggcucacucauuuaaacuuuaaguauccagcacugaauguuaccaugcccaacaacgagcaguucgacaaacuuuacaucuggggagugcaccauccuggcacagauaaggaccagaucuuuuuguaugcccaaucuuccggccgaauuacugucucaaccaaacguagccagcaggcugugauaccaaauauugggaguagacccaggauccggaacauuccuucucgcaucuccaucuacuggacaauuguaaagccaggagauauacugcuaaucaauagcaccgguaaccucauugccccgagaggcuacuucaaaaucaggucggggaagucuuccauaaugcggucagacgcgcccauuggaaaguguaauagugaaugcaucacgccuaacggcagcaucccaaaugacaaacccuuucagaacguuaaucgcauuacuuauggugcauguccucgauacgugaagcaauccacacugaaacuugccaccgggaugagaaacgucccagagaagcagacuaggggaaucuucggcgcuauugccggcuuuauagaaaaugggugggagggaaugguggaugguugguauggcuuccggcaccagaacucugaggggcguggacaagcagcugaccugaaaagcacacaggccgcgaucgaucagauuaauggcaaguugaaccgccucaucgguaaaaccaaugaaaaguuccaccagaucgagaaggaauuuucagagguggaagggaggauucaagaccuggagaaauacgucgaggauacgaagauagacuuauggaguuauaacgccgaacugcucguugcacuugagaaccagcauaccaucgaucugacagacuccgaaaugaauaaauuguucgagaagacuaaaaagcagcuaagagaaaacgcugaggauaugggcaauggaugcuuuaagauuuaccacaaaugugacaacgccugcaucggcagcauucggaaugggaccuauaaccaugauguguaccgagacgaggcucugaauaaccgcuuccagaucaagggaguagaacucaaaucugguuacaaggacuggauacuguggaucucauuugccauuaguugcuuccuucuguguguggcauugcucggcuuuaucaugugggccugccaaaaagggaauauuagauguaacaucugcauauga

SEQ ID NO: 138025 - RNA, 1701 nt, Artificial Sequence; identical to SEQ ID NO: 137122
  derived and/or modified CDS sequence (opt3) from hemagglutinin__InfluenzaA__AGK63027

SEQ ID NO: 138026 - RNA, 1701 nt, Artificial Sequence
  derived and/or modified CDS sequence (opt3) from hemagglutinin__InfluenzaA__AGK63029
augaagaccaucauugcccugagcuacauacucugccuuguguucgcucagaaacugcccggcaacgacaauuccacagcaacuuuguguuuagggcaccaugccgucccuaacggaacgaucguuaagaccauuacaaaugaucaaaucgaggugacuaacgcgaccgaacugguacagucuucaaguacaggugagauuugcaauagcccacaccagauccuagacggcgaaaacuguacccucauagaugcucugcuuggggacccgcagugcgauggauuucaaaauaaaaagugggaccuguucguggagagauccaaagcccauucuaacuguuaucccuacgaugucccugacuaugcaucguugaggucacucguggccagcaguggcacucuggaauuuaauaacgaguccuucaauuggacagguguuacccagaacgggacgucuagcgcuugcauccggcgcuccaauaacucauuuuucagucgacugaauuggcucacucacuuaaacuuuaaguacccagcacugaacgugaccaugcccaauaacgagcaguucgauaagcuguauauuuggggaguccaucacccuggcacagacaaagaucagaucuuuuuguacgcccaagcuagcggccguauuacugugucuaccaagagaucccagcaggccguaaucccaaauauagggucaaggccccggguucgcaacauuccuagcagagugaguaucuauuggacaauugucaaaccaggagacauccugcuaaucaauucuaccgguaaccucauugcgccgaggggcuacuucaagauacgguccgggaaaagcucgaucaugcgcucugaugcacccauuggaaaguguaauuccgccugcaucacgacuaacggcucaauaccuaaugacaagccauuucagaacgugaaucgaauuacauacggugcuugucccagauaugugaaacaaaacacccugaaacuugccacugggaugaggaaugucccugaaaaacagacacggggaaucuucggcgcaaucgcuggcuuuauugagaacgggugggaaggaaugguugacgguugguacggcuuccgucaccagaauagugaggggcgcggacaagccgcggaucuuaagagcacccaggccgcaaucgaccagauuaacggcaaauugaacagacucauagguaagacgaaugagaaauuccaucagaucgaaaaggaguuuuccgaaguggaggggaggauucaagaucuggaaaaguauguagaggacaccaaaaucgauuuauggucuuacaacgcugagcugcucguggcccuugaaaaucagcacacaaucgaccugacugauagcgagaugaacaaguuguucgaaaagaccaagaaacagcuacgggagaaugcugaagacaugggcaacggaugcuuuaagauuuaucauaagugugauaaugccugcauaggcucaauccgaaacgggacauacgaccacgaugucuaucgcgacgaggcacugaauaacagauuccagauuaaaggaguggagcucaagagugguuacaaagacuggauccuguggauuuccuuugccaucagcugcuuccuucuguguguugcuuugcucggcuuuauaaugugggcgugccaaaaggggaauaucagguguaacauuugcaucuga

SEQ ID NO: 138027 - RNA, 1701 nt, Artificial Sequence
  derived and/or modified CDS sequence (opt3) from hemagglutinin__InfluenzaA__AGK63031
augaagaccaucauugcccugagcuacauacucugccuuguguucgcucagaaacugcccggcaacgacaauuccacagcaacuuuguguuuagggcaccaugccgucccuaacggaacgaucguuaagaccauuacaaaugaucaaaucgaggugacuaacgcgaccgaacugguacagucuucaaguacaggugagauuugcgacagcccacaccagauccuagauggcgaaaauuguacccucauagacgcucugcuuggggauccgcagugcgacggauuucaaaagaagaaaugggaucuguucguggagagauccaaggcccauucuaacuguuaucccuacgacgucccugauuaugcaucguugaggucacucguggccagcaguggcacucuggaauuuaauaacgaguccuucaauuggacagguguuacccagaacgggacgucuagcgcuugcauccggcgcuccaauaacucauuuuucagucgacugaauuggcucacucacuuaaacuuuaaguacccagcacugaaugugauuaugcccaacaacgagcaguucgacaaacuuuauaucuggggaguccaucacccuggcaccgauaaggaccagaucuuuuuguacgcccaagcuagcggccguauuacagugucuacuaaaagaucccagcaggccguaauaccaaauauugggucaaggccccggguucgcaacaucccuagcagagugaguauuuauuggaccaucgucaagccaggagauauccugcuaauuaauucuacagguaaccucauagcgccgaggggcuacuucaaaauccgguccgggaaaagcucgauuaugcgcucugacgcacccaucggaaaguguaauuccgccugcauaaccccuaacggcucaauuccaaaugacaaacccuuucagaacgugaaucgaaucacguacggugcuuguccuagauaugugaagcaaaacacucugaaacuugccacagggaugaggaaugucccagaaaagcagacccggggaaucuucggcgcaauugcuggcuuuaucgagaacgggugggaaggaaugguugaugguugguacggcuuccgucaccagaauagugaggggcgcggacaagccgcggaccugaaaagcacucaggccgcaauugaucagauaaacggcaaguugaauagacucaucgguaaaacaaacgagaagcugcaucagauugaaaaggaguucuccgaaguggaggggaggaucuuagaccuggaaaaauauguagaggauaccaagaucgaccucuggucuuacaacgcugagcuucugguggccuuggaaaaucaacacacgauugaucuaaccgacagcgagaugaacaaacuguuugaaaagacuaaaaagcagcuccgggagaaugcugaagauaugggcaacggaugcuucaagauauaucauaaaugugacaaugccugcaucggcucaauucgaaacgggacauacgaucacgacgucuaucgcgacgaggcacugaauaacagauuucagaucaagggaguggagcuuaaaagugguuacaaggauuggauucuguggaucuccuucgccauaagcugcuuuuugcucuguguugcucuguuaggcuucaucaugugggcgugccagaaagggaauauuagguguaacaucugcauuuga

SEQ ID NO: 138028 - RNA, 1701 nt, Artificial Sequence
  derived and/or modified CDS sequence (opt3) from hemagglutinin__InfluenzaA__AGK63033
augaagaccaucauugcccugagcuacauacucugccuuguguucgcucagaaacugcccggcaacgacaauuccacagcaacuuuguguuuagggcaccaugccgucccuaacggaacgaucguuaagaccauuacaaaugaucaaaucgaggugacuaacgcgaccgaacugguacagucuucaaguacaggugagauuugcgacagcccacaccagauccuagauggcgaaaauuguacccucauagacgcucugcuuggggauccgcagugcgacggauuucaaaacaaaaagugggaucugaucguggagagauccaaagccuauucuaauuguuaccccuaugacgucccugauuacgcaucguugaggucacucguggccagcaguggcacucuggaguucaacaaugaauccuuuaacuggacagguguuacccagaaugggacgucuagcgcuugcauucggaaguccaacucaaguuucuuuagccgccugaauuggcucacucauuuaaacuucaaguauccagcacugaaugugaccaugcccaacaacgagcaguuugacaaacuuuacaucuggggaguccaccauccuggcacagauaaggaccagauuuucuuguaugcccaggcuucuggccgaaucacuguguccaccaaacguucacaacaggccguaauaccaaauauugggagcagacccaggauccggaacauuccuagucgcaucucuaucuacuggacaauuguuaagccaggagauauacugcuaaucaauuccaccgguaaccucauugcgccgagaggcuacuuuaaaaucaggagcgggaagucgucuauaaugcgguccgacgcacccauuggaaaguguaauucagaaugcaucacgccuaacggcaguaucccaaaugacaaacccuuccagaacgugaaucgcauuacuuauggugccuguccucgauacgucaagcaaagcacacugaaacuugcuaccgggaugagaaacgugccagagaagcagacuaggggaaucuuuggcgccauugcaggcuucauagaaaaugggugggagggaaugguggaugguugguauggcuuucggcaccagaacuccgaggggcguggacaagcugccgaccugaaaucuacacaggcggccaucgaucagauuaauggcaaguugaaccgccucaucgguaaaaccaaugaaaaguuccaccagaucgagaaggaguucagcgaagucgaagggaggauucaagaccuggagaaauacguugaggauacgaagauagacuuauggucauauaacgcagaacugcucguggcucuugagaaccagcauaccaucgaucugacagacagugaaaugaauaaauuguuugagaagacuaaaaagcagcuaagagaaaacgccgaggauaugggcaauggaugcuucaagauuuaccacaaaugugacaacgcuugcaucggcuccauucggaaugggaccuaugaucaugacguauaccgagacgaggcccugaacaaucgcuuucagaucaagggaguggaacucaaaagcgguuacaaggauuggauacuguggaucucuuucgcaauuucaugcuuucuucugugugucgccuugcucggcuucaucaugugggcuugccaaaaagggaacauuagauguaauaucugcauauga

SEQ ID NO: 138029 - RNA, 1701 nt, Artificial Sequence
  derived and/or modified CDS sequence (opt3) from hemagglutinin__InfluenzaA__AGK63035
augaagaccaucauugcccugagcuacauacucugccuuguguucgcucagaaacugcccggcaacgacaauuccacagcaacuuuguguuuagggcaccaugccgucccuaacggaacgaucguuaagaccauuacaaaugaucaaaucgaggugacuaacgcgaccgaacugguacagucuucaaguacaggugagauuugcgacagcccacaccagauccuagauggcgaaaauuguacccucauagacgcucugcuuggggauccgcagugcgacggauuucaaaacaaaaagugggaucuguucguggagagauccaaagccuauucuaauuguuaccccuaugacgucccugauuacgcaucguugaggucacucguggccagcaguggcacucuggaauuuaacaaugaguccuucaacuggacagguguuacccagaaugggacgucuagcgcuugcauccggcgcuccaacaauucauuuuucagucgacugaacuggcucacucauuuaaauuuuaaguauccagcacugaacgugaccaugcccaacaaugagcaguucgacaaacuuuacauuuggggaguccaccauccuggcacagauaaggaccagaucuuuuuguaugcccaagcuagcggccguauuacugugucuaccaagagaucccagcaggccguaaucccaaacauagggucaaggccccggauucgcaauaucccuagcagaauuaguaucuacuggacaaucguuaaaccaggagauauucugcuaauaaacucuaccgguaaucucaucgcgccgaggggcuacuucaagauucgguccgggaaaagcucgaucaugcgcucugacgcacccauaggaaaguguaacuccgaaugcauuacgccuaauggcucaaucccaaacgacaagcccuuucagaaugugaaccgaaucacuuauggugccuguccuagauacgucaaacaaaguacacugaaacuugcuaccgggaugaggaaugugccagagaagcagacucggggaauuuucggcgccaucgcaggcuuuauugaaaacgggugggagggaaugguggaugguugguauggcuuccgucaccagaauagcgaggggcgcggacaagcugccgaccugaaguccacacaggcggccauagaucagaucaacggcaaauugaauagacucauugguaagaccaacgaaaaauuccaccagaucgagaaggaauuuucugaggucgaagggaggauccaagaccuggagaaguacguugaggauacgaaaauugacuuauggagcuauaacgcagaacugcucguggcucuugagaaucagcauaccauagaucugacagacucagaaaugaacaaguuguucgagaaaacuaagaaacagcuacgggaaaaugccgaggauaugggcaacggaugcuuuaagaucuaccacaagugugacaaugcuugcauuggcaguauccgaaacgggaccuaugaucaugacguauaccgcgacgaggcccugaauaacagauuccagauuaaaggaguggaacucaaguccgguuacaaagauuggauccuguggaucagcuuugcaauaucuugcuuccuucugugugucgccuugcucggcuuuauuaugugggcuugccaaaaggggaauaucagguguaacauuugcaucuga

SEQ ID NO: 138030 - RNA, 1701 nt, Artificial Sequence
  derived and/or modified CDS sequence (opt3) from hemagglutinin__InfluenzaA__AGK63037
augaagaccaucauugcccugagcuacauacucugccuuguguucgcucaggagcugcccggcaacgacaauuccacagcaacuuuguguuuagggcaccaugccgucccuaacggaacgaucguuaaaaccauuacaaaugaucaaaucgaagugacuaacgcgaccgagcugguacagucuucaaguacaggugaaauuugcaauagcccacaccagauccuagacggcgagaacuguacccucauagaugcucugcuuggggacccgcagugcgauggauuucaaaauaagaaaugggaccuguucguggaaagauccaaggcccauucuaacuguaaucccuaugaugucccugacuacgcaucguugaggucacucguggccagcaguggcacucuggaguuuaacaaugaguccuucaacuggacagguguuacccagaaugggacgucuagcgcuugcauccggcgcuccaacaauucauuuuucagucgacugaacuggcucacucacuuaaacuuuaaauauccagcacugaaugugaccaugcccaacaaugaacaguucgauaaacuuuacauuuggggaguccaucacccuggcacagacaaggaucagaucuuuuuguaugcccaagcuagcggccguauuacugugucuaccaagagaucccagcaggccguaaucccaaacauagggucaaggccccggguucgcaauauuccuagcagagugaguaucuacuggacaauugucaagccaggagacauccugcuaaucaacucuaccgguaaucucauugcgccgaggggcuauuucaaaauacgguccggaaagagcucgaucaugcgcucugaugcacccauugggaaauguaacuccgccugcaucacgccuaauggcucaauaccaaacgacaagcccuuucagaaugugaaccgaauuacuuacggugcuuguccuagauacgugaagcaaaauacacugaaacuugccaccgggaugaggaacgucccagagaagcagacucggggaaucuucggcgcaaucgcuggcuuuauugaaaaugggugggagggaaugguugacgguugguauggcuuccgucaccagaacagugaggggcgcggacaagccgcggaucugaaaagcacacaggccgcaaucgaccagauuaacggcaaguugaauagacucauagguaaaaccaacgaaaaguuccaucagaucgagaaagaauuuuccgagguggaagggaggauucaagaucuggagaaguacguagaggacacgaagaucgauuuauggucuuauaaugcucagcugcucguggcccuugaaaaccagcacaccaucgaccugacagauagcgagaugaauaaauuguucgaaaagacuaaaaagcagcuacgggagaacgcugaagacaugggcaauggaugcuuuaaaauuuaccauaagugugauaacgccugcauaggcucaauccgaaaugggaccuaugaccacgaugucuaccgcgacgaggcacugaacaauagauuccaaauuaagggaguggagcucaaaagugguuauaaggacuggauccuguggauuuccuuugccaucagcugcuuccuucuguguguugcuuugcucggcuuuauaaugugggcgugccagaaagggaacaucagguguaauauuugcaucuga

SEQ ID NO: 138031 - RNA, 1701 nt, Artificial Sequence
  derived and/or modified CDS sequence (opt3) from hemagglutinin__InfluenzaA__AGK63039
augaagaccaucauugcccugagcuacauacucugccuuguguucgcucagaaacugcccggcaacgacaauuccacagcaacuuuguguuuagggcaccaugccgucccuaacggaacgaucguuaagaccauuacaaaugaucaaaucgaggugacuaacgcgaccgaacugguacagucuucaaguacaggugagauuugcaauagcccacaccagauccuagacggcgaaaacuguacccucauagaugcucugcuuggggacccgcagugcgauggauuucaaaagaagaaaugggaccuguucguggagagauccaaggcccauucuaauuguuaucccuacgaugucccugacuaugcaucguugaggucacucguggccagcaguggcacucuggaauuuaacaaugaguccuucaacuggacagguguuacccagaaugggacgucuagcgcuugcauccggcgcuccaacaauucauuuuucagucgacugaacuggcucacucacuuaaauuuuaaguacccagcacugaacgugacccuucccaacaaugagcaguucgauaaauuguauauuuggggaguccaucacccuggcacagacaaggaucagaucuuucuguacgcccaagcuagcggccguauuacugugucuaccaaaagaucccagcaggccguaaucccaaacauagggucaaggccccggguucgcaauauuccuagcagagugaguaucuauuggacaauugucaagccaggagacauccuacucaucaacucuaccgguaaucugauugcgccgaggggcuacuucaaaauacgguccgggaaaagcucgaucaugcgcucugaugcacccauuuccaaguguaacucagccugcaucacgccuaauggaaguauaccaaacgacaaacccuuucagaaugugaaccgaauuacuuacggcgcuuguccuagauaugugaagcaaaauacacuuaaacuggccaccgguaugaggaacgucccagaaaagcagacucgggggaucuucggagcaaucgcuggcuuuauugagaauggcugggaagggaugguugacggaugguacgguuuccgucaccagaacagcgagggccgcgggcaagccgcggauuugaaauccacacaggccgcaaucgaccagauuaauggaaagcucaacagacugauaggcaaaaccaacgagaaguuccaucagaucgaaaaggaguuuucugaaguggaggguaggauucaagauuuagaaaaauauguagaggacacgaagaucgaucuguggagcuacaaugcugagcuccuuguggcccuggaaaaccagcacaccaucgacuugacagauucagagaugaauaaacuauucgaaaagacuaaaaagcagcugcgggagaacgcugaagacauggggaauggcugcuuuaagauuuaucauaaaugugauaacgccugcauaggaaguauccgaaauggcaccuacgaccacgaugucuaucgcgacgaggcacucaacaauagauuccagauuaaggggguggagcugaaauccggauacaaggacuggauccuuuggauuagcuuugccaucucuugcuuccuguuguguguugcucuccuggguuuuauaauguggucaugccaaaaaggcaacaucagguguaauauuugcaucuga

SEQ ID NO: 138032 - RNA, 1701 nt, Artificial Sequence
  derived and/or modified CDS sequence (opt3) from hemagglutinin__InfluenzaA__AGK63041
augaagaccaucauugcccugagcuacauacucugccuuguguucgcucagaaacugcccggcaacgacaauuccacagcaacuuuguguuuagggcaccaugccgucccuaacggaacgaucguuaagaccauuacaaaugaucaaaucgaggugacuaacgcgaccgaacugguacagucuucaaguacaggugagauuugcgacagcccacaccagauccuagauggcgaaaauuguacccucauagacgcucugcuuggggauccgcagugcgacggacugcaaaacaaaaagugggauuugaucguggagagauccaaagcccauucuuauuguuaccccuaugacgucccugauuacgcaucgcucaggucacugguggccagcaguggcacucuggaauuuaauaacgaguccuucaauuggacagagguuacccagaacgguacgucuagcgcuugcauucggcgcuccaauaacucauuuuucagucgacucaauugguuaacucaccugaacuuuaaguauccagcacuuaaugugaccaugcccaacaacgaacaguucgacaaguuguacaucuggggaguccaucacccugggacagauaaagaccagauuuuucuguaugcccaagcuagcggccguaucacugugucuaccaagagaucccagcaggccguaauaccaaauauuggcucaaggccccggguucgcaacaucccuagcagagugaguauuuacuggacaaucgucaaaccaggggauauccuacucauuaauucuaccggaaaccugauagcgccgagggguuacuucaagauccgguccggcaaaagcucgauuaugcgcucugacgcacccaucgggaaguguaauuccgccugcauaacgccuaacggaucaauuccaaaugacaagcccuuucagaacgugaaucgaaucacuuauggcgcuuguccuagauacgugaaacaaaacacacuuaagcuggccaccgguaugaggaaugucccagagaaacagacucgggggaucuucggagcaauugcuggcuuuaucgaaaacggcugggaggggaugguugauggaugguaugguuuccgucaccagaauagugagggccgcgggcaagccgcggaccucaagagcacacaggccgcaauugaucagauaaacggaaaauugaauagacugaucggcaagaccaacgaaaaauuucaucagauugagaaggaguucuccgaaguggaagguaggauccaagacuuagagaaguacguagaggauacgaaaaucgaccuguggucuuauaacgcugaacuccuuguggcccuggagaaucagcacaccauugauuugacagacagcgaaaugaacaagcuauucgagaaaacuaagaaacagcugcgggaaaaugcugaggauauggggaacggcugcuuuaagauauaccauaagugugacaaugccugcaucggaucaauucgaaacggcaccuaugaucacgacgucuaccgcgacgaggcacucaauaacagauuccagaucaaagggguggaacugaagaguggauacaaagauuggauucuuuggaucuccuuugccauaagcugcuuccuguuguguguugcucuccuggguuuuaucaugugggcgugccaaaagggcaauauuagguguaacaucugcauuuga

SEQ ID NO: 138033 - RNA, 1701 nt, Artificial Sequence
  derived and/or modified CDS sequence (opt3) from hemagglutinin__InfluenzaA__AGK63043
augaagaccaucauugcccugagcuacauacucugccuuguguucgcucagaaacugcccggcaacgacaauuccacagcaacuuuguguuuagggcaccaugccgucccuaacggaacgaucguuaagaccauuacaaaugaucaaaucgaggugacuaacgcgaccgaacugguacagucuucaaguacaggugagauuugcgacagcccacaccagauccuagauggcgaaaauuguacccucauagacgcucugcuuggggauccgcagugcgacggauuucaaaacaaaaagugggaucuguucguggagagauccaaagccuauucuaauuguuaccccuaugacgucccugauuacgcaucguugaggucacucguggccagcaguggcacucuggaauuuaacaaugaguccuucaacuggacagguguuacccagaaugggacgucuagcgcuugcauccggcgcuccaacaauucauuuuucagucgacugaacuggcucacucauuuaaauuuuaaguauccagcacugaacgugaccaugcccaacaaugagcaguucgacaaacuuuacauuuggggaguccaccauccuggcacagauaaagaccagaucuuuuuguaugcccaagcuagcggccguauuacugugucuaccaagagaucccagcaggccguaaucccaaacauagggucaaggccccggguucgcaauauuccuagcagagugaguaucuacuggacaauugucaaaccaggagauauccugcuaaucaacucuaccgguaaucucauugcgccgaggggcuacuucaagauacgguccgggaaaagcucgaucaugcgcucugacgcacccauuggaaaguguaacuccgccugcaucacgccuaauggcucaauaccaaacgacaagcccuuucagaaugugaaccgaauuacuuauggugcuuguccuagauacgugaaacaaaguacacugaaacuugccaccgggaugaggaaugucccagaaaagcagacucggggaaucuucggcgcaaucgcuggcuuuauugagaacgggugggaaggaaugguugaugguugguauggcuuccgucaccagaauagcgaggggcgcggacaagccgcggaccugaaguccacacaggccgcaaucgaucagauuaacggcaaauugaauagacucauagguaagaccaacgagaaauuccaccagaucgaaaaggaguuuucugaaguggaggggaggauucaagaccuggaaaaguacguagaggauacgaaaaucgacuuauggagcuauaacgcugagcugcucguggcccuugaaaaucagcauaccaucgaucugacagacucagagaugaacaaguuguucgaaaagacuaagaaacagcuacgggagaaugcugaagauaugggcaacggaugcuuuaagauuuaccacaagugugacaaugccugcauaggcaguauccgaaacgggaccuaugaucaugacgucuaccgcgacgaggcacugaauaacagauuccagauuaaaggaguggagcucaaguccgguuacaaagauuggauccuguggauuagcuuugccaucucuugcuuccuucuguguguugcuuugcucggcuuuauaaugugggcgugccaaaaggggaauaucagguguaacauuugcaucuga

SEQ ID NO: 138034 - RNA, 1701 nt, Artificial Sequence
  derived and/or modified CDS sequence (opt3) from hemagglutinin__InfluenzaA__AGK63045
augaagaccaucauugcccugagcuacauacucugccuuguguucgcucagaaacugcccggcaacgacaauuccacagcaacuuuguguuuagggcaccaugccgucccuaacggaacgaucguuaagaccauuacaaaugaucaaaucgaggugacuaacgcgaccgaacugguacagucuucaaguacaggugagauuugcaauagcccacaccagauccuagacggcgaaaacuguacccucauagaugcucugcuuggggacccgcagugcgauggauuucaaaagaagaaaugggaccuguucguggagagauccaaggccuauucuaauuguuaccccuaugaugucccugacuacgcaucguugaggucacucguggccagcaguggcacucuggaauuuaacaaugaguccuucaacuggacagguguuacccagaaugggacgucuagcgcuugcauccggaaguccaacucaaguuucuuuagccgccugaauuggcucacucauuuaaacuuuaaauauccagcacugaaugugaccaugcccaacaacgagcaguucgauaaacuuuacauuuggggaguccaccauccuggcacagacaaagaucagaucuuuuuguaugcccaggcuucuggccgaauuacuguguccaccaagcguucacaacaggccguaaucccaaauauagggagcagacccaggauucggaacaucccuagucgcauuucuaucuacuggacaaucguuaaaccaggagacauucugcuaauaaauuccaccgguaaccucaucgcgccgagaggcuacuucaagauuaggagcgggaagucgucuaucaugcgguccgaugcacccauaggaaaauguaauucagaaugcauuacgccuaacggcaguaucccaaaugacaagcccuuucagaacgugaaucgcaucacuuauggugccuguccucgauacgucaaacaaagcacacugaaacuugcuaccgggaugagaaacgugccagagaaacagacuaggggaauuuucggcgccaucgcaggcuuuauugaaaaugggugggagggaaugguggacgguugguauggcuuccggcaccagaacuccgaggggcguggacaagcugccgaucugaagucuacacaggcggccauagaccagaucaauggcaaauugaaccgccucauugguaagaccaaugaaaaguuccaccagaucgagaaagaauuuagcgaggucgaagggagaauccaagaucuggagaaguacguugaggacacgaaaauugauuuauggucauauaacgcacagcugcucguggcucuugaaaaccagcauaccauagaccugacagauagugagaugaauaaguuguucgaaaagacuaagaagcagcuaagggagaacgccgaagacaugggcaauggaugcuuuaaaaucuaccacaagugugauaacgcuugcauuggcuccauccggaaugggaccuaugaccaugauguauaccgagacgaggcccugaacaaucgcuuccaaauuaaaggaguggagcucaagagcgguuacaaagacuggauccuguggauaucuuuugcaaucucaugcuuccuucugugugucgccuugcucggcuuuauuaugugggcuugccagaaggggaacaucagauguaauauuugcaucuga

SEQ ID NO: 138035 - RNA, 1701 nt, Artificial Sequence
  derived and/or modified CDS sequence (opt3) from hemagglutinin__InfluenzaA__AGK63047
augaaggccauccuggugguccuccuuuacaccuucgcuacagcaaacgccgacacucugugcauuggcuaucacgcgaauaacagcacggauaccguugacacaguguuggagaaaaauguaacugugacccauuccgucaacuuacuggaagauaagcacaaugggaaacuauguaagcucagaggaguggcuccccugcaucuugguaaaugcaacauagccggcuggauccuggggaauccugagugugaaucuuugucaacagcaaguagcugguccuacauuguugagaccucuucgucagacaacggaacuugcuauccaggcgauuuuaucaauuacgaagaacucagggagcagcugagcaguguguccucuuucgaacgguuugagauuuucccgaagacaagcuccuggcccaaccacgacucaaauaagggugucaccgccgcuuguccucaugcaggggccaaaaguuuuuauaagaaccugaucuggcucgugaaaaagggaaauagcuacccaaaauuaucuaaguccuauauaaacgauaagggcaaagaaguacugguucuuuggggcauccaccaccccucaacgacugcugaccaacagagcuuguaccagaaugccgaugcguacguguucgucgggaccagucgcuauucuaagaaauuuaagccugagauugcaauccgaccaaaagugcgugacagagagggaaggaugaacuacuauuggacacugauugaacccggugauaagaucacuuucgaggccaccggcaaccuaguggucccucgguacgcuuuugccauggaacgcaaugcaggguccggaauaauuaucagcgacacaccaguucaugauugcaacaccgcuugucagacgccggagggcgccauuaauacuucgcuccccuuccaaaacauccacccuaucacaauugguaaaugcccaaaguaugugaagucuaccaaacugagacuugcgacugggcugaggaauguacccuccauacagucacggggauuguuuggcgccaucgcaggcuucauugaagggggauggacagguaugguggacggcugguacggguaucaucaccagaacgagcagggaaguggcuacgcugccgaccucaagagcacccaaaaugcuaucgauaaaauaacgaacaaggucaauuccgugauugagaaaaugaacacccaguuuacagccguugguaaggaguucaaucaccuggagaagcgcaucgaaaacuuaaauaaaaagguggacgauggguuccuggacaucuggacuuacaacgcagagcuccuuguccuguuggaaaaugagcgaacccuagauuaucaugacucuaacgugaaaaaccuguacgagaagguaagaaaucagcucaaaaacaaugccaaggaaauuggcaacggauguuuugaguucuaucacaagugcgauaauacauguauggaaagcguuaaaaacggcacuuacgacuauccuaaguacucagaggaagcuaaacugaauagggagaagaucgauggggugaaacuugagaguacccggauuuaucagauacuggcgaucuacuccacagucgcaagcucuuuggugcucgucgugucacugggagccauuaguuuuuggaugugcagcaacgguuccuuacaaugccguaucuguaucuga

SEQ ID NO: 138036 - RNA, 1683 nt, Artificial Sequence
  derived and/or modified CDS sequence (opt3) from hemagglutinin__InfluenzaA__AGK82158
augaacacccagauccugguguucgcccucauugcuauaauccccacaaaugcagacaagauuugccuuggccaccaugccgucagcaacgggacuaaaguuaauacgcugaccgagagaggaguggaaguagugaacgcgacagagacugucgaaaggaccaauaucccucggauuuguuccaaggguaaacgcacaguggauuugggccaaugcggguuacugggaaccaucacuggcccaccgcagugugaccaguuucuagaguucucugcugaucucauaaucgaacgacgugaggguucagacguuugcuaccccgggaaguuugugaacgaggaagcccugagacagauucuuagggagaguggaggcaucgauaaagaagcaaugggcuucacauauagcgggauucggaccaauggagccacguccgcuugucgcagaucugguucgucauuuuacgcagagaugaaguggcuguugagcaacacugacaaugccgcuuucccucaaaugaccaagaguuauaaaaacacaaggaaguccccagcccucaucgucuggggcauacaccauucugugagcacugcggagcagaccaaacuguacggguccggaaauaagcugguaacaguuggcucaaguaacuaucagcagagcuuugugcccucuccuggugcacggccacaagucaaugggcucuccggacgcauugauuuccacugguuaaugcugaaccccaaugacaccgugacguuuucauucaacggcgccuuuaucgcuccugaucgagccagcuuccuuagaggcaaaaguauggggauucagucuggagugcaggucgacgcaaacugcgaaggugauuguuaccauuccggcgggacuaucaucagcaauuugccauuucagaacauugacucgagggcuguuggaaagugcccgcgguaugugaagcaacguucucugcuacucgccacaggcaugaaaaauguacccgagauaccuaagggucgcgggcuguucggcgcgaucgccggauucauugaaaacggcugggaggggcuuaucgauggaugguacgguuuuagacaccagaaugcacagggcgaagggaccgcugccgacuacaaauccacucaaucagcuauagaccagauuacaggaaagcugaacagguugaucgagaaaaccaaucagcaguucgagcucaucgauaacgaauuuaaugagguggaaaagcaaauuggcaacgucaucaauuggacgcgggacaguauuaccgagguguggagcuauaacgccgaacuguuaguugcaauggagaaucagcacacaauagaucuggccgacuccgagauggauaaacucuacgaacgagugaagcgccagcuuagagagaacgcugaagaggacgguacuggguguuucgaaaucuuucauaagugcgaugacgauuguauggcgucuauuaggaauaacaccuaugaccacagcaaauaccgggaggaggcaaugcagaaccgcauccaaaucgauccagucaagcugucaaguggcuauaaagacgugauuuugugguucuccuuuggagccagcugcuucauacuacuggcuaucguaaugggccucguuuuuauuugcgugaagaaugggaacaugagauguacaaucugcauuuga

SEQ ID NO: 138037 - RNA, 1683 nt, Artificial Sequence
  derived and/or modified CDS sequence (opt3) from hemagglutinin__InfluenzaA__AGK84857
augaacacccagauccugguguucgcccucauugcuauaauccccacaaaugcagacaagauuugccuuggccaccaugccgucagcaacgggacuaaaguuaauacgcugaccgagagaggaguggaaguagugaacgcgacagagacugucgaaaggaccaauaucccucggauuuguuccaaggguaaacgcacaguggauuugggccaaugcggguuacugggaaccaucacuggcccaccgcagugugaccaguuucuagaguucucugcugaucucauaaucgaacgacgugaggguucagacguuugcuaccccgggaaguuugugaacgaggaagcccugagacagauucuuagggagaguggaggcaucgauaaagaagcaaugggcuucacauauagcgggauucggaccaauggagccacguccgcuugucgcagaucugguucgucauuuuacgcagagaugaaguggcuguugagcaacacugacaaugccgcuuucccucaaaucaccaagaguuauaaaaacacaaggaaguccccagcccucauagucuggggcauucaccauucugugagcacugcggagcagaccaaacuguacggguccggaaauaagcugguaacaguuggcucaaguaacuaucagcagagcuuugugcccucuccuggugcacggccacaagucaaugggcucuccggacgcaucgauuuccacugguuaaugcugaaccccaaugacaccgugacguuuucauucaacggcgccuuuauugcuccugaucgagccagcuuccuuagaggcaaaaguauggggauccagucuggagugcaggucgacgcaaacugcgaaggugauuguuaccauuccggcgggacuaucauuagcaauuugccauuucagaacauagacucgagggcuguuggaaagugcccgcgguaugugaagcaacguucucugcuacucgccacaggcaugaaaaauguacccgagaucccuaagggucgcgggcuguucggcgcgauugccggauucaucgaaaacggcugggaggggcuuauagauggaugguacgguuuuagacaccagaaugcacagggcgaagggaccgcugccgacuacaaauccacucaaucagcuauugaccagaucacaggaaagcugaacagguugaucgagaaaaccaaucagcaguucgagcucauugauaacgaauuuaaugagguggaaaagcaaaucggcaacgucauuaauuggacgcgggacaguauaaccgagguguggagcuauaacgccgaacuguuaguugcaauggagaaucagcacacaaucgaucuggccgacuccgagauggauaaacucuacgaacgagugaagcgccagcuuagagagaacgcugaagaggacgguacuggguguuucgaaauuuuucauaagugcgaugacgauuguauggcgucuaucaggaauaacaccuaugaccacagcaaauaccgggaggaggcaaugcagaaccgcauccaaauugauccagucaagcugucaaguggcuauaaagacgugauauugugguucuccuuuggagccagcugcuucauccuacuggcuauuguaaugggccucguuuuuaucugcgugaagaaugggaacaugagauguacaauuugcaucuga

SEQ ID NO: 138038 - RNA, 1683 nt, Artificial Sequence
  derived and/or modified CDS sequence (opt3) from hemagglutinin__InfluenzaA__AGK84860
augaacacccagauccugguguucgcccucauugcuauaauccccacaaaugcagacaagauuugccuuggccaccaugccgucagcaacgggacuaaaguuaauacgcugaccgagagaggaguggaaguagugaacgcgacagagacugucgaaaggaccaauaucccucggauuuguuccaaggguaaaaugacaguggauuugggccaaugcggguuacugggaaccaucacuggcccaccgcagugugaccaguuucuagaguucucugcugaucucauaaucgaacgccgagaggguucagacguuugcuaccccgggaaguuugugaacgaggaagcccugcgucagauucuuagagagaguggaggcaucgauaaagaagcaaugggcuucacauauagcgggauuaggaccaauggagccacguccgcuugucggcgcucugguucgucauuuuacgcagagaugaaguggcuguugagcaacacugacaaugccgcuuucccucaaaugaccaagaguuauaaaaacacaagaaaguccccagcccucaucgucuggggcauacaccauucugugagcacugcggagcagaccaaacuguacggguccggaaauaagcugguaacaguuggcucaaguaacuaucagcagagcuuugugcccucuccuggugcaaggccacaagucaaugggcucuccggacggauugauuuccacugguuaaugcugaaccccaaugacaccgugacguuuucauucaacggcgccuuuaucgcuccugaucgcgccagcuuccuucgaggcaaaaguauggggauucagucuggagugcaggucgacgcaaacugcgaaggugauuguuaccauuccggcgggacuaucaucagcaauuugccauuucagaacauugacucgagagcuguuggaaagugcccgagguaugugaagcaacggucucugcuacucgccacaggcaugaaaaauguacccgagauaccuaagggucgugggcuguucggcgcgaucgccggauucauugaaaacggcugggaggggcuuaucgauggaugguacgguuuucgccaccagaaugcacagggcgaagggaccgcugccgacuacaaauccacucaaucagcuauagaccagauuacaggaaagcugaacagauugaucgagaaaaccaaucagcaguucgagcucaucgauaacgaauuuaaugagguggaaaagcaaauuggcaacgucaucaauuggacgagggacaguauuaccgagguguggagcuauaacgccgaacuguuaguugcaauggagaaucagcacacaauagaucuggccgacuccgagauggauaaacucuacgaacgggugaagcgacagcuucgcgagaacgcugaagaggacgguacuggguguuucgaaaucuuucauaagugcgaugacgauuguauggcgucuauuagaaauaacaccuaugaccacagcaaauacagggaggaggcaaugcagaaccggauccaaaucgauccagucaagcugucaaguggcuauaaagacgugauuuugugguucuccuuuggagccagcugcuucauacuacuggcuaucguaaugggccucguuuuuauuugcgugaagaaugggaacaugcgcuguacaaucugcauuuga

SEQ ID NO: 138039 - RNA, 1683 nt, Artificial Sequence
  derived and/or modified CDS sequence (opt3) from hemagglutinin__InfluenzaA__AGK84863
augaacacccagauccugguguucgcccucauugcuauaauccccacaaaugcagacaagauuugccuuggccaccaugccgucagcaacgggacuaaaguuaauacgcugaccgagagaggaguggaaguagugaacgcgacagagacugucgaaaggaccaauaucccucggauuuguuccaaggguaaaaagacaguggauuugggccaaugcggguuacugggaaccaucacuggcccaccgcagugugaccaguuucuagaguucucugcugaucucauaaucgaacgccgagaggguucagacguuugcuaccccgggaaauuugugaacgaggaagcccugcgucagauucuuagagagaguggaggcaucgauaaggaagcaaugggcuucacauauagcgggauuaggaccaauggagccacguccgcuugucggcgcucugguucgucauuuuacgcagagaugaaguggcuguugagcaacacugacaaugccgcuuucccucaaaugaccaaaaguuauaagaacacaagaaaauccccagcccucaucgucuggggcauacaccauucugugagcacugcggagcagaccaagcuguacggguccggaaauaaacugguaacaguuggcucaaguaacuaucagcagagcuuugugcccucuccuggugcaaggccacaagucaaugggcucuccggacggauugauuuccacugguuaaugcugaaccccaaugacaccgugacguuuucauucaacggcgccuuuaucgcuccugaucgcgccagcuuccuucgaggcaagaguauggggauucagucuggagugcaggucgacgcaaacugcgaaggugauuguuaccauuccggcgggacuaucaucagcaauuugccauuucagaacauugacucgagagcuguuggaaagugcccgagguaugugaaacaacggucucugcuacucgccacaggcaugaagaauguacccgagauaccuaaaggucgugggcuguucggcgcgaucgccggauucauugaaaacggcugggaggggcuuaucgauggaugguacgguuuucgccaccagaaugcacagggcgaagggaccgcugccgacuacaaguccacucaaucagcuauagaccagauuacaggaaaacugaacagauugaucgagaagaccaaucagcaguucgagcucaucgauaacgaauuuaaugagguggaaaaacaaauuggcaacgucaucaauuggacgagggacaguauuaccgagguguggagcuauaacgccgaacuguuaguugcaauggagaaucagcacacaauagaucuggccgacuccgagauggauaagcucuacgaacgggugaagcgacagcuucgcgagaacgcugaagaggacgguacuggguguuucgaaaucuuucauaaaugcgaugacgauuguauggcgucuauuagaaauaacaccuaugaccacagcaaguacagggaggaggcaaugcagaaccggauccaaaucgauccagucaaacugucaaguggcuauaaggacgugauuuugugguucuccuuuggagccagcugcuucauacuacuggcuaucguaaugggccucguuuuuauuugcgugaaaaaugggaacaugcgcuguacaaucugcauuuga

SEQ ID NO: 138040 - RNA, 1701 nt, Artificial Sequence
  derived and/or modified CDS sequence (opt3) from hemagglutinin__InfluenzaA__AGL07713
augaaggccauccuggugguccuccuuuacaccuucgcuacagcaaacgccgacacucugugcauuggcuaucacgcgaauaacagcacggauaccguugacacaguguuggagaaaaauguaacugugaccagauccgucaacuuacuggaagauaagcauaaugggaaacuauguaagcucaggggaguggcuccccugcaccuugguaaaugcaacauagccggcuggauccuggggaauccugagugugaaucuuugucaacagcaaguagcugguccuacauuguugagaccucuucgucagacaacggaacuugcuauccaggcgauuuuaucgacuacgaagaacuccgggagcagcugagcaguguguccucuuucgaacgcuuugagauuuucccgaagacagguagcuggcccaaucaugauuccaacaagggggucaccgccgcuuguccucacgcaggagccaaaggcuuuuauaagaaucugaucuggcucguggaaaaaggcaacucauacccaaaguuaaguaaaagcuauauaaaugacaaggggaaggagguacugguucuuuggggaauccaucaccccucuacgacugcugaucaacagcgauuguaccagaacgccgacaccuacguguucgucgguacaucccguuauucaaagaaguuuaaaccugagauugcgaucagaccaaaggugagggaucaggaaggccggaugaauuacuauuggacucugguggagcccggggacaaaauuaccuucgaagcaacaggaaaccuagucguuccucgcuacgccuuugcuauggagagaaacgccggcagcgguaucauaauuagugauaccccagugcacgacugcaauacgacuugucaaacaccgaagggggcaaucaacaccucucuccccuuccagaauauucauccuaucacuaucggaaaaugcccaaaguauguaaaguccacaaaacugaggcuugcuaccggccugcggaacgugcccagcauucagucgcgcggcuuguuuggggccauagcgggauucaucgaagguggcuggacggggauggucgacggaugguacggcuaucaccaucagaaugagcaagguucuggguacgccgcagaucucaaguccacccagaacgcuauugacaaaaucacaaauaaggugaacucaguuauagagaaaaugaauacucaguuuaccgccgugggcaaggaguucaaccaccuggagaagcgaauugaaaauuuaaacaaaaaggucgaugacggauuccuggauaucuggacauacaaugcugagcuccuugugcuguuggaaaacgagagaacucuagacuaucacgauaguaauguuaaaaaccuguacgagaagguaaggaaccagcucaaaaauaacgccaaggaaaucggcaauggguguuuugaguucuaucauaagugcgacaacaccuguauggaaagcgugaaaaauggaacauacgauuauccuaaguacuccgaggaagcaaaacugaaccgggaggagauugacggugucaaacuugaaucuacccguaucuaucaaauucuggccauauacagcacuguggcuucaaguuugguccucgugguuucccugggcgcgaucagcuuuuggaugugcucuaaugggucauuacagugccgcauuuguaucuga

SEQ ID NO: 138041 - RNA, 1701 nt, Artificial Sequence
  derived and/or modified CDS sequence (opt3) from hemagglutinin__InfluenzaA__AGL09731
augaagaccaucauugcccugagcuacauacucugccuuguguucgcucagaaaauccccggcaacgacaauuccacagcaacucuguguuuggggcaccaugccgucccuaacggaacgauuguuaagaccaucacaaaugauagaauugaggugacuaacgcgaccgaauuaguacaaaauucuucaaucggugagauaugcgacaguccacaccagauccuggauggcgaaaacuguacacuaauugacgcucuccugggggauccgcagugcgacggauuucagaauaaaaagugggaucuuuucguggagaggagcaaagccuauuccaacuguuaccccuaugacgucccugauuacgcaucucugcggucguugguggccucaagcggcacccucgaauuuaauaacgagaguuucaauuggacugguguuacacaaaacgggaccuccucugcuugcauccgccgaagcaauuccucauuuuucagucgucugaacuggcugacgcaucucaauuuuaaguauccagcauuaaacgugacuaugcccaacaaugagcaguucgacaagcuguacauuuggggaguccaccauccuggcaccgauaaagaccagaucuuucuuuaugcccagagcucuggcagaauaacaguguccacuaagaggucacaacaggcuguaauuccaaacaucgggagccggccccgcauuagaaauaucccuaguaggaucucuauuuacuggaccauaguuaaaccaggagauaucuugcugauuaacuccacagguaaucuaaucgccccgcggggcuacuucaagauacgcagcgggaaaucgucuauuaugcgauccgacgcgcccaucggaaaguguaagucagaaugcaucaccccuaacggcaguauuccaaaugacaaacccuuucagaacgugaauagaaucacguauggugcauguccuagguacgucaagcagagcacucucaaacuggccacagggaugcggaacgugccagagaagcaaacccguggaauuuucggcgcuauagccggcuuuaucgaaaaugggugggagggaaugguggaugguugguauggcuuccgccaccagaacuccgaggggagaggacaggcagcugaccuuaaaucuacucaagccgcgauugaucagaucaauggcaagcugaacagguugaucgguaaaacaaaugaaaaguuccaccagauugagaaggaauuuagcgaggucgaagggcggauacaggaccucgagaaauacguugaggauaccaagaucgaccuguggucauauaacgccgaauuacugguggcacucgagaaccaacauacgauugaucuuaccgacagugaaaugaauaaacuguucgagaagacuaaaaagcaguugcgagaaaacgcugaggauaugggcaauggaugcuuuaagaucuaccacaaaugugacaacgccugcauuggcuccauccgcaaugggacauaugaucaugacguauacagagacgaggcucuaaacaauagguuccagauaaagggaguggaacugaaaagcgguuacaaggauuggauccucuggauuucuuuugccaucucaugcuuccugcuuugugucgcacuguugggcuuuauuaugugggccugccagaaagggaacauccgguguaauauaugcauuuga

SEQ ID NO: 138042 - RNA, 1701 nt, Artificial Sequence
  derived and/or modified CDS sequence (opt3) from hemagglutinin__InfluenzaA__AGL09732
augaagaccaucauugcccugagcuacauacucugccuuguguucgcucagaaacugcccggcaacgacaauuccacagcaacuuuguguuuagggcaccaugccgucccuaacggaacgaucguuaagaccauuacaaaugauagaaucgaggugacuaacgcgaccgaacugguacaaaauucuucaauuggugagaucugcgacaguccacaccagauacuagauggcgaaaacuguacacucaucgacgcucugcuuggggauccgcagugcgacggauuucagaauaaaaagugggaucuguucguggagaggagcaaagccuauuccaacuguuaccccuaugacgucccugauuacgcaucuuugcggucgcucguggccucaagcggcacccuggaauuuaauaacgagaguuucaauugggcugguguuacucaaaacgggacauccucugcaugcauucgcggaagcaauuccucauuuuucagucgacugaacuggcucacccauuuaaauuuuaaguauccagcccugaacgugacgaugcccaacaaugagcaguucgacaaguuguacaucuggggcguccaccauccuggcacugauaaagaccagauuuuucuuuaugcucagagcucugggcguaucaccguguccacaaagagaucacaacaggccguaauaccaaacauuggaagcaggccccggauccgcaauauuccuaguagaaucucuaucuacuggacuauuguuaaaccaggugauauacugcuaaucaacuccaccggcaaucucauugcgccgaggggguacuucaagauccggagcggaaaaucgucuauaaugcgcuccgacgcacccauuggcaaguguaagucagaaugcaucacaccuaacgguaguaucccaaaugacaaacccuuucagaacgugaaucgaauuaccuauggggccuguccuagauacgucaagcagagcacgcugaaacuugcuacuggaaugaggaacgugccagagaagcaaacacggggcaucuucggcgccauugcaggguuuauagaaaauggaugggaggguaugguggauggcugguauggguuccgucaccagaacuccgagggacgcggccaggcugccgaccugaaaucuacccaagcggccaucgaucagauuaaugguaaguugaacagacucaucgggaaaacuaaugaaaaguuccaccagaucgagaaggaauuuagcgaggucgaaggcaggauucaggaccuggagaaauacguugaggauacaaagauagacuuauggucauauaacgcagaacugcucguggcucuugagaaccaacauaccaucgaucugacggacagugaaaugaauaaauuguucgagaagaccaaaaagcagcuacgggaaaacgccgaggauaugggaaauggcugcuuuaagauuuaccacaaaugugacaacgcuugcaucggguccauucgaaauggaacauaugaucaugacguauaccgcgacgaggcccugaacaauagauuccagaucaaggguguggaacucaaaagcggcuacaaggauuggauacuguggaucucuuuugcaauuucaugcuuccuucugugugucgccuugcucggguuuaucaugugggcuugccagaaaggaaacauuagguguaauaucugcauauga

SEQ ID NO: 138043 - RNA, 1701 nt, Artificial Sequence
  derived and/or modified CDS sequence (opt3) from hemagglutinin__InfluenzaA__AGL09734
augaagaccaucauugcccugagcuacauacucugccuuguguucgcucagaaauuucccggcaacgacaauuccacagcaacucuguguuuggggcaccaugccgucccuaacggaacgaucguuaagaccauuacaaaugauagaaucgaggugacuaacgcgaccgaauuaguacaaaauucuucaauuggugagaucugcgacaguccacaccagauacuggauggcgaaaacuguacacuaaucgacgcucuccugggggauccgcagugcgacggauuccagaauaaaaagugggaucuuuuuauugagaggagcaaagccuauuccaacuguuaccccuaugacgugccugauuacgcaucucugcggucguuggucgccucaagcggcacccucgaguucaauaacgaaaguuuuaauuggacuggugugacacaaaacgggaccuccucugcuugcauccgccgaagcaauuccucauucuuuagucgucugaacuggcugacgcaucucaauuucaaguauccagcauuaaacguuacuaugcccaacaaugagcaguuugacaagcuguacauuuggggagugcaccauccuggcaccgauaaagaccagaucuuccuuuaugcccagagcucuggcagaauaacagucuccacuaagaggucacaacaggcugugauuccaaacaucgggagccggccccgcauuagaaauaucccuaguaggaucucuauuuacuggaccauaguaaaaccaggagauaucuugcugauuaacuccacagguaaucuaaucgccccgcggggcuacuuuaagauacgcagcgggaaaucgucuauuaugcgauccgacgcgcccaucggaaaguguaagucagaaugcaucaccccuaacggcaguauuccaaaugacaaacccuuccagaacguuaauagaaucacguauggugcauguccuagguacgugaagcagagcacucucaaacuggccacagggaugcggaacgucccagagaagcaaacccguggaauuuuuggcgcuauagccggcuucaucgaaaaugggugggagggaaugguggaugguugguauggcuuccgccaccagaacuccgaggggagaggacaggcagcugaccuuaaaucuacucaagccgcgauugaucagaucaauggcaagcugaacagguugaucgguaaaacaaaugaaaaguuucaccagauugagaaggaguucagcgaaguggaagggcggauacaggaccucgagaaauacgucgaggauaccaagaucgaccuguggucauauaacgccgaauuacugguugcacucgagaaccaacauacgauugaucuuaccgacagugaaaugaauaaacuguuugagaagacuaaaaagcaguugcgagaaaacgcugaggauaugggcaauggaugcuucaagaucuaccacaaaugugacaacgccugcauuggcuccauccgcaaugggacauaugaucaugacguguacagagacgaggcucuaaacaauagguuucagauaaagggaguagaacugaaaagcgguuacaaggauuggauccucuggauuucuuucgccaucucaugcuuucugcuuuguguggcacuguugggcuucauuaugugggccugccagaaagggaacauccgguguaauauaugcauuuga

SEQ ID NO: 138044 - RNA, 1701 nt, Artificial Sequence
  derived and/or modified CDS sequence (opt3) from hemagglutinin__InfluenzaA__AGL09735
augaagaccaucauugcccugagcuacauacucugccuuguguucgcucagaaacugcccggcaacgacaauuccacagcaacuuuguguuuagggcaccaugccgucccuaacggaacgaucguuaagaccauuacaaaugauagaaucgaggugacuaacgcgaccgaacugguacaaaauucuucaauuggugagaucugcgacaguccacaccagauacuagauggcgaaaacuguacacucaucgacgcucugcuuggggauccgcagugcgacggauuucagaauaaaaagugggaucuguucguggagaggagcaaagccuauuccaacuguuaccccuaugacgucccugauuacgcaucuuugcggucgcucguggccucaagcggcacccuggaauuuaauaacgagaguuucaauugggcugguguuacucaaaacgggacauccucugcaugcauucgcggaagcaauuccucauuuuucagucgacugaacuggcucacccauuuaaauuuuaaguauccagcccugaacgugacgaugcccaacaaugagcaguucgacaaguuguacaucuggggcguccaccauccuggcacugauaaagaccagauuuuucuuuaugcucagagcucugggcguaucaccguguccacaaagagaucacaacaggccguaauaccaaacauuggaagcaggccccggauccgcaauauuccuaguagaaucucuaucuacuggacuauuguuaaaccaggugauauacugcuaaucaacuccaccggcaaucucauugcgccgaggggguacuucaagauccggagcggaaaaucgucuauaaugcgcuccgacgcacccauuggcaaguguaagucagaaugcaucacaccuaacgguaguaucccaaaugacaaacccuuucagaacgugaaucgaauuaccuauggggccuguccuagauacgucaagcagagcacgcugaaacuugcuacuggaaugaggaacgugccagagaagcaaacacggggcaucuucggcgccauugcaggguuuauagaaaauggaugggaggguaugguggauggcugguauggguuccgucaccagaacuccgagggacgcggccaggcugccgaccugaaaucuacccaagcggccaucgaucagauuaaugguaaguugaacagacucaucgggaaaacuaaugaaaaguuccaccagaucgagaaggaauuuagcgaggucgaaggcaggauucaggaccuggagaaauacguugaggauacaaagauagacuuauggucauauaacgcagaacugcucguggcucuugagaaccaacauaccaucgaucugacggacagugaaaugaauaaauuguucgagaagaccaaaaagcagcuacgggaaaacgccgaggauaugggaaauggcugcuuuaagauuuaccacaaaugugacaacgcuugcaucggguccauucgaaauggaacauaugaucaugacguauaccgcgacgaggcccugaacaauagauuccagaucaaggguguggaacucaaaagcggcuacaaggauuggauacuguggaucucuuuugcaauuucaugcuuccuucugugugucgccuugcucggguuuaucaugugggcuugccagaaaggaaacauuagguguaauaucaguauauga

SEQ ID NO: 138045 - RNA, 1701 nt, Artificial Sequence
  derived and/or modified CDS sequence (opt3) from hemagglutinin__InfluenzaA__AGL09736
augaagaccaucauugcccugagcuacauacucugccuuguguucgcucagaaacugcccggcaacgacaauuccacagcaacuuuguguuuagggcaccaugccgucccuaacggaacgaucguuaagaccauuacaaaugaucaaaucgaggugacuaacgcgaccgaacugguacaaaauucuucaauuggugagaucugcgacaguccacaccagauacuagauggcgaaaacuguacacucaucgacgcucugcuuggggauccgcagugcgacggauuucagaauaaaaagugggaucuguucguggagagaagcaaagccuauuccaacuguuaccccuaugacgucccugauuacgcaucuuugaggucgcucguggccucaagcggcacccuggaauuuaauaacgagaguuucaauugggcugguguuacucagaacgggacauccucugcaugcauucggggaagcaauuccucauuuuucagucgccugaacuggcucacccauuuaaauuuuaaguauccagcccugaacgugacgaugcccaacaaugagcaguucgacaaguuguacaucuggggcguccaccauccuggcacugauaaagaccagauuuuucuuuaugcucaaagcucugggcgaaucaccguguccacaaagcguucacagcaggccguaauaccaaacauuggaagcagacccaggauccggaauauuccuagucgcaucucuaucuacuggacuauuguuaaaccaggugauauacugcuaaucaacuccaccggcaaucucauugcgccgagaggguacuucaagaucaggagcggaaaaucgucuauaaugcgguccgacgcacccauuggcaaguguaagucagaaugcaucacaccuaacgguaguaucccaaaugacaaacccuuucagaacgugaaucgcauuaccuauggggccuguccucgauacgucaagcaaagcacgcugaaacuugcuacuggaaugagaaacgugccagagaagcagacaaggggcaucuucggcgccauugcaggguuuauagaaaauggaugggaggguaugguggauggcugguauggguuccggcaccagaacuccgagggacguggccaagcugccgaccugaaaucuacccaggcggccaucgaucagauuaaugguaaguugaaccgccucaucgggaaaacuaaugaaaaguuccaccagaucgagaaggaauuuagcgaggucgaaggcaggauucaagaccuggagaaauacguugaggauacaaagauagacuuauggucauauaacgcagaacugcucguggcucuugagaaccagcauaccaucgaucugacggacagugaaaugaauaaauuguucgagaagaccaaaaagcagcuaagagaaaacgccgaggauaugggaaauggcugcuuuaagauuuaccacaaaugugacaacgcuugcaucggguccauucggaauggaacauaugaucaugacguauaccgagacgaggcccugaacaaucgcuuccagaucaaggguguggaacucaaaagcggcuacaaggauuggauacuguggaucucuuuugcaauuucaugcuuccuucugugugucgccuugcucggguuuaucaugugggcuugccaaaaaggaaacauuagauguaauaucugcauauga

SEQ ID NO: 138046 - RNA, 1701 nt, Artificial Sequence; identical to SEQ ID NO: 137931
  derived and/or modified CDS sequence (opt3) from hemagglutinin__InfluenzaA__AGL09737

SEQ ID NO: 138047 - RNA, 1701 nt, Artificial Sequence
  derived and/or modified CDS sequence (opt3) from hemagglutinin__InfluenzaA__AGL09739
augaagaccaucauugcccugagcuacauacucugccuuguguucgcucagaaacugcccggcaacgacaauuccacagcaacuuuguguuuagggcaccaugccgucccuaacggaacgaucguuaagaccauuacaaaugauagaaucgaggugacuaacgcgaccgaacugguacaaaauucuucaauuggugagaucugcgacaguccacaccagauacuagauggcgaaaacuguacacucaucgacgcucugcuuggggauccgcagugcgacggauuucagaauaaaaagugggaucuguucguggagaggagcaaagccuauuccucuuguuaccccuaugacgucccugauuacgcaucguugcggucacucguggccagcaguggcacccuggaauuuaacaaugaguccuucaacuggacugguguuacacaaaaugggaccucuagcgcuugcauucgccgauccaacucaaguuucuuuagccgucugaauuggcucacgcauuuaaacuuuaaguauccagcacugaaugugacuaugcccaacaacgagcaguucgacaaacuuuacaucuggggaguccaccauccuggcaccgauaaagaccagaucuuuuuguaugcccagucuuccggcagaauuacagugucaacuaagaggagccaacaggcuguaauaccaaauauugggagucggccccgcaucagaaacauuccuucuaggaucuccaucuacuggaccauuguuaaaccaggagauauacugcuaaucaauagcacagguaaccucauugccccgcggggcuacuucaagauccgcucggggaaaucuuccauaaugcgaucagacgcgcccauuggaaaguguaagagugaaugcaucaccccuaauggcagcaucccaaacgacaaacccuuucagaaugugaacagaauuacguauggugcauguccuagguacgucaagcaguccacucugaaacuugccacagggaugcggaaugugccagagaagcaaacccguggaaucuucggcgcuauugccggcuuuauagaaaacgggugggagggaaugguggaugguugguauggcuuccgccaccaaaauucugaggggagaggacaggcagcugaccugaaaagcacucaggccgcgaucgaucagauuaacggcaaguugaauaggcucaucgguaaaacaaacgaaaaguuccaccagaucgagaaggaauuuucagaggucgaagggcggauucaggaccuggagaaauacguugaggauaccaagauagacuuauggaguuauaaugccgaacugcucguggcacuugagaaccaacauacgaucgaucugaccgacuccgaaaugaacaaauuguucgagaagacaaagaagcagcuacgagaaaaugcugaggauaugggcaacggaugcuuuaagauuuaccacaaaugugacaaugccugcaucggcagcauucgcaacgggacuuaugaucauaauguauacagagacgaggcucugaacaauagguuccagaucaagggaguggaacucaaaucugguuacaaggacuggauacuguggaucucauuugccauuaguugcuuccuucugugugucgcauugcucggcuuuaucaugugggccugccagaaagggaacauucgguguaauaucugcauauga

SEQ ID NO: 138048 - RNA, 1701 nt, Artificial Sequence; identical to SEQ ID NO: 137883
  derived and/or modified CDS sequence (opt3) from hemagglutinin__InfluenzaA__AGL09740

SEQ ID NO: 138049 - RNA, 1701 nt, Artificial Sequence; identical to SEQ ID NO: 137122
  derived and/or modified CDS sequence (opt3) from hemagglutinin__InfluenzaA__AGL09741

SEQ ID NO: 138050 - RNA, 1701 nt, Artificial Sequence
  derived and/or modified CDS sequence (opt3) from hemagglutinin__InfluenzaA__AGL09742
augaagaccaucauugcccugagcuacauacucugccuuguguucgcucaggagcugcccggcaacgacgauuccacagcaacuuuguguuuagggcaccaugccgucccuaauggaacgaucguuaaaaccauuacaaacgaccaaaucgaagugacuaaugcgaccgagcugguacagucuucaaguacaggugaaauuugcaacagcccacaccagauccuagauggcgagaauuguacccucauagacgcucugcuuggggauccgcagugcgacggauuucaaaacaagaaaugggaucuguucguggaaagauccaaggcccauucuaauuguuaucccuacgacgucccugauuaugcaucguugaggucacucguggccagcaguggcacucuggaguuuaacaaugaguccuucaacuggacagguguuacccagaaugggacgucuagcgcuugcauccggcgcuccaacaauucauuuuucagucgacugaacuggcucacucacuuaaauuuuaaauacccagcacugaacgugaccaugcccaacaaugaacaguucgacaagcuguauauuuggggaguccaucacccuggcacagauaaggaccagaucuuuuuguacgcccaagcuagcggccguauuacugugucuaccaaaagaucccagcaggccguaaucccaaacauagggucaaggccccggguucgcaauauuccuagcagagugaguaucuauuggacaauugucaagccaggagauauccugcuaaucaacucuaccgguaaucucauugcgccgaggggcuacuucaaaauacgguccggaaagagcucgaucaugcgcucugacgcacccauugggaaauguaacuccgccugcaucacgccuaauggcucaauaccaaacgacaagcccuuucagaaugugaaccgaauuacuuacggugcuuguccuagauaugugaagcaaaauacacugaaacuugccaccgggaugaggaacgucccagagacucagacacggggaaucuucggcgcaaucgcuggcuuuauugaaaaugggugggagggaaugguugaugguugguacggcuuccgucaccagaacagugaggggcgcggacaagccgcggaccuuaagagcacccaggccgcaaucgaucagauuaauggcaaauugaacagacucauagguaagacgaacgaaaaauuccaucagaucgagaaggaauuuuccgagguggaagggaggauucaagaccuggagaaauauguagaggauaccaagaucgacuuauggucuuacaaugcugaacugcucguggcccuugagaaccagcacacaaucgaucugacugacagcgaaaugaauaaguuguucgagaaaaccaagaaacagcuacgggaaaacgcugaggauaugggcaauggaugcuuuaagauuuaucauaaaugugacaacgccugcauaggcucaauccgaaaugggacauacgaucacgacgucuaucgcgacgaggcacugaacaauagauuccagauuaagggaguggaacucaggagugguuacaaggauuggauccuguggauuuccuuugccaucagcugcuuccuucuguguguugcuuugcucggcuuuauaaugugggcgugccaaaaagggaacauccgguguucuauuugcaucuga

SEQ ID NO: 138051 - RNA, 1701 nt, Artificial Sequence; identical to SEQ ID NO: 137906
  derived and/or modified CDS sequence (opt3) from hemagglutinin__InfluenzaA__AGL09744

SEQ ID NO: 138052 - RNA, 1701 nt, Artificial Sequence
  derived and/or modified CDS sequence (opt3) from hemagglutinin__InfluenzaA__AGL09745
augaagaccaucauugcccugagcuacauacucugccuuguguucgcucagaaacugcccggcaacgacaauuccacagcaacuuuguguuuagggcaccaugccgucccuaacggaacgaucguuaagaccauuacaaaugauagaaucgaggugacuaacgcgaccgaacugguacaaaauucuucaauuggugagaucugcgacaguccacaccagauacuagauggcgaaaacuguacacucaucgacgcucugcuuggggauccgcagugcgacggauuucagaauaaaaagugggaucuguucguggagaggagcaaagccuauuccaacuguuaccccuaugacgucccugauuacgcaucuuugcggucgcucguggccucaagcggcacccuggaauuuaauaacgagaguuucaauuggacugguguuacacaaaacgggaccuccucugcuugcauucgccgaagcaauuccucauuuuucagucgucugaacuggcucacgcauuuaaauuuuaaguauccagcacugaacgugacuaugcccaacaaugagcaguucgacaaacuuuacaucuggggaguccaccauccuggcaccgauaaagaccagaucuuuuuguaugcccagagcucuggcagaauuacaguguccacuaagaggucacaacaggcuguaauaccaaacauugggagccggccccgcaucagaaauauuccuaguaggaucucuaucuacuggaccauuguuaaaccaggagauauacugcuaaucaacuccacagguaaucucauugccccgcggggcuacuucaagauccgcagcgggaaaucgucuauaaugcgauccgacgcgcccauuggaaaguguaagucagaaugcaucaccccuaacggcaguaucccaaaugacaaacccuuucagaacgugaauagaauuacguauggugcauguccuagguacgucaagcagagcacucugaaacuugccacagggaugcggaacgugccagagaagcaaacccguggaaucuucggcgcuauugccggcuuuauagaaaaugggugggagggaaugguggaugguugguauggcuuccgccaccagaacuccgaggggagaggacaggcagcugaccugaaaucuacucaagccgcgaucgaucagauuaauggcaaguugaacaggcucaucgguaaaacaaaugaaaaguuccaccagaucgagaaggaauuuagcgaggucgaagggcggauucaggaccuggagaaauacguugaggauaccaagauagacuuauggucauauaacgccgaacugcucguggcacuugagaaccaacauacgaucgaucugaccgacagugaaaugaauaaauuguucgagaagacaaagaagcagcuacgagaaaacgcugaggauguaggcaauggaugcuuuaagauuuaccacaaaugugacaacacuugcaucggcuccauucgcaaugggaccuaugaucauaacguguacagagacgaggcccugaauaacagguuccagaucaagggagucgaacucaaaagcgguuacaaggacuggauacuguggaucucuuuugcuauuucaugcuuccuucuguguguggccuugcucggcuuuaucaugugggcaugccagaaagggaauauucgguguaacaucugcauauga

SEQ ID NO: 138053 - RNA, 1701 nt, Artificial Sequence; identical to SEQ ID NO: 138045
  derived and/or modified CDS sequence (opt3) from hemagglutinin__InfluenzaA__AGL09746

SEQ ID NO: 138054 - RNA, 1701 nt, Artificial Sequence; identical to SEQ ID NO: 137883
  derived and/or modified CDS sequence (opt3) from hemagglutinin__InfluenzaA__AGL09747

SEQ ID NO: 138055 - RNA, 1701 nt, Artificial Sequence; identical to SEQ ID NO: 137906
  derived and/or modified CDS sequence (opt3) from hemagglutinin__InfluenzaA__AGL09748

SEQ ID NO: 138056 - RNA, 1701 nt, Artificial Sequence; identical to SEQ ID NO: 137904
  derived and/or modified CDS sequence (opt3) from hemagglutinin__InfluenzaA__AGL09749

SEQ ID NO: 138057 - RNA, 1701 nt, Artificial Sequence; identical to SEQ ID NO: 138042
  derived and/or modified CDS sequence (opt3) from hemagglutinin__InfluenzaA__AGL09750

SEQ ID NO: 138058 - RNA, 1701 nt, Artificial Sequence; identical to SEQ ID NO: 137883
  derived and/or modified CDS sequence (opt3) from hemagglutinin__InfluenzaA__AGL09751

SEQ ID NO: 138059 - RNA, 1701 nt, Artificial Sequence; identical to SEQ ID NO: 138042
  derived and/or modified CDS sequence (opt3) from hemagglutinin__InfluenzaA__AGL09753

SEQ ID NO: 138060 - RNA, 1701 nt, Artificial Sequence
  derived and/or modified CDS sequence (opt3) from hemagglutinin__InfluenzaA__AGL09754
augaagaccaucauugcccugagcuacauacucugccuuguguucgcucagaaacugcccggcaacgacaauuccacagcaacuuuguguuuagggcaccaugccgucccuaacggaacgaucguuaagaccauuacaaaugauagaaucgaggugacuaacgcgaccgaacugguacaaaauucuucaauuggugagaucugcgacaguccacaccagauacuagauggcgaaaacuguacacucaucgacgcucugcuuggggauccgcagugcgacggauuucagaauaaaaagugggaucuguucguggagaggagcaaagccuauuccaacuguuaccccuaugacgucccugauuacgcaucuuugcggucgcucguggccucaagcggcacccuggaauuuaauaacgagaguuucaauuggacugguguuacacaaaacgggaccuccucugcuugcauucgccgaagcaauuccucauuuuucagucgucugaacuggcucacgcauuuaaauuuuaaguauccagcacugaacgugacuaugcccaacaaugagcaguucgacaaacuuuacaucuggggaguccaccauccuggcaccgauaaagaccagaucuuuuuguaugcccagagcucuggcagaauuacaguguccacuaagaggucacaacaggcuguaauaccaaacauugggagccggccccgcaucagaaauauuccuaguaggaucucuaucuacuggaccauuguuaaaccaggagauauacugcuaaucaacuccacagguaaucucauugccccgcggggcuacuucaagauccgcagcgggaaaucgucuauaaugcgauccgacgcgcccauuggaaaguguaagucagaaugcaucaccccuaacggcaguaucccaaaugacaaacccuuucagaacgugaauagaauuacguauggugcauguccuagguacgucaagcagagcacucugaaacuugccacagggaugcggaacgugccagagaagcaaacccguggaaucuucggcgcuauugccggcuuuauagaaaaugggugggagggaaugguggaugguugguauggcuuccgccaccagaacuccgaggggagaggacaggcagcugaccugaaaucuacucaagccgcgaucgaucagauuaauggcaaguugaacaggcucaucgguaaaacaaaugaaaaguuccaccagaucgagaaggaauuuagcgaggucgaagggcggauucaggaccuggagaaauacguugaggauaccaagauagacuuauggucauauaacgccgaacugcucguggcacuugagaaccaacauacgaucgaucugaccgacagugaaaugaauaaauuguucgagaagacaaagaagcagcuacgagaaaacgcugaggauaugggcaauggaugcuuuaagauuuaccacaaaugugacaacgccugcaucggcuccauucgcaaugggacuuaugaucauaacguauacagagacgaggcucugaauaacagguuccagaucaagggaguggaacucaaaagcgguuacaaggacuggauacuguggaucucuuuugccauuucaugccuucuguugugugucgcacuccugggcuucaucaugugggccugccagaaagggaauauucgguguaacaucugcauauga

SEQ ID NO: 138061 - RNA, 1701 nt, Artificial Sequence; identical to SEQ ID NO: 138045
  derived and/or modified CDS sequence (opt3) from hemagglutinin__InfluenzaA__AGL09756

SEQ ID NO: 138062 - RNA, 1701 nt, Artificial Sequence
  derived and/or modified CDS sequence (opt3) from hemagglutinin__InfluenzaA__AGL09758
augaaggccauccuggugguccuccuuuacaccuucgcuacagcaaacgccgacacucugugcauuggcuaucacgcgaauaacagcacggauaccguugacacaguguuggagaaaaauguaacugugacccauuccgucaacuuacuggaagauaagcacaaugggaaaauauguaagcuaagaggaguggcuccccuccaucuggguaaaugcaacaucgccggcuggauucuugggaauccugagugugaaucucugucaacagcaaguagcugguccuacaucguugagaccucuucgucagacaacggaacuugcuauccaggcgauuuuauugacuacgaagaguugagggagcagcucagcaguguguccucuuucgaacgguuugagaucuucccgaagacaagcuccuggcccaaucacgauucaaacaagggugucaccgccgcuuguccucaugcaggggccaaaggauuuuauaagaaucugauauggcuggugaaaaagggcaacaguuacccaaaacucagcaauucuuauaucaacgacaagggcaaggaaguauuaguucugugggggauucaccaccccuccacgacugcugaucaacagucacuuuaccagaaugccgacaccuacguguucgucggaacaagccgcuauaguaaaaaguuuaaaccugagaucgcgauucgaccaaaggugcgugaucaggaggguagaaugaacuacuauuggacuuugguggaacccggcgacaaaaucaccuucgaggcaacagggaaccuggucguuccuagguacgccuuugcuauggaacggaaugccggaucuggcauaauuaucuccgauaccacggugcaugacugcaacacuacaugucaaaccccaaagggugcaauuaauacuagccuaccguuccagaacauccaccccaucacaauugggaaaugcccuaaguauguaaagucgaccaaacuccgccuggcuacgggacuuagaaaugugccaucuauacaguccaggggccuguuuggcgccaucgcgggguucauugagggagguuggaccggcauggucgacgggugguacggauaucaucaccagaacgaacaaggcucagguuacgccgcagauuugaagaguacacagaaugcuaucgacaaaauaacuaacaaggugaauagcguuauugagaaaaugaacacccaguuuacagccguggggaaggaguucaaucaccucgaaaagcggaucgagaaccugaauaaaaaggucgaugacggcuucuuagauaucuggacuuacaacgcugaacugcucgugcuucuggagaaugaacgcaccuuggacuaucaugauuccaacguuaaaaaccuauacgagaagguacgaaaucagcugaaaaacaaugccaaggagauuggaaacggcuguuuugaguucuaucacaagugcgacaauauguguauggaaucugugaaaaacgggacauacgauuaucccaaguacagcgaagaggcaaaacucaauagagaaaagaucgacggagucaaacuggagucaaccaggauuuaucaaauacuugccaucuacaguacuguggcuuccagccuggucuuggugguuucucucggugcgauuucauuuuggaugugcaguaacggcagccugcagugccggaucuguaucuga

SEQ ID NO: 138063 - RNA, 1701 nt, Artificial Sequence
  derived and/or modified CDS sequence (opt3) from hemagglutinin__InfluenzaA__AGL09760
augaagaccaucauugccgugagcuacauacugugccucgucuucgcucaggagcuucccggcaacgacgauuccacagcaacucuguguuuggggcaccaugccguuccuaauggaacgaucgugaaaaccauuacaaacgaccaaaucgaaguaacuaaugcgaccgaguuagugcagucuucaaguacaggugaaauuugcaacagcccacaccagauccuggauggcgagaauuguacccuaauagacgcucuccugggggauccgcagugcgacggauuucaaaacaagaaaugggaucuuuucgucgaaagauccaaggcccauucuaauuguuaucccuacgacgugccugauuaugcaucgcugaggucauugguugccagcaguggcacucucgaguuuaacaaugaguccuucaacuggacaggugugacccagaaugggacgucuagcgcuugcauccggcgcuccaacaauucauuuuucagucgacugaacuggcugacucaccucaauuuuaaauacccagcauuaaacgucaccaugcccaacaaugaacaguucgacaagcuguauauuuggggagugcaucacccuggcacagauaaggaccagaucuuucuuuacgcccaagcuagcggccguauuacuguaucuaccaaaagaucccagcaggccguuaucccaaacauagggucaaggccccgggugcgcaauauuccuagcagagucaguaucuauuggacaauugugaagccaggagauaucuugcugaucaacucuaccgguaaucuaauugcgccgaggggcuacuucaaaauacgguccggaaagagcucgaucaugcgcucugacgcacccauugggaaauguaacuccgccugcaucacgccuaauggcucaauaccaaacgacaagcccuuucagaaugugaaccgaauuacuuacggugcuuguccuagauaugucaagcaaaauacacucaaacuggccaccgggaugaggaacguuccagagaagcagacucggggaaucuucggcgcaaucgcuggcuuuauugaaaaugggugggagggaaugguggaugguugguacggcuuccgucaccagaacagugaggggcgcggacaagccgcggaccuuaaaagcacacaggccgcaaucgaucagauuaauggcaagcugaacagauugauagguaaaaccaacgaaaaguuccaucagaucgagaaagaauuuuccgagguagaagggaggauucaagaccucgagaaguauguggaggauacgaagaucgaccuguggucuuacaaugcugaauuacuggucgcccucgagaaccagcacaccaucgaucuuacagacagcgaaaugaauaaacuguucgagaagacuaaaaagcaguugcgggaaaacgcugaggauaugggcaauggaugcuuuaaaauuuaucauaagugugacaacgccugcauaggcucaauccgaaaugggaccuacgaucacgacguguaucgcgacgaggcacuaaacaauagauuccagauuaagggaguugaacugaaaagugguuacaaggauuggauccucuggauuuccuuugccaucagcugcuuccugcuuuguguggcucuguugggcuuuauaaugugggcgugccaaaaagggaacaucagguguaauauuugcaucuga

SEQ ID NO: 138064 - RNA, 1701 nt, Artificial Sequence; identical to SEQ ID NO: 137916
  derived and/or modified CDS sequence (opt3) from hemagglutinin__InfluenzaA__AGL09761

SEQ ID NO: 138065 - RNA, 1701 nt, Artificial Sequence
  derived and/or modified CDS sequence (opt3) from hemagglutinin__InfluenzaA__AGL09762
augaagaccaucauugcccugagcuacauacucugccuuguguucgcucagaaacugcccggcaacgacaauuccacagcaacuuuguguuuagggcaccaugccgucccuaacggaacgaucguuaagaccauuacaaaugaucaaaucgaggugacuaacgcgaccgaacugguacaaaauucuucaauuggugagaucugcgacaguccacaccagauacuagauggcgaaaacuguacacucaucgacgcucugcuuggggauccgcagugcgacggauuucagaauaaaaagugggaucuguucguggagagaagcaaagccuauuccaacuguuaccccuaugacgucccugauuacgcaucuuugaggucgcucguggccucaagcggcacccuggaauuuaauaacgagaguuucaauuggacugguguuacacagaacgggaccuccucugcuugcauucggggaagcaauuccucauuuuucagucgccugaacuggcucacgcauuuaaauuuuaaguauccagcacugaacgugacuaugcccaacaaugagcaguucgacaaacuuuacaucuggggcguccaccauccuggcaccgauaaagaccagaucuuuuuguaugcccaaagcucugggcgaauuacaguguccacuaagcguucacagcaggcuguaauaccaaacauuggaagcagacccaggauccggaauauuccuagucgcaucucuaucuacuggaccauuguuaaaccaggugauauacugcuaaucaacuccacaggcaaucucauugccccgagaggguacuucaagaucaggagcggaaaaucgucuauaaugcgguccgacgcgcccauuggcaaguguaagucagaaugcaucaccccuaacgguaguaucccaaaugacaaacccuuucagaacgugaaucgcauuacguauggggcauguccucgauacgucaagcaaagcacucugaaacuugccacaggaaugagaaacgugccagagaagcagaccaggggcaucuucggcgcuauugccggguuuauagaaaauggaugggaggguaugguggauggcugguauggguuccggcaccagaacuccgagggacguggccaagcagcugaccugaaaucuacucaggccgcgaucgaucagauuaaugguaaguugaaccgccucaucgggaaaacaaaugaaaaguuccaccagaucgagaaggaauuuagcgaggucgaaggcaggauucaagaccuggagaaauacguugaggauaccaagauagacuuauggucauauaacgccgaacugcucguggcacuugagaaccagcauacgaucgaucugaccgacagugaaaugaauaaauuguucgagaagacaaagaagcagcuaagagaaaacgcugaggauaugggaaauggcugcuuuaagauuuaccacaaaugugacaacgccugcaucggguccauucggaauggaacuuaugaucaugacguauaccgagacgaggcucugaacaaucgcuuccagaucaaggguguggaacucaaaagcggcuacaaggauuggauacuguggaucucuuuugccauuucaugcuuccuucugugugucgcauugcucggguuuaucaugugggccugccaaaaaggaaacauuagauguaauaucugcauauga

SEQ ID NO: 138066 - RNA, 1701 nt, Artificial Sequence; identical to SEQ ID NO: 138042
  derived and/or modified CDS sequence (opt3) from hemagglutinin__InfluenzaA__AGL09763

SEQ ID NO: 138067 - RNA, 1701 nt, Artificial Sequence
  derived and/or modified CDS sequence (opt3) from hemagglutinin__InfluenzaA__AGL09764
augaagaccaucauugcccugagcuacauacucugccuuguguucgcucagaaaauccccggcaacgacaauuccacagcaacucuguguuuggggcaccaugccgucccuaacggaacgauuguuaagaccaucacaaaugaucaaauugaggugacuaacgcgaccgaauuaguacaaaauucuucaaucggugagauaugcgacaguccacaccagauccuggauggcgaaaacuguacacuaauugacgcucuccugggggauccgcagugcgacggauuucagaauaaaaagugggaucuuuucguggagagaagcaaagccuauuccaacuguuaccccuaugacgucccugauuacgcaucucugaggucguugguggccucaagcggcacccucgaauuuaauaacgagaguuucaauuggacugguguuacacagaacgggaccuccucugcuugcauccggcgcagcaauuccucauuuuucagucgacugaacuggcugacgcaucucaauuuuaaguauccagcauuaaacgugacuaugcccaacaaugagcaguucgacaagcuguacauuuggggaguccaccauccuggcaccgauaaagaccagaucuuucuuuaugcccaaagcucuggccguauaacaguguccacuaagagaucacagcaggcuguaauuccaaacaucgggagcaggccccggauucgcaauaucccuaguagaaucucuauuuacuggaccauaguuaaaccaggagauaucuugcugauuaacuccacagguaaucuaaucgccccgaggggcuacuucaagauacggagcgggaaaucgucuauuaugcgcuccgacgcgcccaucggaaaguguaagucagaaugcaucaccccuaacggcaguauuccaaaugacaaacccuuucagaacgugaaucgaaucacguauggugcauguccuagauacgucaagcaaagcacucucaaacuggccacagggaugaggaacgugccagagaagcagacccggggaauuuucggcgcuauagccggcuuuaucgaaaaugggugggagggaaugguggaugguugguauggcuuccgucaccagaacuccgaggggcgcggacaagcagcugaccuuaaaucuacucaggccgcgauugaucagaucaauggcaagcugaacagauugaucgguaaaacaaaugaaaaguuccaccagauugagaaggaauuuagcgaggucgaagggaggauacaagaccucgagaaauacguugaggauaccaagaucgaccuguggucauauaacgccgaauuacugguggcacucgagaaccagcauacgauugaucuuaccgacagugaaaugaauaaacuguucgagaagacuaaaaagcaguugcgggaaaacgcugaggauaugggcaauggaugcuuuaagaucuaccacaaaugugacaacgccugcauuggcuccauccgaaaugggacauaugaucaugacguauaccgcgacgaggcucuaaacaauagauuccagauaaagggaguggaacugaaaagcgguuacaaggauuggauccucuggauuucuuuugccaucucaugcuuccugcuuugugucgcacuguugggcuuuauuaugugggccugccaaaaagggaacaucagguguaauauaugcauuuga

SEQ ID NO: 138068 - RNA, 1701 nt, Artificial Sequence; identical to SEQ ID NO: 137906
  derived and/or modified CDS sequence (opt3) from hemagglutinin__InfluenzaA__AGL09765

SEQ ID NO: 138069 - RNA, 1701 nt, Artificial Sequence
  derived and/or modified CDS sequence (opt3) from hemagglutinin__InfluenzaA__AGL09766
augaagaccaucauugcccugagcuacauacucugccuuguguucgcucagaaacugcccggcaacgacaauuccacagcaacuuuguguuuagggcaccaugccgucccuaacggaacgaucguuaagaccauuacaaaugaucaaaucgaggugacuaacgcgaccgaacugguacaaaauucuucaauuggugagaucugcgacaguccacaccagauacuagauggcgaaaacuguacacucaucgacgcucugcuuggggauccgcagugcgacggauuucagaauaaaaagugggaucuguucguggagagaagcaaagccuauuccaacuguuaccccuaugacgucccugauuacgcaucuuugaggucgcucguggccucaagcggcacccuggaauuuaauaacgagaguuucaauugggcugguguuacucagaacgggacauccucugcaugcauucggggaagcaauuccucauuuuucagucgccugaacuggcucacccauuuaaauuuuaaguauccagcccugaacgugacgaugcccaacaaugagcaguucgacaaguuguacaucuggggcguccaccauccuggcacugauaaagaccagauuuuucuuuaugcucaaagcucugggcgaaucaccguguccacaaagcguucacagcaggccguaauaccaaacauuggaagcagacccaggauccggaauauuccuagucgcaucucuaucuacuggacuauuguuaaaccaggugauauacugcuaaucaacuccaccggcaaucucauugcgccgagaggguacuucaagauccugagcggaaaaucgucuauaaugagguccgacgcacccauuggcaaguguaagucagaaugcaucacaccuaacgguaguaucccaaaugacaaacccuuucagaacgugaaucggauuaccuauggggccuguccucgcuacgucaagcaaagcacgcuuaaacuggcuacuggaaugcgaaacgugccagagaagcagacaagaggcaucuucggcgccauugcaggguuuauagaaaauggaugggaggguaugguggauggcugguauggguucaggcaccagaacuccgagggacggggccaagcugccgacuugaaaucuacccaggcggccaucgaucagauuaaugguaagcucaaccgucugaucgggaaaacuaaugaaaaguuccaccagaucgagaaggaauuuagcgaggucgaaggccgcauucaagacuuagagaaauacguugaggauacaaagauagaccuguggucauauaacgcagaacuccuuguggcucuggagaaccagcauaccaucgauuugacggacagugaaaugaauaaacuauucgagaagaccaaaaagcagcugagagaaaacgccgaggauaugggaaauggcugcuuuaagauuuaccacaaaugugacaacgcuugcaucggguccauuaggaauggaacauaugaucaugacguauaccgggacgaggcccucaacaaucgauuccagaucaaggguguggaacugaaaagcggcuacaaggauuggauacuuuggaucucuuuugcaauuucaugcuuccuguugugugucgcccuccugggguuuaucaugugggcuugccaaaaaggaaacauucgcuguaauaucugcauauga

SEQ ID NO: 138070 - RNA, 1701 nt, Artificial Sequence
  derived and/or modified CDS sequence (opt3) from hemagglutinin__InfluenzaA__AGL09767
augaagaccaucauugcccugagcuacauacucugccuuguguucgcucagaaacugcccggcaacgacaauuccacagcaacuuuguguuuagggcaccaugccgucccuaacggaacgaucguuaagaccauuacaaaugauagaaucgaggugacuaacgcgaccgaacugguacaaaauucuucaauuggugagaucugcgacaguccacaccagauacuagauggcgaaaacuguacacucaucgacgcucugcuuggggauccgcagugcgacggauuucagaauaaaaagugggaucuguucguggagaggagcaaagccuauuccaacuguuaccccuaugacgucccugauuacgcaucuuugcggucgcucguggccucaagcggcacccuggaauuuaauaacgagaguuucaauugggcugguguuacucaaaacgggacauccucugcaugcauucgcggaagcaauuccucauuuuucagucgacugaacuggcucacccauuuaaauuuuaaguauccagcccugaacgugacgaugcccaacaaugagcaguucgacaaguuguacaucuggggcguccaccauccuggcacugauaaagaccagauuuuucuuuaugcucagagcucugggcguaucaccguguccacaaagagaucacaacaggccguaauaccaaacauuggaagcaggccccggauccgcaauauuccuaguagaaucucuaucuacuggacuauuguuaaaccaggugauauacugcuaaucaacuccaccggcaaucucauugcgccgaggggguacuucaagauccggagcggaaaaucgucuauaaugcgcuccgacgcacccauuggcaaguguaagucagaaugcaucacaccuaacgguaguaucccaaaugacaaacccuuucagaacgugaaucgaauuaccuauggggccuguccuagauacgucaagcagagcacgcugaaacuugcuacuggaaugaggaacgugccagagaagcaaacacggggcaucuucggcgccauugcaggguuuauagaaaauggaugggaggguaugguggauggcugguauggguuccgucaccagaacuccgagggacgcggccaggcugccgaccugaaaucuacccaagcggccaucgaucagauuaaugguaaguugaacagacucaucgggaaaacuaaugaaaaguuccaccagaucgagaaggaauuuagcgaggucgaaggcaggauucaggaccuggagaaauacguugaggauacaaagauagacuuauggucauauaacgcagaacugcucguggcucuugagaaccaacauaccaucgaucugacggacagugaaaugaauaaauuguucgagaagaccaaaaagcagcuacgggaaaacgccgaggauaugggaaauggcugcuuuaagauuuaccacaaaugugacaacgcuugcaucggguccauucgaaauggaacauaugaucauaacguauaccgcgacgaggcccugaauaacagauuccagaucaaggguguggaacucaaaagcggcuacaaggacuggauacuguggaucucuuuugcaauuucaugcuuccuucugugugucgccuugcucggguuuaucaugugggcuugccagaaaggaaauauuagguguaacaucugcauauga

SEQ ID NO: 138071 - RNA, 1701 nt, Artificial Sequence
  derived and/or modified CDS sequence (opt3) from hemagglutinin__InfluenzaA__AGL09769
augaagaccaucauugcccugagcuacauacucugccuuguguucgcucagaaaauccccggcaacgacaauuccacagcaacucuguguuuggggcaccaugccgucccuaacggaacgauuguuaagaccaucacaaaugauagaauugaggugacuaacgcgaccgaauuaguacaaaauucuucaaucggugagauaugcgacaguccacaccagauccuggauggcgaaaacuguacacuaauugacgcucuccugggggauccgcagugcgacggauuucagaauaaaaagugggaucuuuucguggagaggagcaaagccuauuccaacuguuaccccuaugacgucccugauuacgcaucucugcggucguugguggccucaagcggcacccucgaauuuaauaacgagaguuucaauuggacugguguuacacaaaacgggaccuccucugcuugcauccgcggaagcaauuccucauuuuucagucgacugaacuggcugacgcaucucaauuuuaaguauccagcauuaaacgugacuaugcccaacaaugagcaguucgacaagcuguacauuuggggcguccaccauccuggcaccgauaaagaccagaucuuucuuuaugcccagagcucugggcguauaacaguguccacuaagagaucacaacaggcuguaauuccaaacaucggaagcaggccccggauucgcaauaucccuaguagaaucucuauuuacuggaccauaguuaaaccaggugauaucuugcugauuaacuccacaggcaaucuaaucgccccgaggggguacuucaagauacggagcggaaaaucgucuauuaugcgcuccgacgcgcccaucggcaaguguaagucagaaugcaucaccccuaacgguaguauuccaaaugacaaacccuuucagaacgugaaucgaaucacguauggggcauguccuagauacgucaagcagagcacucucaaacuggccacaggaaugaggaacgugccagagaagcaaacccggggcauuuucggcgcuauagccggguuuaucgaaaauggaugggaggguaugguggauggcugguauggguuccgucaccagaacuccgagggacgcggccaggcagcugaccuuaaaucuacucaagccgcgauugaucagaucaaugguaagcugaacagauugaucgggaaaacaaaugaaaaguuccaccagauugagaaggaauuuagcgaggucgaaggcaggauacaggaccucgagaaauacguugaggauaccaagaucgaccuguggucauauaacgccgaauuacugguggcacucgagaaccaacauacgauugaucuuaccgacagugaaaugaauaaacuguucgagaagacuaaaaagcaguugcgggaaaacgcugaggauaugggaaauggcugcuuuaagaucuaccacaaaugugacaacgccugcauuggguccauccgaaauggaacauaugaucaugacguauaccgcgacgaggcucuaaacaauagauuccagauaaaggguguggaacugaaaagcggcuacaaggauuggauccucuggauuucuuuugccaucucaugcuuccugcuuugugucgcacuguugggguuuauuaugugggccugccagaaaggaaacaucagguguaauauaugcauuuga

SEQ ID NO: 138072 - RNA, 1701 nt, Artificial Sequence; identical to SEQ ID NO: 137906
  derived and/or modified CDS sequence (opt3) from hemagglutinin__InfluenzaA__AGL09770

SEQ ID NO: 138073 - RNA, 1701 nt, Artificial Sequence
  derived and/or modified CDS sequence (opt3) from hemagglutinin__InfluenzaA__AGL09771
augaagaccaucauugcccugagcuacauacucugccuuguguucgcucagaaacugcccggcaacgacaauuccacagcaacuuuguguuuagggcaccaugccgucccuaacggaacgaucguuaagaccauuacaaaugauagaaucgaggugacuaacgcgaccgaacugguacaaaauucuucaauuggugagaucugcgacaguccacaccagauacuagauggcgaaaacuguacacucaucgacgcucugcuuggggauccgcagugcgacggauuucagaauaaaaagugggaucuguucguggagaggagcaaagccuauuccaacuguuaccccuaugacgucccugauuacgcaucuuugcggucgcucguggccucaagcggcacccuggaauuuaauaacgagaguuucaauugggcugguguuacucaaaacgggacauccucugcaugcauucgcggaagcaauuccucauuuuucagucgacugaacuggcucacccauuuaaauuuuaaguauccagcccugaacgugacgaugcccaacaaugagcaguucgacaaguuguacaucuggggcguccaccauccuggcacugauaaagaccagauuuuucuuuaugcucagagcucugggcguaucaccguguccacaaagagaucacaacaggccguaauaccaaacauuggaagcaggccccggauccgcaauauuccuaguagaaucucuaucuacuggacuauuguuaaaccaggugauauacugcuaaucaacuccaccggcaaucucauugcgccgaggggguacuucaagauccggagcggaaaaucgucuauaaugcgcuccgacgcacccauuggcaaguguaagucagaaugcaucacaccuaacgguaguaucccaaaugacaaacccuuucagaacgugaaucgaauuaccuauggggccuguccuagauacgucaagcagagcacgcugaaacuugcuacuggaaugaggaacgugccagagaagcaaacacggggcaucuucggcgccauugcaggguuuauagaaaauggaugggaggguaugguggauggcugguauggguuccgucaccagaacuccgagggacgcggccaggcugccgaccugaaaucuacccaagcggccaucgaucagauuaaugguaaguugaacagacucaucgggaaaacuaaugaaaaguuccaccagaucgagaaggaauuuagcgaggucgaaggcaggauucaggaccuggagaaauacguugaggauacaaagauagacuuauggucauauaacgcagaacugcucguggcucuugagaaccaacauaccaucgaucugacggacagugaaaugaauaaauuguucgagaagaccaaaaagcagcuacgggaaaacgccgaggauaugggaaauggcugcuuuaagauuuaccacaaaugugacaacgcuugcaucggguccauucgaaauggaacauaugaucaugacaucuaccgcgacgaggcccugaacaauagauuccagauaaaggguguagaacucaaaagcggcuacaaggauuggauccuguggauuucuuuugcaaucucaugcuuccuucuguguguggccuugcucggguuuauuaugugggcuugccagaaaggaaacaucagguguaauauaugcauuuga

SEQ ID NO: 138074 - RNA, 1701 nt, Artificial Sequence
  derived and/or modified CDS sequence (opt3) from hemagglutinin__InfluenzaA__AGL09772
augaagaccaucauugcccugagcuacauacucugccuuguguucgcucagaaacugcccggcaacgacaauuccacagcaacuuuguguuuagggcaccaugccgucccuaacggaacgaucguuaagaccauuacaaaugaucaaaucgaggugacuaacgcgaccgaacugguacagucuucaaguacaggugagauuugcaauagcccacaccagauccuagacggcgaaaacuguacccucauagaugcucugcuuggggacccgcagugcgauggauuucaaaauaaaaagugggaccuguucguggagagauccaaagcccauucuaacuguuaucccuacgaugucccugacuaugcaucguugaggucacucguggccagcaguggcacucuggaauuuaauaacgaguccuucaauuggacagguguuacccagaacgggacgucuagcgcuugcauccggcgcuccaauaacucauuuuucagucgacugaauuggcucacucacuuaaacuuuaaguacccagcacugaacgugaccaugcccaauaacgagcaguucgauaaacuuuauauuuggggaguccaucacccuggcacagacaaagaucagaucuuuuuguacgcccaagcugccggccguauuacugugagcaccaagagaucucagcaggcgguaaucccaaauauaggguccaggccccggguucgcaacauuccuucaagagugagcaucuauuggacaauugucaaaccaggagacauccugcuaaucaauaguaccgguaaccucauugcaccgaggggcuacuucaagauacggucugggaaauccagcaucaugcgcucggaugcccccauuggaaaguguaauucugcuugcaucacgccuaacggcuccauaccaaaugacaagcccuuucagaacgugaaucgaauuacuuacggugccuguccuagauaugugaaacaaaacacacugaaacuugcaaccgggaugaggaaugucccagaaaagcagacucggggaaucuucggcgcuaucgccggcuuuauugagaacgggugggaaggaaugguugacgguugguacggcuuccgucaccaaaauucagaggggcgcggacaggcggccgaucugaagaguacacaggcagcuaucgaccagauuaacggcaaauugaacagacucauagguaagaccaaugagaaauuccaucagaucgaaaaggaguuuagcgaaguggaggggaggauucaagaucuggaaaaguauguagaggacacgaaaaucgauuuaugguccuacaacgccgagcugcucguggcucuugaaaaucagcacaccaucgaccugacagauucugagaugaacaaguuguucgaaaagacuaagaaacagcuacgggagaaugccgaagacaugggcaacggaugcuuuaagauuuaucauaagugugauaaugcaugcauaggcagcauccgaaacgggaccuacgaccacuaugucuaccgcgaugaggcccugaauaacagauuccagauuaaaggaguggagcucaagucagguuacaaagacuggauccuguggauuaguuuugcuacauccugcuuccuucuguguguugcguugcucggcuuuaucaugugggcaugccaaaaggggaauauaagguguaacaucugcauuuga

SEQ ID NO: 138075 - RNA, 1701 nt, Artificial Sequence
  derived and/or modified CDS sequence (opt3) from hemagglutinin__InfluenzaA__AGL09773
augaagaccaucauugcccugagcuacauacucugccuuguguucgcucagaaacugcccggcaacgacaauuccacagcaacuuuguguuuagggcaccaugccgucccuaacggaacgaucguuaagaccauuacaaaugaucaaaucgaggugacuaacgcgaccgaacugguacagucuucaaguacaggugagauuugcaauagcccacaccagauccuagacggcgaaaacuguacccucauagaugcucugcuuggggacccgcagugcgauggauuucaaaauaaaaagugggaccuguucguggagagauccaaagcccauucuaacuguuaucccuacgaugucccugacuaugcaucguugaggucacucguggccagcaguggcacucuggaauuuaauaacgaguccuucaauuggacagagguuacccagaacgguacgucuagcgcuugcauccggcgcuccaauaacucauuuuucagucgacugaauuggcucacucacuuaaacuuuaaguacccagcacugaacgugaccaugcccaauaacgaacaguucgauaaacuuuauauuuggggaguccaucacccugggacagacaaggaucagaucuuuuuguacgcccaagcugccggccguauuacugugagcaccaagagaucucagcaggcgguaaucccaaauauaggcuccaggccccggguucgcaacauuccuucaagagugagcaucuauuggacaauugucaaaccaggggacauccugcuaaucaauaguaccggaaaccucauugcaccgagggguuacuucaagauacggucuggcaaauccagcaucaugcgcucggaugcccccauugggaaguguaauucugcuugcaucacgccuaacggauccauaccaaaugacaagcccuuucagaacgugaaucgaauuacuuacggcgccuguccuagauaugugaaacaaaacacacugaaacuugcaaccgguaugaggaaugucccagagaagcagacucgggggaucuucggagcuaucgccggcuuuauugaaaacggcugggaggggaugguugacggaugguacgguuuccgucaccaaaauucagagggccgcgggcaggcggccgaucugaagaguacacaggcagcuaucgaccagauuaacggaaaauugaacagacucauaggcaagaccaaugaaaaauuccaucagaucgagaaggaauuuagcgagguggaagguaggauucaagaucuggagaaguauguagaggacacgaaaaucgauuuaugguccuacaacgccgaacugcucguggcucuugagaaucagcacaccaucgaccugacagauucugaaaugaacaaguuguucgagaaaacuaagaaacagcuacgggaaaaugccgaggacauggggaacggcugcuuuaagauuuaucauaagugugauaaugcaugcauaggaagcauccgaaacggcaccuacgaccacuaugucuaccgcgaugaggcccugaauaacagauuccagauuaaagggguggaacucaagucaggauacaaagacuggauccuguggauuaguuuugcuacauccugcuuccuucuguguguugcguugcucgguuuuaucaugugggcaugccaaaagggcaauauaagguguaacaucugcauuuga

SEQ ID NO: 138076 - RNA, 1701 nt, Artificial Sequence; identical to SEQ ID NO: 138074
  derived and/or modified CDS sequence (opt3) from hemagglutinin__InfluenzaA__AGL09774

SEQ ID NO: 138077 - RNA, 1701 nt, Artificial Sequence; identical to SEQ ID NO: 137916
  derived and/or modified CDS sequence (opt3) from hemagglutinin__InfluenzaA__AGL09775

SEQ ID NO: 138078 - RNA, 1701 nt, Artificial Sequence; identical to SEQ ID NO: 138074
  derived and/or modified CDS sequence (opt3) from hemagglutinin__InfluenzaA__AGL09776

SEQ ID NO: 138079 - RNA, 1701 nt, Artificial Sequence; identical to SEQ ID NO: 138074
  derived and/or modified CDS sequence (opt3) from hemagglutinin__InfluenzaA__AGL09777

SEQ ID NO: 138080 - RNA, 1701 nt, Artificial Sequence
  derived and/or modified CDS sequence (opt3) from hemagglutinin__InfluenzaA__AGL09778
augaagaccaucauugcccugagcuacauacucugccuuaucuucgcucagaaacugcccggcaacgacaauuccacagcaacuuuguguuuagggcaccaugccgugccuaacggaacgauugucaagaccaucacaaaugauagaauugagguuacuaacgcgaccgaacuggugcaaaauucuucaaucggugagauaugcgacaguccacaccagauccuagauggcgaaaacuguacacucauugacgcucugcuuggggauccgcagugcgacggauuucagaauaaaaagugggaucuguucguagagaggagcaaagccuauuccaacuguuaccccuaugacgugccugauuacgcaucuuugcggucgcucgucgccucaagcggcacccuggaauuuaauaacgagaguuucaauugggcuggugugacucaaaacgggacauccucugcaugcauccgcggaagcaauuccucauuuuucagucgacugaacuggcucacccauuuaaauuuuaaguauccagcccugaacguuacgaugcccaacaaugagcaguucgacaaacuuuacauuuggggcgugcaccauccuggcacugauaaggaccagaucuuuuuguaugcucagagcucugggcguauaaccgucuccacaaagagaucacaacaggccgugauuccaaacaucggaagcaggccccggauucgcaauaucccuaguagaaucucuauuuacuggacuauaguaaaaccaggugauauccugcuaauuaacuccaccggcaaucucaucgcgccgaggggguacuucaagauacggagcggaaaaucgucuauuaugcgcuccgacgcacccaucggcaaguguaagucagaaugcaucacaccuaacgguaguauuccaaaugacaaacccuuucagaacguuaaucgaaucaccuauggggccuguccuagauacgugaagcagagcacgcugaaacuugcuacuggaaugaggaacgucccagagaagcaaacacggggcauuuucggcgccauagcaggguuuaucgaaaauggaugggaggguaugauggauggcugguauggguuccgucaccagaacuccgagggacgcggccaggcugccgaccugaaaucuacccaagcggccauugaucagaucaaugguaaguugaacagacucaucgggaaaacuaaugaaaaguuccaccagauugagaaggaauuuagcgagguggaaggcaggauacaggaccuggagaaauacguggaggauacaaagaucgacuuauggucauauaacgcagaacugcucgucgcucuugagaaccaacauaccauugaucugacggacagugaaaugaauaaauuguucgagaagaccaaaaagcagcuacgggaaaacgccgaggauaugggaaauggcugcuuuaagaucuaccacaaaugugacaacgcuugcauuggguccauccgaaauggaacauaugaucaugacguuuaccgcgacgaggcccugaacaauagauuccagauaaaggguguggaacucaaaagcggcuacaaggauuggauccuguggauuucuuuugcaaucucaugcuuccuucuguguguagccuugcucggguuuauuaugugggcuugccagaaaggaaacaucagguguaauauaugcauuuga

SEQ ID NO: 138081 - RNA, 1701 nt, Artificial Sequence
  derived and/or modified CDS sequence (opt3) from hemagglutinin__InfluenzaA__AGL09779
augaagaccaucauugcccugagcuacauacucugccuuguguucgcucagaaacugcccggcaacaauaacuccacagcaacuuuguguuuagggcaccaugccgucccuaauggaacgaucguuaagaccauuacaaacgacagaaucgaggugacuaaugcgaccgaacugguacaaaacucuucaauuggugagaucugcgauaguccacaccagauacuagacggcgaaaauuguacacucaucgaugcucugcuuggggacccgcagugcgauggauuucagaacaaaaagugggaccuguucguggagaggagcaaagccuauuccaauuguuaccccuaugaugucccugacuacgcaucuuugcggucgcucguggccucaagcggcacccuggaauuuaacaaugagaguuucaacugggcugguguuacucaaaaugggacauccucugcaugcauucgcggaagcaacuccucauuuuucagucgacugaauuggcucacccauuuaaacuuuaaguauccagcccugaacgugacgaugcccaauaacgagcaguucgauaaguuguacaucuggggcguccaccauccuggcacugacaaagaucagauuuuucuuuaugcucagagcucugggcguaucaccguguccacaaagagaucacaacaggccguaauaccaaauauuggaagcaggccccggauccgcaacauuccuaguagaaucucuaucuacuggacuauuguuaaaccaggugacauacugcuaaucaauuccaccggcaaccucauugcgccgaggggguacuucaagauccggagcggaaaaucgucuauaaugcgcuccgaugcacccauuggcaaguguaagucagaaugcaucacaccuaaugguaguaucccaaacgacaaacccuuucagaaugugaaccgaauuaccuauggggccuguccuagauacgucaagcagagcacgcugaaacuugcuacuggaaugaggaaugugccagagaagcaaacacggggcaucuucggcgccauugcaggguuuauagaaaacggaugggaggguaugguggacggcugguauggguuccgucaccaaaauuccgagggacgcggccaggcugccgaucugaaaucuacccaggcggccaucgaccagauuaacgguaaguugaauagacucaucgggaaaacuaacgaaaaguuccaccagaucgagaaggaauuuagcgaggucgaaggcaggauucaggaucuggagaaauacguugaggacacaaagauagauuuauggucauauaacgcagaacugcucguggcucuugagaaucaacauaccaucgaccugacggauagugaaaugaacaaauuguucgagaagaccaaaaagcagcuacgggaaaaugccgaggacaugggaaacggcugcuuuaagauuuaccacaaaugugauaaugcuugcaucggguccauucgaaacggaacauaugaccaugauguauaccgcgacgaggcccugaauaacagauuccagaucaaggguguggaacucaaaagcggcuacaaggacuggauacuguggaucucuuuugcaauuucaugcuuccuucugugugucgccuugcucggguuuaucaugugggcuugccagaaaggaaauauuagguguaacaucugcauauga

SEQ ID NO: 138082 - RNA, 1701 nt, Artificial Sequence
  derived and/or modified CDS sequence (opt3) from hemagglutinin__InfluenzaA__AGL09780
augaagaccaucauugcccugagcuacauacucugccuuguguucgcucagaaacugcccggcaacgacaauuccacagcaacuuuguguuuagggcaccaugccgucccuaacggaacgaucguuaagaccauuacaaaugauagaaucgaggugacuaacgcgaccgaacugguacaaaauucuucaauuggugagaucugcgacaguccacaccagauacuagauggcgaaaacuguacacucaucgacgcucugcuuggggauccgcagugcgacggauuucagaauaaaaagugggaucuguucguggagaggagcaaagccuauuccaacuguuaccccuaugacgucccugauuacgcaucuuugcggucgcucguggccucaagcggcacccuggaauuugacaaugagaguuucaacugggcugguguuacucaaaaugggacauccucugcaugcauucgcggaagcaacuccucauuuuucagucgacugaauuggcucacccauuuaaacuuuaaguauccagcccugaaugugacgaugcccaacaacgagcaguucgauaaacuuuacaucuggggcguccaccauccuggcacugacaaggaucagauuagcuuguaugcucagucuuccgggcguaucaccgugucaacaaagagaagccaacaggccguaauaccaaauauuggaaguaggccccggauccgcaacauuccuucuagaaucuccaucuacuggacuauuguuaaaccaggugacauacugcuaaucaauagcaccggcaaccucauugcgccgaggggguacuuuaagauccggucgggaaaaucuuccauaaugcgcucagacgcacccauuggcaaguguaagagugaaugcaucacaccuaaugguagcaucccaaacgauaaacccuuccagaaugugaaccgaauuaccuauggggccuguccuagauacgucaagcaguccacgcugaaacuugcuacuggaaugaggaaugugccagagaagcaaacacggggcaucuuuggcgccauugcaggguucauagaaaacggaugggaggguaugguggacggcugguauggguuucgucaccaaaauucugagggacgcggccaggcugccgaucugaaaagcacccaggcggccaucgaccagauuaacgguaaguugaauagacucaucgggaaaacuaacgaaaaguuccaccagaucgagaaggaguucucagaagucgaaggcaggauucaggaucuggagaaauacguugaggacacaaagauagauuuauggaguuauaaugcagaacugcucguggcucuugagaaccaacauaccaucgaccugacggauuccgaaaugaacaaauuguuugagaagaccaaaaagcagcuacgggaaaaugccgaggacaugggaaacggcugcuucaagauuuaccacaaaugugauaaugcuugcaucgggagcauucgaaacggaacauaugaccaugacguauaccgcgaugaggcccugaauaacagauuucagaucaaggguguggaacucaaaucuggcuacaaggacuggauacuguggaucucauucgcaauuaguugcuuucuucugugugucgccuugcucggguucaucaugugggcuugccagaaaggaaauauuagguguaacaucugcauauga

SEQ ID NO: 138083 - RNA, 1701 nt, Artificial Sequence; identical to SEQ ID NO: 138041
  derived and/or modified CDS sequence (opt3) from hemagglutinin__InfluenzaA__AGL09781

SEQ ID NO: 138084 - RNA, 1701 nt, Artificial Sequence; identical to SEQ ID NO: 137906
  derived and/or modified CDS sequence (opt3) from hemagglutinin__InfluenzaA__AGL09782

SEQ ID NO: 138085 - RNA, 1701 nt, Artificial Sequence
  derived and/or modified CDS sequence (opt3) from hemagglutinin__InfluenzaA__AGL09783
augaagaccaucauugcccugagcuacauacucugccuuguguucgcucagaaacugcccggcaacgacaauuccacagcaacuuuguguuuagggcaccaugccgucccuaacggaacgguugugaagaccaucacaaaugauagaauugagguaacuaacgcgaccgaacuggugcaaaauucuucaaucggugagauuugcgacaguccacaccagauccuagauggcgaaaacuguacacucauagacgcucugcuuggggauccgcagugcgacggauuucagaauaaaaagugggaucuguucgucgagaggagcaaagccuauuccaacuguuaccccuaugacgugccugauuacgcaucuuugcggucgcucguugccucaagcggcacccuggaauuuaauaacgagaguuucaauuggacuggugugacacaaaacgggaccuccucugcuugcauccgccgaagcaauaacuccuuuuucucacgucugaauuggcucacgcauuuaaacuuuaaguauccagcacugaacgucacuaugcccaauaacgagcaguucgacaaacuuuacauuuggggagugcaccauccuggcaccgauaaggaccagaucuuuuuguaugcccagaguagcggcagaauuacaguaucuacuaagaggucccaacaggcuguuaucccaaauauagggucacggccccgcauuagaaacaucccuagcaggauuaguaucuacuggaccaucgugaaaccaggagauauucugcuaauaaauucuacagguaaccucaucgccccgcggggcuacuucaagauucgcuccgggaaaagcucgaucaugcgaucugacgcgcccauaggaaaguguaaguccgaaugcauuaccccuaauggcucaaucccaaacgacaaacccuuucagaaugucaacagaaucacguauggugcauguccuagguacgugaagcagaguacucugaaacuugccacagggaugcggaaugugccagagaagcaaacccguggaauuuucggcgcuaucgccggcuuuauugaaaacgggugggagggaauggucgaugguugguauggcuuccgccaccagaauagcgaggggagaggacaggcagcugaccugaaauccacucaagccgcgauagaucagaucaacggcaaguugaauaggcucauugguaaaacaaacgaaaaguuccaccagaucgagaaggaauuuucugagguugaagggcggacccagaaccuggagaaauacguggaggacacgaagaucgauuuauggagcuauaaugccgaacugcucguagcacuugagaaccaacauaccauugaccugacagauucagaaaugaauaaauuguucgagaagacuaaaaagcagcuacgagaaaacgcugaggacaugggcaauggaugcuuuaagauauaccacaaaugugauaacgccugcaucggcaguauucgcaaugggaccuaugaccaugauguguacagagacgaggcucugaacaauagguuccagaucaagggagucgaacucaaauccgguuacaaggacuggauucuguggaucagcuuugccauaucuugcuuccuucugugugugguuuugcucggcuuuaucaugugggcaugccagaaagggaacauucgguguaauaucugcauuuga

SEQ ID NO: 138086 - RNA, 1701 nt, Artificial Sequence; identical to SEQ ID NO: 137916
  derived and/or modified CDS sequence (opt3) from hemagglutinin__InfluenzaA__AGL09785

SEQ ID NO: 138087 - RNA, 1701 nt, Artificial Sequence
  derived and/or modified CDS sequence (opt3) from hemagglutinin__InfluenzaA__AGL09786
augaagaccaucauugcccugagcuacauacucugccuuguguucgcucagaaacugcccggcaacgacaauuccacagcaacuuuguguuuagggcaccaugccgucccuaacggaacgaucguuaagaccauuacaaaugauagaaucgaggugacuaacgcgaccgaacugguacaaaauucuucaauuggugagaucugcgacaguccacaccagauacuagauggcgaaaacuguacacucaucgacgcucugcuuggggauccgcagugcgacggauuucagaauaaaaagugggaucuguucguggagaggagcaaagccuauuccaacuguuaccccuaugacgucccugauuacgcaucuuugcggucgcucguggccucaagcggcacccuggaauuugacaaugagaguuucaacugggcugguguuacucaaaaugggacauccucugcaugcauucgcggaagcaaguccucauuuuucagucgacugaacuggcucacccauuuaaauuuuaaguauccagcccugaacgugacgaugcccaauaacgagcaguucgauaaacuuuacaucuggggcguccaccauccuggcacugacaaggaucagauuagcuuguaugcucagucuuccgggcguaucaccgugucaacaaaaagaagccaacaggccguaauaccaaacauuggaaguaggccccggauccgcaauauuccuucuagaaucuccaucuacuggacuauuguuaagccaggugacauacugcuaaucaacagcaccggcaaucucauugcgccgaggggguacuuuaaaauccggucgggaaagucuuccauaaugcgcucagacgcacccauuggcaaguguaaaagugaaugcaucacaccuaacgguagcaucccaaaugauaagcccuuccagaacgugaaucgaauuaccuauggggccuguccuagauacgucaaacaguccacgcugaagcuggcuacuggaaugaggaacgugccagagaaacaaacacggggcaucuuuggcgccauugcaggguucauagaaaauggaugggaggguaugguggacggcugguauggguuucgucaccagaacucugagggacgcggccaggcugccgaucuuaagagcacccaagcggccaucgaccagauuaaugguaaauugaacagacucaucgggaagacuaaugaaaaguuccaccagaucgagaaagaguucucagaagucgaaggcaggauucaggaucuggagaaguacguugaggacacaaaaauagauuuauggaguuauaacgcagaacugcucguggcucuugagaaucaacauaccaucgaccugacggauuccgaaaugaacaaguuguuugagaaaaccaagaagcagcuacgggaaaacgccgaggacaugggaaauggcugcuucaaaauuuaccacaagugugauaacgcuugcaucgggagcauucgaaauggaacauaugaccaugacguauaccgcgaugaggcccugaacaauagauuucagaucaaagguguggaacucaagucuggcuacaaagacuggauacuguggaucucauucgcaauuaguugcuuucuucugugugucgccuugcucggguucaucaugugggcuugccagaagggaaacauuagguguaauaucugcauauga

SEQ ID NO: 138088 - RNA, 1701 nt, Artificial Sequence
  derived and/or modified CDS sequence (opt3) from hemagglutinin__InfluenzaA__AGL09787
augaaggccauccuggugguccuccuuuacaccuucgcuacagcaaacgccgacacucugugcauuggcuaucacgcgaauaacagcacggauaccguugacacaguguuggagaagaauguaacugugacccauuccgucaacuuacuggaagauaagcacaaugggaaacuauguaagcucagaggaguggcuccccugcaucuugguaaaugcaacauagccggcuggauccuggggaauccugagugugaaucuuugucaacagcaaguagcugguccuacauuguugagaccucuucgucagacaacggaacuugcuauccaggcgauuuuaucaauuacgaagaacucagggagcagcugagcaguguguccucuuucgaacgguuugagauuuucccgaagacaagcuccuggcccaaccacgacucaaauaagggugucaccgccgcuuguccucaugcaggggccaaaaguuuuuauaagaaccugaucuggcucgugaaaaagggaaauagcuacccaaaauuaucucaauccuauauaaacgauaagggcaaggaaguacugguucuuuggggcauccaccaccccucaacgacugcugaccagcagagcuuguaccagaaugccgaugcguacguguucgucgggaccagucgcuauucuaaaaaguuuaaaccugagauugcaauccgaccaaaggugcgugaccaagagggaagaaugaacuacuauuggacacugguggaacccggugauaaaauuacuuucgaggccaccggcaaccuagucguuccuagguacgcuuuuacaauggaacggaaugccggguccggaaucauaauuagcgacaccccagugcaugauugcaacacgacuugucagacaccggagggcgcaaucaauaccucgcuccccuuccagaacauucacccuaucacuaucgguaagugcccaaaauauguaaagucuacaaagcugcgccuugcuaccgggcugagaaaugugcccuccauucagucaaggggauuguuuggcgccauagcgggcuucaucgaagggggauggacggguauggucgacggcugguacggguaucaucaccaaaacgagcagggaaguggcuacgccgcagaccucaaaagcacccagaaugcuauugauaagaucacaaacaaaguuaauuccgugauagagaagaugaacacucaguuuaccgccguggguaaagaguucaaucaccuggagaagcggauugaaaacuuaaauaagaaagucgacgauggguuccuggacaucuggacauacaacgcugagcuccuugugcuguuggaaaaugagcgcacucuagauuaucaugacucuaacguaaagaaccuguacgagaaaguucgaaaucaacucaagaacaaugccaaagaaaucggcaacggauguuuugaguucuaucacaagugcgauaauaccuguauggaaagcgugaagaacggcacauacgacuauccuaaauacucagaggaagcaaagcugaauagagagaaaauugauggggucaaacuugagaguaccaggaucuaucagauucuggccauauacuccacuguggcuagcucuuugguccucgugguuucacugggagcgaucaguuuuuggaugugcagcaacgguuccuuacagugccggauuuguaucuga

SEQ ID NO: 138089 - RNA, 1701 nt, Artificial Sequence; identical to SEQ ID NO: 138088
  derived and/or modified CDS sequence (opt3) from hemagglutinin__InfluenzaA__AGL09788

SEQ ID NO: 138090 - RNA, 1701 nt, Artificial Sequence; identical to SEQ ID NO: 138088
  derived and/or modified CDS sequence (opt3) from hemagglutinin__InfluenzaA__AGL09789

SEQ ID NO: 138091 - RNA, 1701 nt, Artificial Sequence; identical to SEQ ID NO: 138042
  derived and/or modified CDS sequence (opt3) from hemagglutinin__InfluenzaA__AGL09790

SEQ ID NO: 138092 - RNA, 1701 nt, Artificial Sequence
  derived and/or modified CDS sequence (opt3) from hemagglutinin__InfluenzaA__AGL09791
augaagaccaucauugcccugagcuacauacucugccuuguguucgcucagaaacugcccggcaacgacaauuccacagcaacuuuguguuuagggcaccaugccgucccuaacggaacgaucguuaagaccauuacaaaugauagaaucgaggugacuaacgcgaccgaacugguacaaaauucuucaauuggugagaucugcgacaguccacaccagauacuagauggcgaaaacuguacacucaucgacgcucugcuuggggauccgcagugcgacggauuucagaauaaaaagugggaucuguucguggagaggagcaaagccuauuccaacuguuaccccuaugacgucccugauuacgcaucuuugcggucgcucguggccucaagcggcacccuggaauuuaauaacgagaguuucaauuggacugguguuacacaaaacgggaccuccucugcuugcauucgccgaagcaauuccucauuuuucagucgucugaacuggcucacgcauuuaaauuuuaaguauccagcacugaacaugacuaugcccaacaaugagcaguucgacaaacuuuacaucuggggagugcaccauccuggcaccgauaaagaccagauuagcuuguaugcccagucuuccggcagaaucacagucucaacuaagaggagccaacaggcugugauaccaaacauugggagucggccccgcaucagaaauauuccuucuaggaucuccaucuacuggaccauuguaaaaccaggagauauacugcuaaucaacagcacagguaaucucauugccccgcggggcuacuuuaagauccgcucggggaaaucuuccauaaugcgaucagacgcgcccauuggaaaguguaagagugaaugcaucaccccuaacggcagcaucccaaaugacaaacccuuccagaacguuaauagaauuacguauggugcauguccuagguacgugaagcaguccacucugaaacuugccacagggaugcggaacgucccagagaagcaaacccguggaaucuuuggcgcuauugccggcuucauagaaaaugggugggagggaaugguggaugguugguauggcuuucgccaccagaacucugaggggagaggacaggcagcugaccugaaaagcacucaagccgcgaucgaucagauuaauggcaaguugaacaggcucaucgguaaaacaaaugaaaaguuccaccagaucgagaaggaguucucagaaguggaagggcggauucaggaccuggagaaauacgucgaggauaccaagauagacuuauggaguuauaacgccgaacugcucguugcacuugagaaccaacauacgaucgaucugaccgacuccgaaaugaauaaauuguuugagaagacaaagaagcagcuacgagaaaacgcugaggauaugggcaauggaugcuucaagauuuaccacaaaugugacaacgccugcaucggcagcauucgcaaugggacuuaugaucauaacguguacagagacgaggcucugaauaacagguuucagaucaagggaguagaacucaaaucugguuacaaggacuggauacuguggaucucauucgccauuaguugcuuucuucuguguguggcauugcucggcuucaucaugugggccugccagaaagggaauauucgguguaacaucugcauauga

SEQ ID NO: 138093 - RNA, 1701 nt, Artificial Sequence; identical to SEQ ID NO: 138042
  derived and/or modified CDS sequence (opt3) from hemagglutinin__InfluenzaA__AGL09792

SEQ ID NO: 138094 - RNA, 1701 nt, Artificial Sequence
  derived and/or modified CDS sequence (opt3) from hemagglutinin__InfluenzaA__AGL09794
augaagaccaucauugcccugagcuacauacucugccuuguguucgcucagaaacugcccggcaacgacaauuccacagcaacuuuguguuuagggcaccaugccgucccuaacggaacgaucguuaagaccauuacaaaugauagaaucgaggugacuaacgcgaccgaacugguacaaaauucuucaauuggugagaucugcgacaguccacaccagauacuagauggcgaaaacuguacacucaucgacgcucugcuuggggauccgcagugcgacggauuucagaauaaaaagugggaucuguucguggagaggagcaaagccuauuccaacuguuaccccuaugacgucccugauuacgcaucuuugcggucgcucguggccucaagcggcacccuggaauuuaauaacgagaguuucaauugggcugguguuacucaaaacgggacauccucugcaugcauucgcggaagcaauuccucauuuuucagucgacugaacuggcucacccauuuaaauuuuaaguauccagcccugaacgugacgaugcccaacaaugagcaguucgacaaacuuuacaucuggggcguccaccauccuggcacugauaaagaccagaucuuuuuguaugcucagagcucugggcguauuaccguguccacaaagagaucacaacaggccguaauaccaaacauuggaagcaggccccggauccgcaauauuccuaguagaaucucuaucuacuggacuauuguuaaaccaggugauauacugcuaaucaacuccaccggcaaucucauugcgccgaggggguacuucaagauccggagcggaaaaucgucuauaaugcgcuccgacacacccauuggcaaguguaagucagaaugcaucaccccuaacgguaguaucccaaaugacaaacccuuucagaacgugaaucgaauuacguauggggcauguccuagauacgucaagcagagcacucugaaacuugccacaggaaugaggaacgugccagagaagcaaacccggggcaucuucggcgcuauugccggguuuauagaaaauggaugggaggguaugguggauggcugguauggguuccgucaccagaacuccgagggacgcggccaggcagcugaccugaaaucuacucaagccgcgaucgaucagauuaaugguaaguugaacagacucaucgggaaaacaaaugaaaaguuccaccagaucgagaaggaauuuagcgaggucgaaggcaggauucaggaccuggagaaauacguugaggauaccaagauagacuuauggucauauaacgccgaacugcucguggcacuugagaaccaacauacgaucgaucugaccgacagugaaaugaauaaauuguucgagaagacaaagaagcagcuacgggaaaacgcugaggauaugggaaauggcugcuuuaagauuuaccacaaaugugacaacgccugcaucggguccauucgaaauggaacuuaugaucaugacguauaccgcgacgaggcucugaacaauagauuccagaucaaggguguggaacucaaaagcggcuacaaggauuggauacuguggaucucuuuugccauuucaugcuuccuucugugugucgcauugcucggguuuaucaugugggccugccagaaaggaaacauuagguguaauaucugcauauga

SEQ ID NO: 138095 - RNA, 1701 nt, Artificial Sequence; identical to SEQ ID NO: 138042
  derived and/or modified CDS sequence (opt3) from hemagglutinin__InfluenzaA__AGL09795

SEQ ID NO: 138096 - RNA, 1701 nt, Artificial Sequence
  derived and/or modified CDS sequence (opt3) from hemagglutinin__InfluenzaA__AGL09797
augaagaccaucauugcccugagcuacauacucugccuuguguucucccagaaacugcccggcaacgacaauucuacagcuacuuuguguuuagggcaccaugcagucccuaacggaacgaucguuaagaccauuacaaaugauagaaucgaggugacuaacgccaccgaacugguacaaaauucaaguauuggugagaucugcgacagcccacaccagauacuagauggcgaaaacuguacacucaucgacgcgcugcuuggggauccgcagugcgacggauuucagaauaaaaagugggaucuguucguggagagguccaaggcuuauucuaacuguuaccccuaugacgucccugauuacgccucguugcggucacucguggcaagcaguggcacccuggaauuuaauaacgaguccuucaauugggccgguguuacucaaaacgggacaucuagcgcuugcauucgcggauccaauucaaguuucuuuagccgacugaacuggcucacccauuuaaauuuuaaguauccagcacugaacgugacgaugcccaacaaugagcaguucgacaaacuuuacaucuggggcguccaccauccuggcacugauaaagaccagaucuuuuuguaugcccagucuuccgggcguauuaccgugucaacaaagagaagccaacaggcuguaauaccaaacauuggaaguaggccccggauccgcaauauuccuucuagaaucuccaucuacuggacuauuguuaaaccaggugauauacugcuaaucaacagcaccggcaaucucauugccccgaggggguacuucaagauccggucgggaaaaucuuccauaaugcgcucagacgcgcccauuggcaaguguaagagugaaugcaucacaccuaacgguagcaucccaaaugacaaacccuuucagaacgugaaucgaauuaccuauggggcauguccuagauacgucaagcaguccacgcugaaacuugccacuggaaugaggaacgugccagagaagcaaacacggggcaucuucggcgcuauugccggguuuauagaaaauggaugggaggguaugguggauggcugguauggguuccgucaccagaacucugagggacgcggccaggcagcugaccugaaaagcacccaagccgcgaucgaucagauuaaugguaaguugaacagacucaucgggaaaacuaaugaaaaguuccaccagaucgagaaggaauuuucagaggucgaaggcaggauucaggaccuggagaaauacguugaggauacaaagauagacuuauggaguuauaacgccgaacugcucguggcacuugagaaccaacauaccaucgaucugacggacuccgaaaugaauaaauuguucgagaagaccaaaaagcagcuacgggaaaacgcugaggauaugggaaauggcugcuuuaagauuuaccacaaaugugacaacgccugcaucgggagcauucgaaauggaacauaugaucaugacguauaccgcgacgaggcucugaacaauagauuccagaucaaggguguggaacucaaaucuggcuacaaggauuggauacuguggaucucauuugccauuaguugcuuccuucugugugucgcauugcucggguuuaucaugugggccugccagaaaggaaacauuagguguaauaucugcauauga

SEQ ID NO: 138097 - RNA, 1701 nt, Artificial Sequence
  derived and/or modified CDS sequence (opt3) from hemagglutinin__InfluenzaA__AGL09798
augaagaccaucauugcccugagcuacauacucugccuuguguucgcucagaaacugcccggcaacgacaauuccacagcaacuuuguguuuagggcaccaugccgucccuaacggaacgaucguuaagaccauuacaaaugauagaaucgaggugacuaacgcgaccgaacugguacaaaauucuucaauuggugagaucugcgacaguccacaccagauacuagauggcgaaaacuguacacucaucgacgcucugcuuggggauccgcagugcgacggauuucagaauaaaaagugggaucuguucguggagaggagcaaagccuauuccaacuguuaccccuaugacgucccugauuacgcaucuuugcggucgcucguggccucaagcggcacccuggaauuuaauaacgagaguuucaauugggcugguguuacucaaaacgggacauccucugcaugcauucgcggaagcaauuccucauuuuucagucgacugaacuggcucacccauuuaaauuuuaaguauccagcccugaacgugacgaugcccaacaaugagcaguucgacaaguuguacaucuggggcguccaccauccuggcacugauaaagaccagauuuuucuuuaugcucagagcucugggcguaucaccguguccacaaagagaucacaacaggccguaauaccaaacauuggaagcaggccccggauccgcaauauuccuaguagaaucucuaucuacuggacuauuguuaaaccaggugauauacugcuaaucaacuccaccggcaaucucauugcgccgaggggguacuucaagauccggagcggaaaaucgucuauaaugcgcuccgacgcacccauuggcaaguguaagucagaaugcaucacaccuaacgguaguaucccaaaugacaaacccuuucagaacgugaaucgaauuaccuauggggccuguccuagauacgucaagcagagcacgcugaaacuugcuacuggaaugaggaacgugccagagaagcaaacacggggcaucuucggcgccauugcaggguuuauagaaaauggaugggaggguaugguggauggcugguauggguuccgucaccagaacuucgagggacgcggccaggcugccgaccugaaauccacccaagcggccaucgaucagauuaaugguaaguugaacagacucaucgggaaaacuaaugaaaaguuucaccagaucgagaaggaguucucugaagucgaaggcaggauucaggaccuggagaaauacguugaggauacaaagauagacuuauggagcuauaacgcagaacugcucguggcucuugagaaccaacauaccaucgaucugacggacucagaaaugaauaaauuguuugagaagaccaaaaagcagcuacgggaaaacgccgaggauaugggaaauggcugcuucaagauuuaccacaaaugugacaacgcuugcaucgggaguauucgaaauggaacauaugaucauuacguauaccgcgacgaggcccugaacaauagauuucagaucaaggguguggaacucaaauccggcuauaaggacuggauacuguggaucagcuucgcaauuucuugcuuucuucugugugucgccuugcucggguucaucaugugggcuugccagaaaggaaacauuagguguaauaucugcauauga

SEQ ID NO: 138098 - RNA, 1701 nt, Artificial Sequence; identical to SEQ ID NO: 138096
  derived and/or modified CDS sequence (opt3) from hemagglutinin__InfluenzaA__AGL09799

SEQ ID NO: 138099 - RNA, 1701 nt, Artificial Sequence; identical to SEQ ID NO: 138042
  derived and/or modified CDS sequence (opt3) from hemagglutinin__InfluenzaA__AGL09800

SEQ ID NO: 138100 - RNA, 1701 nt, Artificial Sequence; identical to SEQ ID NO: 137906
  derived and/or modified CDS sequence (opt3) from hemagglutinin__InfluenzaA__AGL09801

SEQ ID NO: 138101 - RNA, 1701 nt, Artificial Sequence; identical to SEQ ID NO: 137906
  derived and/or modified CDS sequence (opt3) from hemagglutinin__InfluenzaA__AGL09802

SEQ ID NO: 138102 - RNA, 1701 nt, Artificial Sequence
  derived and/or modified CDS sequence (opt3) from hemagglutinin__InfluenzaA__AGL09803
augaagaccaucauugcccugagcuacauacucugccuuguguucgcucagaaacugcccggcaacgacaauuccacagcaacuuuguguuuagggcaccaugccgucccuaacggaacgaucguuaagaccauuacaaaugauagaaucgaggugacuaacgcgaccgaacugguacaaaauucuucaauuggugagaucugcgacaguccacaccagauacuagauggcgaaaacuguacacucaucgacgcucugcuuggggauccgcagugcgacggauuucagaauaaaaagugggaucuguucguggagaggagcaaagccuauuccaacuguuaccccuaugacgucccugauuacgcaucuuugcggucgcucguggccucaagcggcacccuggaauuuaauaacgagaguuucaauuggacugguguuacacaaaacgggaccuccucugcuugcauucgccgaagcaauuccucauuuuucagucgucugaacuggcucacgcauuuaaauuuuaaguauccagcacugaacgugacuaugcccaacaaugagcaguucgacaaacuuuacaucuggggaguccaccauccuggcaccgauaaagaccagaucuuuuuguaugcccagagcucuggcagaauuacaguguccacuaagaggucacaacaggcuguaauaccaaacauugggagccggccccgcaucagaaauauuccuaguaggaucucuaucuacuggaccauuguuaaaccaggagauauacugcuaaucaacuccacagguaaucucauugccccgcggggcuacuucaagauccgcagcgggaaaucgucuauaaugcgauccgacgcgcccauuggaaaguguaagucagaaugcaucaccccuaacggcaguaucccaaaugacaaacccuuucagaacgugaauagaauuacguauggugcauguccuagguacgucaagcagcggacucugaaacuugccacagggaugcguaacgugccagagaagcaaacccgcggaaucuucggcgcuauugccggcuuuauagaaaaugggugggagggaaugguggaugguugguauggcuucagacaccagaacagcgaggggaggggacaggcagcugaccugaaauccacucaagccgcgaucgaucagauuaauggcaaguugaaccggcucaucgguaaaacaaaugaaaaguuccaccagaucgagaaggaauuuucugaggucgaagggcgcauucaggaccuggagaaauacguugaggauaccaagauagacuuauggagcuauaacgccgaacugcucguggcacuugagaaccaacauacgaucgaucugaccgacucagaaaugaauaaauuguucgagaagacaaagaagcagcuacgagaaaacgcugaggauaugggcaauggaugcuuuaagauuuaccacaaaugugacaacgccugcaucggcaguauuagaaaugggacuuaugaucaugacguauacagggacgaggcucugaacaaucgguuccagaucaagggaguggaacucaaauccgguuacaaggauuggauacuguggaucagcuuugccauuucuugcuuccuucugugugucgcauugcucggcuuuaucaugugggccugccagaaagggaacauucgcuguaauaucugcauauga

SEQ ID NO: 138103 - RNA, 1701 nt, Artificial Sequence; identical to SEQ ID NO: 137939
  derived and/or modified CDS sequence (opt3) from hemagglutinin__InfluenzaA__AGL09804

SEQ ID NO: 138104 - RNA, 1701 nt, Artificial Sequence; identical to SEQ ID NO: 138045
  derived and/or modified CDS sequence (opt3) from hemagglutinin__InfluenzaA__AGL09805

SEQ ID NO: 138105 - RNA, 1701 nt, Artificial Sequence; identical to SEQ ID NO: 138074
  derived and/or modified CDS sequence (opt3) from hemagglutinin__InfluenzaA__AGL09806

SEQ ID NO: 138106 - RNA, 1701 nt, Artificial Sequence; identical to SEQ ID NO: 138045
  derived and/or modified CDS sequence (opt3) from hemagglutinin__InfluenzaA__AGL09807

SEQ ID NO: 138107 - RNA, 1701 nt, Artificial Sequence
  derived and/or modified CDS sequence (opt3) from hemagglutinin__InfluenzaA__AGL09808
augaagaccaucauugcccugagcuacauacucugccuuguguucgcucagaaacugcccggcaacgacaauuccacagcaacuuuguguuuagggcaccaugccgucccuaacggaacgaucguuaagaccauuacaaaugaucaaaucgaggugacuaacgcgaccgaacugguacaaaauucuucaauuggugagaucugcgacaguccacaccagauacuagauggcgaaaacuguacacucaucgacgcucugcuuggggauccgcagugcgacggauuucagaauaaaaagugggaucuguucguggagagaagcaaagccuauuccaacuguuaccccuaugacgucccugauuacgcaucuuugaggucgcucguggccucaagcggcacccuggaauuuaauaacgagaguuucaauugggcugguguuacucagaacgggacauccucugcaugcauucggggaagcaauuccucauuuuucagucgccugaacuggcucacccauuuaaauuuuaaguauccagcccugaacgugacgaugcccaacaaugagcaguucgacaaguuguacaucuggggcguccaccauccuggcacugauaaagaccagauuuuucuuuaugcucaaagcucugggcgaaucaccguguccacaaagcguucacagcaggccguaauaccaaacguuggaagcagacccaggauucggaauaucccuagucgcauuucuaucuacuggacuaucgugaaaccaggugauauucugcuaauaaacuccaccggcaaucucaucgcgccgagaggguacuucaagauuaggagcggaaaaucgucuaucaugcgguccgacgcacccauaggcaaguguaagucagaaugcauuacaccuaacgguaguaucccaaaugacaaacccuuucagaacgucaaucgcaucaccuauggggccuguccucgauacgugaagcaaagcacgcugaaacuugcuacuggaaugagaaacgugccagagaagcagacaaggggcauuuucggcgccaucgcaggguuuauugaaaauggaugggaggguauggucgauggcugguauggguuccggcaccagaacuccgagggacguggccaagcugccgaccugaaaucuacccaggcggccauagaucagaucaaugguaaguugaaccgccucauugggaaaacuaaugaaaaguuccaccagaucgagaaggaauuuagcgagguugaaggcagaauccaagaccuggagaaauacguggaggauacaaagauugacuuauggucauauaacgcagaacugcucguagcucuugagaaccagcauaccauagaucugacggacagugaaaugaauaaauuguucgagaagaccaaaaagcagcuaagggaaaacgccgaggauaugggaaauggcugcuuuaagaucuaccacaaaugugacaacgcuugcauuggguccauccggaauggaacauaugaucaugacguguaccgagacgaggcccugaacaaucgcuuccagauuaagggugucgaacucaaaagcggcuacaaggauuggauccuguggauaucuuuugcaaucucaugcuuccuucuguguguggccuugcucggguuuauuaugugggcuugccaaaaaggaaacaucagauguaauauuugcaucuga

SEQ ID NO: 138108 - RNA, 1701 nt, Artificial Sequence
  derived and/or modified CDS sequence (opt3) from hemagglutinin__InfluenzaA__AGL09809
augaaggccauccugguggucaugcucuacaccuucgcuacagcaaacgccgacacucuuugcauuggcuaucacgcgaauaacagcacggauaccguugacacagugcuggagaaaaauguaacugugacccauuccgucaacuuguuagaagauaagcacaaugggaaacuguguaagcuaagaggaguggcuccccuccaucuggguaaaugcaacauagccggcuggauccuugggaauccugagugugaaucucugucaacagcaaguagcugguccuacauuguugagaccucuggaucggacaacggcacuugcuauccaggugauuuuaucgacuacgaagaguugagggagcagcucucaagcgugaguuccuucgaacgguuugagauuuucccgaagacaucuagcuggcccaaucacgauuccaacaagggggucaccgccgcuuguccucaugcaggagccaaaggcuuuuauaagaaucugaucuggcuggugaaaaagggcaacucauacccaaaacucaguauaagcuauaucaaugacaaggggaaggaaguauuaguucugugggguauucaccaccccucuacgacugcugaucaacagucccuuuaccagaacgccgacaccuacguguucgucggaacaucacgcuauagcaaaaaguuuaaaccugagaucgcgauucgaccaaaggugcgugaucaggagggcagaaugaauuacuauuggacuuugguggaacccggggacaaaaucaccuucgaggcaacaggaaaccuggucguuccuagguacgccuuugcuauggaacggaacgccggcagugguauaauuaucucugauaccccagugcaugacugcaauacgacuugucaaacaccgaagggggcaauuaacaccucccuacccuuccagaauauccacccuaucacuauuggaaaaugcccaaaguauguaaagagcacaaaacuccgccuggcuaccggccuuagaaacgugcccucgauacagucuaggggccuguuuggggccaucgcgggauucauugaggguggcuggacggggauggucgacggaugguacggcuaucaucaccagaaugaacaagguuccggguacgccgcagauuugaagucaacccagaacgcuaucgacaaaauaacaaauaaggugaacaguguuauugagaaaaugaauacucaguuuaccgccgugggcaaggaguucaaccaccucgaaaagcggaucgagaaucugaacaaaaaggucgaugacggauucuuagauaucuggacauacaaugcugaacugcucgugcuucuggagaacgaacgcacuuuggacuaucaugauagcaauguuaaaaaccuauacgagaagguacgaaaccagcugaaaaauaacgccaaggagauuggcaauggguguuuugaguucuaucacaagugcgacaacaccuguauggaauccgugaaaaauggaacauacgauuauccuaaguacucugaagaggcaaaacucaacagagaagagaucgacggugucaagcuggagagcaccaggauuuaucaaauacuugccaucuacucaacugcugcgaguucccugguguuggucgugagccucggcgcaauuucuuuuuggaugugcucaaaugggagucugcagugccggaucuguaucuga

SEQ ID NO: 138109 - RNA, 1701 nt, Artificial Sequence
  derived and/or modified CDS sequence (opt3) from hemagglutinin__InfluenzaA__AGL09810
augaagaccaucauugcccugagcuacauacucugccuuguguucgcucagaaacugcccggcaacgacaauuccacagcaacuuuguguuuagggcaccaugccgucccuaacggaacgaucguuaagaccauuacaaaugauagaaucgaggugacuaacgcgaccgaacugguacaaaauucuucaauuggugagaucugcgacaguccacaccagauacuagauggcgaaaacuguacacucaucgacgcucugcuuggggauccgcagugcgacggauuucagaauaaaaagugggaucuguucguggagaggagcaaagccuauuccaacuguuaccccuaugacgucccugauuacgcaucuuugcggucgcucguggccucaagcggcacccuggaauuuaguaaugaguccuucaacuggacugguguuacacaaaaugggaccucuagcgcuugcauucgccgauccaacucaaguuucuuuagccgucugaauuggcucacgcauuuaaacuuuaaguauccagcacugaaugugacuaugcccaacaacgagcaguucgacaaguuguacaucuggggaguccaccauccuggcaccgauaaagaccagauuuuucuuuaugcccagucuuccggcagaaucacagugucaacuaagaggagccaacaggcuguaauaccaaauauugggagucggccccgcaucagaaacauuccuucuaggaucuccaucuacuggaccauuguuaaaccaggagauauacugcuaaucaauagcacagguaaccucauugccccgcggggcuacuucaagauccgcucggggaaaucuuccauaaugcgaucagacgcgcccauuggaaaguguaagagugaaugcaucaccccuaauggcagcaucccaaacgacaaacccuuucagaaugugaacagaauuacguaugguacuuguccuagguacgucaagcaguccacacugaaacuugcaaccgggaugcggaaugugccagagaagcaaacucguggaaucuucggcgccauugcuggcuuuauagaaaacgggugggagggaaugguggaugguugguauggcuuccgccaccaaaauucugaggggagaggacaggccgcagaccugaaaagcacacaggcugccaucgaucagauuaacggcaaguugaauaggcucaucgguaaaaccaacgaaaaguuccaccagaucgagaaggaauuuucagaggucgaagggcggauucaggaccuggagaaauacguugaggauacgaagauagacuuauggaguuauaaugcggaacugcucguggcccuugagaaccaacauaccaucgaucugacagacuccgaaaugaacaaauuguucgagaagacuaaaaagcagcuacgagaaaaugcagaggauaugggcaacggaugcuuuaagauuuaccacaaaugugacaaugcuugcaugggcagcauccgcaacgggaccuaugaucaugacguauacagagacgaggcccugaauaacagguuccagauuaagggaguggaacucaaaucugguuacaaggauuggauccuguggauaucauuugcuaucaguugcuuccuucugugugucgccuugcucggcuuuauuaugugggcaugccagaaagggaauauccgguguaacauuugcaucuga

SEQ ID NO: 138110 - RNA, 1701 nt, Artificial Sequence; identical to SEQ ID NO: 137906
  derived and/or modified CDS sequence (opt3) from hemagglutinin__InfluenzaA__AGL09811

SEQ ID NO: 138111 - RNA, 1701 nt, Artificial Sequence
  derived and/or modified CDS sequence (opt3) from hemagglutinin__InfluenzaA__AGL09812
augaagaccaucauugcccugagcuacauacucugccuuguguucgcucagaaacugcccggcaacgacaauuccacagcaacuuuguguuuagggcaccaugccgucccuaacggaacgaucguuaagaccauuacaaaugauagaaucgaggugacuaacgcgaccgaacugguacaaaauucuucaauuggugagaucugcgacaguccacaccagauacuagauggcgaaaacuguacacucaucgacgcucugcuuggggauccgcagugcgacggauuucaggauaaaaagugggaccuguucguggagaggagcaaagccuauuccaauuguuaccccuaugaugucccugacuacgcaucuuugcggucgcucguggccucaagcggcacccuggaauuuaacaaugagaguuucaacugggcugguguuacucaaaaugggacauccucugcaugcauucgcggaagcaacuccucauuuuucagucgacugaauuggcucacccauuuaaacuuuaaguauccagcccugaaugugacgaugcccaacaacgagcaguucgauaaguuguacaucuggggcguccaccauccuggcacugacaaagaucagauuuuucuuuaugcucagagcucugggcguaucaccguguccacaaagagaucacaacaggccguaauaccaaauauuggaagcaggccccggauccgcaacauuccuaguagaaucucuaucuacuggacuauuguuaaaccaggugacauacugcuaaucaauuccaccggcaaccucauugcgccgaggggguacuucaagauccggagcggaaaaucgucuauaaugcgcuccgacgcacccauuggcaaguguaagucagaaugcaucacaccuaaugguaguaucccaaacgauaaacccuuucagaaugugaaccgaauuaccuauggggccuguccuagauacgucaagcagagcacgcugaaacuugcuacuggaaugaggaaugugccagagaagcaaacacggggcaucuucggcgccauugcaggguuuauagaaaacggaugggaggguaugguggacggcugguauggguuccgucaccaaaauuccgagggacgcggccaggcugccgaucugaaaucuacccaggcggccaucgaccagauuaacgguaaguugaauagacucaucgggaaaacuaacgaaaaguuccaccagaucgagaaggaauuuagcgaggucgaaggcaggauucaggaucuggagaaauacguugaggacacaaagauagauuuauggucauauaaugcagaacugcucguggcucuugagaaccaacauaccaucgaccugacggauagugaaaugaacaaauuguucgagaagaccaaaaagcagcuacgggaaaaugccgaggacaugggaaacggcugcuuuaagauuuaccacaaaugugauaaugcuugcaucggguccauucgaaacggaacauaugaccaugacguauaccgcgaugaggcccugaauaacagauuccagaucaaggguguggaacucaaaagcggcuacaaggacuggauacuguggaucucuuuugcaauuucaugcuuccuucugugugucgccuugcucggguuuaucaugugggcuugccagaaaggaaauauuagguguaacaucugcauauga

SEQ ID NO: 138112 - RNA, 1701 nt, Artificial Sequence; identical to SEQ ID NO: 137883
  derived and/or modified CDS sequence (opt3) from hemagglutinin__InfluenzaA__AGL09813

SEQ ID NO: 138113 - RNA, 1701 nt, Artificial Sequence; identical to SEQ ID NO: 137931
  derived and/or modified CDS sequence (opt3) from hemagglutinin__InfluenzaA__AGL09814

SEQ ID NO: 138114 - RNA, 1701 nt, Artificial Sequence
  derived and/or modified CDS sequence (opt3) from hemagglutinin__InfluenzaA__AGL09815
augaagaccaucauugcccugagcuacauacucugccuuguguucgcucagaaacugcccggcaacgacaauuccacagcaacuuuguguuuagggcaccaugccgucccuaacggaacgaucguuaagaccauuacaaaugauagaaucgaggugacuaacgcgaccgaacugguacaaaauucuucaauuggugagaucugcgacaguccacaccagauacuagauggcgaaaacuguacacucaucgacgcucugcuuggggauccgcagugcgacggauuucagaauaaaaagugggaucuguucguggagaggagcaaagccuauuccaacuguuaccccuaugacgucccugauuacgcaucuuugcggucgcucguggccucaagcggcacccuggaauuuaauaacgagaguuucaauuggacugguguuacacaaaacgggaccuccucugcuugcauucgccgaagcaauuccucauuuuucagucgucugaacuggcucacgcauuuaaauuuuaaguauccagcacugaacgugacuaugcccaacaaugagcaguucgacaaacuuuacaucuggggaguccaccauccuggcaccgauaaagaccagaucuuuuuguaugcccagagcucuggcagaauuacaguguccacuaagaggucacaacaggcuguaauaccaaacauugggagccggccccgcaucagaaguauuccuucuaggaucuccaucuacuggaccauuguuaaaccaggagauauacugcuaaucaauagcacagguaaccucauugccccgcggggcuacuucaagauccgcucggggaaaucuuccauaaugcgaucagacgcgcccauuggaaaguguaagagugaaugcaucaccccuaauggcagcaucccaaacgacaaacccuuucagaaugugaacagaauuacguauggugcauguccuagguacgucaagcaguccacucugaaacuugccacagggaugcggaaugugccagagaagcaaacccguggaaucuucggcgcuauugccggcuuuauagaaaacgggugggagggaaugguggaugguugguauggcuuccgccaccaaaauucugaggggagaggacaggcagcugaccugaaaagcacucaggccgcgaucgaucagauuaacggcaaguugaauaggcucaucgguaaaacaaacgaaaaguuccaccagaucgagaaggaauuuucagaggucgaagggcggauucaggaccuggagaaauacguugaggauaccaagauagacuuauggaguuauaaugccgaacugcucguggcacuugagaaccaacauacgaucgaucugaccgacuccgaaaugaacaaauuguucgagaagacaaagaagcagcuacgagaaaaugcugaggauaugggcaacggaugcuuuaagauuuaccacaaaugugacaaugccugcaucggcagcauucgcaacgggacuuaugaucaugacguauacagagacgaggcucugaauaacagguuccagaucaagggaguggaacucaaaucugguuacaaggauuggauacuguggaucucauuugccauuaguugcuuccuucugugugucgcauugcucggcuuuaucaugugggccugccagaaagggaauauucgguguaacaucugcauauga

SEQ ID NO: 138115 - RNA, 1701 nt, Artificial Sequence; identical to SEQ ID NO: 137931
  derived and/or modified CDS sequence (opt3) from hemagglutinin__InfluenzaA__AGL09816

SEQ ID NO: 138116 - RNA, 1701 nt, Artificial Sequence
  derived and/or modified CDS sequence (opt3) from hemagglutinin__InfluenzaA__AGL09817
augaagaccaucauugcccugagcuacauacucugccuuguguucgcucaggagcugcccggcaacgacgauuccacagcaacuuuguguuuagggcaccaugccgucccuaauggaacgaucguuaaaaccauuacaaacgaccaaaucgaagugacuaaugcgaccgagcugguacagucuucaaguacaggugaaauuugcaacagcccacaccagauccuagauggcgagaauuguacccucauagacgcucugcuuggggauccgcagugcgacggauuucaaaacaagaaaugggaucuguucguggaaagauccaaggcccauucuaauuguuaucccuacgacgucccugauuaugcaucguugaggucacucguggccagcaguggcacucuggaguuuaacuccgagucuuucaauuggacagguguuacccagaacgggacgagcuccgcuugcauccggcgcucaaauaacagcuuuuucagucgacugaauuggcucacucacuuaaacuuuaaauacccagcacugaaugugaccaugcccaacaacgaacaguucgacaaacuuuauauuuggggaguccaucacccuggcacagauaaggaccagaucuuuuuguacgcccaggcuucuggccguauuacuguguccaccaagagaucacaacaggccguaaucccaaauauagggagcaggccccggguucgcaacauuccuaguagagugucuaucuauuggacaauugucaagccaggagauauccugcuaaucaauuccaccgguaaccucauugcgccgaggggcuacuucaaaauacggagcgggaagucgucuaucaugcgcuccgacgcacccauuggaaaauguaauucagccugcaucacgccuaacggcaguauaccaaaugacaagcccuuucagaacgugaaucgaauuacuuacggugcuuguccuagauaugugaagcaaaacacacugaaacuugccaccgggaugaggaaugucccagagaagcagacucggggaaucuucggcgcaaucgcuggcuuuauugaaaacgggugggagggaaugguugaugguugguacggcuuccgucaccagaauagcgaggggcgcggacaagccgcggaccugaaauccacacaggccgcaaucgaucagauuaacggcaaguugaauagacucauagguaaaaccaacgaaaaguuccaucagaucgagaaagaauuuucugagguggaagggaggauucaagaccuggagaaguauguagaggauacgaagaucgacuuauggagcuacaacgcugaacugcucguggcccuugagaaucagcacaccaucgaucugacagacucagaaaugaacaaauuguucgagaagacuaaaaagcagcuacgggaaaaugcugaggauaugggcaacggaugcuuuaaaauuuaucauaagugugacaaugccugcauaggcaguauccgaaacgggaccuacgaucacgacgucuaucgcgacgaggcacugaauaacagauuccagauuaagggaguggaacucaaauccgguuacaaggauuggauccuguggauuagcuuugccaucucuugcuuccuucuguguguugcuuugcucggcuuuauaaugugggcgugccaaaaagggaauaucagguguaacauuugcaucuga

SEQ ID NO: 138117 - RNA, 1701 nt, Artificial Sequence; identical to SEQ ID NO: 137931
  derived and/or modified CDS sequence (opt3) from hemagglutinin__InfluenzaA__AGL09818

SEQ ID NO: 138118 - RNA, 1701 nt, Artificial Sequence; identical to SEQ ID NO: 138042
  derived and/or modified CDS sequence (opt3) from hemagglutinin__InfluenzaA__AGL09819

SEQ ID NO: 138119 - RNA, 1701 nt, Artificial Sequence
  derived and/or modified CDS sequence (opt3) from hemagglutinin__InfluenzaA__AGL09820
augaagaccaucauugcccugagcuacauacucugccuuguguucgcucagaaacugcccggcaacgacaauuccacagcaacuuuguguuuagggcaccaugccgucccuaacggaacgaucguuaagaccauuacaaaugaucaaaucgaggugacuaacgcgaccgaacugguacaaaauucuucaauuggugagaucugcgacaguccacaccagauacuagauggcgaaaacuguacacucaucgacgcucugcuuggggauccgcagugcgacggauuucagaauaaaaagugggaucuguucguggagagaagcaaagccuauuccaacuguuaccccuaugacgucccugauuacgcaucuuugaggucgcucguggccucaagcggcacccuggaauuuaauaacgagaguuucaauuggacugguguuacacagaacgggaccuccucugcuugcauucggggaagcaauuccucauuuuucagucgccugaacuggcucacgcauuuaaauuuuaaguauccagcacugaacgugacuaugcccaacaaugagcaguucgacaaacuuuacaucuggggcguccaccauccuggcaccgauaaagaccagaucuuuuuguaugcccaaagcucugggcgaauuacaguguccacuaagcguucacagcaggcuguaauaccaaacauuggaagcagacccaggauccggaauauuccuagucgcaucucuaucuacuggaccauuguuaaaccaggugauauacugcuaaucaacuccacaggcaaucucauugccccgagaggguacuucaagaucaggagcggaaaaucgucuauaaugcgguccgacgcgcccauuggcaaguguaagucagaaugcaucaccccuaacgguaguaucccaaaugacaaacccuuucagaacgugaaucgcauuacguauggggcauguccucgauacgucaagcaaagcacucugaaacuugccacaggaaugagaaacgugccagagaagcagaccaggggcaucuucggcgcuauugccggguuuauagaaaauggaugggaggguaugguggauggcugguauggguuccggcaccagaacuccgagggacguggccaagcagcugaccugaaaucuacucaggccgcgaucgaucagauuaaugguaaguugaaccgccucaucgggaaaacaaaugaaaaguuccaccagaucgagaaggaauuuagcgagauugaaggcagaauacaagaccuggagaaauacgucgaggauaccaagaucgacuuauggucauauaacgccgaacugcucguugcacuugagaaccagcauacgauugaucugaccgacagugaaaugaauaaauuguucgagaagacaaagaagcagcuaagggaaaacgcugaggauaugggaaauggcugcuuuaagaucuaccacaaaugugacaacgccugcauuggguccauccggaauggaacuuaugaucaugacguguaccgagacgaggcucugaacaaucgcuuccagauaaaggguguagaacucaaaagcggcuacaaggauuggauccuguggauuucuuuugccaucucaugcuuccuucuguguguggcauugcucggguuuauuaugugggccugccaaaaaggaaacaucagauguaauauaugcauuuga

SEQ ID NO: 138120 - RNA, 1701 nt, Artificial Sequence
  derived and/or modified CDS sequence (opt3) from hemagglutinin__InfluenzaA__AGL09821
augaagaccaucauugcccugagcuacauacucugccuuguguucgcucagaaacugcccggcaacgacaauuccacagcaacuuuguguuuagggcaccaugccgucccuaacggaacgaucguuaagaccauuacaaaugauagaaucgaggugacuaacgcgaccgaacugguacaaaauucuucaauuggugagaucugcgacaguccacaccagauacuagauggcgaaaacuguacacucaucgacgcucugcuuggggauccgcagugcgacggauuucagaauaaaaagugggaucuguucguggagaggagcaaagccuauuccaacuguuaccccuaugacgucccugauuacgcaucuuugcggucgcucguggccucaagcggcacccuggaauuuaauaacgagaguuucaauuggacugguguuacacaaaacgggaccuccucugcuugcauucgccgaagcaauuccucauuuuucagucgucugaacuggcucacgcauuuaaauuuuaaguauccagcacugaacgugacuaugcccaacaaugagcaguucgacaaacuuuacaucuggggaguccaccauccuggcaccgauaaagaccagaucuuuuuguaugcccagagcucuggcagaauuacaguguccacuaagaggucacaacaggcuguaauaccaaacauugggagccggccccgcaucagaaauauuccuaguaggaucucuaucuacuggaccauuguuaaaccaggagauauacugcuaaucaacuccacagguaaucucauugccccgcggggcuacuucaagauccgcagcgggaaaucgucuauaaugcgauccgacgcgcccauuggaaaguguaagucagaaugcaucaccccuaacggcaguaucccaaaugacaaacccuuucagaacgugaauagaauuacguauggugcauguccuagguacgucaagcagagcacucugaaacuugccacagggaugcggaacgugccagagaagcaaacccguggaaucuucggcgcuauugccggcuuuauagaaaaugggugggagggaaugguggaugguugguauggcuuccgccaccagaacuccgaggggagaggacaggcagcugaccugaaaucuacucaagccgcgaucgaucagauuaauggcaaguugaacaggcucaucgguaaaacaaaugaaaaguuccaccagaucgagaaggaauuuagcgaggucgaagggcggauucaggaccuggagaaauacguugaggauaccaagauagacuuauggucauauaacgccgaacugcucguggcacuugagaaccaacauacgaucgaucugaccgacagugaaaugaauaaauuguucgagaagacaaagaagcagcuacgagaaaacgcugaggauaugggcaauggaugcuuuaagauuuaccacaaaugugacaacgccugcaucggcuccauucgcaaugggacuuaugaucauaacguauacagagacgaggcucugaauaacagguuccagaucaagggaauagaacucaaaagcgguuacaaggacuggauccuguggauuucuuuugccaucucaugcuuccuucuguguguggcauugcucggcuuuauuaugugggccugccagaaagggaauauccgguguaacauaugcauuuga

SEQ ID NO: 138121 - RNA, 1701 nt, Artificial Sequence; identical to SEQ ID NO: 138045
  derived and/or modified CDS sequence (opt3) from hemagglutinin__InfluenzaA__AGL09822

SEQ ID NO: 138122 - RNA, 1701 nt, Artificial Sequence; identical to SEQ ID NO: 138088
  derived and/or modified CDS sequence (opt3) from hemagglutinin__InfluenzaA__AGL09823

SEQ ID NO: 138123 - RNA, 1701 nt, Artificial Sequence
  derived and/or modified CDS sequence (opt3) from hemagglutinin__InfluenzaA__AGL09824
augaaggccauccuggugguccuccuuuacaccuucgcuacagcaaacgccgacacucugugcauuggcuaucacgcgaauaacagcacggauaccguugacacaguguuggagaaaaauguaacugugacccauuccgucaacuuacuggaagauaagcacaaugggaaacuauguaagcucagaggaguggcuccccugcaucuugguaaaugcaacauagccggcuggauccuggggaauccugagugugaaucuuugucaacagcaaguagcugguccuacauuguugagaccucuucgucagacaacggaacuugcuauccaggcgauuuuaucaauuacgaagaacucagggagcagcugagcaguguguccucuuucgaacgguuugagauuuucccgaagacaagcuccuggcccaaccacgacucaaauaagggugucaccgccgcuuguccucaugcagggacgaaaaguuuuuauaagaaccugaucuggcucgugaaaaagggaaauagcuacccaaaauuaucuaaguccuauauaaacgauaagggcaaagaaguacugguucuuuggggcauccaccaccccucaacuaccgccgaccaacagagcuuguaccagaaugcugaugccuacguguucgucgggacaagucgcuauucuaagaaauuuaagccugagauugcgauccgaccaaaagugcgugaccaggagggaagaaugaacuacuauuggacucugauugaacccggugauaagaucaccuucgaggcaacaggcaaccuaguggucccuagguacgccuuugcuauggaacggaaugccggguccggaauaauuaucagcgacaccccaguucaugauugcaacacgacuugucaaacaccggagggcgcaauuaauaccucgcuccccuuccagaacauccacccuaucacuauugguaaaugcccaaaguaugugaagucuacaaaacugcgccuugcuaccgggcugagaaauguacccuccauacagucaaggggauuguuuggcgccaucgcgggcuucauugaagggggauggacggguaugguggacggcugguacggguaucaucaccagaacgagcaaggaaguggcuacgccgcagaccucaagagcacccagaaugcuaucgauaaaauaacaaacaaggucaauuccgugauugagaaaaugaacacucaguuuaccgccguugguaaggaguucaaucaccuggagaagcggaucgaaaacuuaaauaaaaagguggacgauggguuccuggacaucuggacauacaacgcugagcuccuuguccuguuggaaaaugagcgcacucuagauuaucaugacucuaacgugaaaaaccuguacgagaagguacgaaaucagcucaaaaacaaugccaaggaaauuggcaacggauguuuugaguucuaucacaagugcgauaauaccuguauggaaagcguuaaaaacggcacauacgacuauccuaaguacucagaggaagcaaaacugaauagagagaagaucgauggggugaaacuugagaguaccaggauuuaucaaauacuggccaucuacuccacugucgcuagcucuuuggugcucgucgugucacugggagcgauuaguuuuuggaugugcagcaacgguuccuuacagugccggaucuguaucuga

SEQ ID NO: 138124 - RNA, 1701 nt, Artificial Sequence; identical to SEQ ID NO: 138042
  derived and/or modified CDS sequence (opt3) from hemagglutinin__InfluenzaA__AGL09825

SEQ ID NO: 138125 - RNA, 1701 nt, Artificial Sequence; identical to SEQ ID NO: 138123
  derived and/or modified CDS sequence (opt3) from hemagglutinin__InfluenzaA__AGL09826

SEQ ID NO: 138126 - RNA, 1701 nt, Artificial Sequence; identical to SEQ ID NO: 137916
  derived and/or modified CDS sequence (opt3) from hemagglutinin__InfluenzaA__AGL09827

SEQ ID NO: 138127 - RNA, 1701 nt, Artificial Sequence
  derived and/or modified CDS sequence (opt3) from hemagglutinin__InfluenzaA__AGL09828
augaagaccaucauugcccugagcuacauacucugccuuguguucgcucagaaacugcccggcaacgacaauuccacagcaacuuuguguuuagggcaccaugccgucccuaacggaacgaucguuaagaccauuacaaaugaucaaaucgaggugacuaacgcgaccgaacugguacaaaauucuucaauuggugagaucugcgacaguccacaccagauacuagauggcgaaaacuguacacucaucgacgcucugcuuggggauccgcagugcgacggauuucagaauaaaaagugggaucuguucguggagagaagcaaagccuauuccaacuguuaccccuaugacgucccugauuacgcaucuuugaggucgcucguggccucaagcggcacccuggaauuuaauaacgagaguuucaauugggcugguguuacucagaacgggacauccucugcaugcauucggggaagcaauuccucauuuuucagucgccugaacuggcucacccauuuaaauuuuaaguauccagcccugaacgugacgaugcccaacaaugagcaguucgacaaguuguacaucuggggcguccaccauccuggcacugauaaagaccagauuuuucuuuaugcucaaagcucugggcgaaucaccguguccacaaagcguucacagcaggccguaauaccaaacauuggaagcagacccaggauccggaauauuccuagucgcaucucuaucuacuggacuauuguuaaaccaggugauauacugcuaaucaacuccaccggcaaucucauugcgccgagaggguacuucaagaucaggagcggaaaaucgucuauaaugcgguccgacgcacccauuggcaaguguaagucagaaugcaucacaccuaacgguaguaucccaaaugacaaacccuuucagaacgugaaucgcauuaccuauggggccuguccucgauacgucaagcaaagcacgcugaaacuugcuacuggaaugagaaacgugccagagaagcagacaaggggcaucuucggcgccauugcaggguuuauagaaaauggaugggaggguaugguggauggcugguauggguaccggcaccagaacuccgagggacguggccaagcugccgaccugaaaucuacccaggcggccaucgaucagauuaaugguaaguugaaccgccucaucgggaaaacuaaugaaaaguuccaccagaucgagaaggaguucagcgaagucgaaggcaggauucaagaccuggagaaauauguugaggauacaaagauagacuuauggucauacaacgcagaacugcucguggcucuugagaaccagcauaccaucgaucugacggacagugaaaugaauaaauuguuugagaagaccaaaaagcagcuaagagaaaacgccgaggauaugggaaauggcugcuucaagauuuaucacaaaugugacaacgcuugcaucggguccauucggaauggaacauacgaucaugacguauaccgagacgaggcccugaacaaucgcuuucagaucaaggguguggaacucaaaagcggcuauaaggauuggauacuguggaucucuuucgcaauuucaugcuuucuucugugugucgccuugcucggguucaucaugugggcuugccaaaaaggaaacauuagauguaauaucugcauauga

SEQ ID NO: 138128 - RNA, 1701 nt, Artificial Sequence
  derived and/or modified CDS sequence (opt3) from hemagglutinin__InfluenzaA__AGL09829
augaagaccaucauugcccugagcuacauacucugccuuguguucgcucagaaacugcccggcaacgacaauuccacagcaacuuuguguuuagggcaccaugccgucccuaacggaacgaucguuaagaccauuacaaaugauagaaucgaggugacuaacgcgaccgaacugguacaaaauucuucaauuggugagaucugcgacaguccacaccagauacuagauggcgaaaacuguacacucaucgacgcucugcuuggggauccgcagugcgacggauuucagaauaaaaagugggaucuguucguggagaggagcaaagccuauuccaacuguuaccccuaugacgucccugauuacgcaucuuugcggucgcucguggccucaagcggcacccuggaauuuaauaacgagaguuucaauugggcugguguuacucaaaacgggacauccucugcaugcauucgcggaagcaauuccucauuuuucagucgacugaacuggcucacccauuuaaauuuuaaguauccagcccugaacgugacgaugcccaacaaugagcaguucgacaaacuuuacaucuggggcguccaccauccuggcacugauaaagaccagaucuuuuuguaugcucagagcucugggcguauuaccguguccacaaagagaucacaacaggccguaauaccaaacauuggaagcaggccccggauccgcaauauuccuaguagaaucucuaucuacuggacuauuguuaaaccaggugauauacugcuaaucaacuccaccggcaaucucauugcgccgaggggguacuucaagauccggagcggaaaaucgucuauaaugcgcuccgacgcacccauuggcaaguguaagucagaaugcaucacaccuaacgguaguaucccaaaugacaaacccuuucagaacgugaaucgaauuaccuauggggccuguccuagauacgucaagcagagcacgcugaaacuugcuacuggaaugaggaacgugccagagaagcaaacacggggcaucuucggcgccauugcaggguuuauagaaaauggaugggaggguaugguggauggcugguauggguuccgucaccagaacuccgagggacgcggccaggcugccgaccuggaaucuacccaagcggccaucgaucagauuaaugguaaauugaacagacucaucgggaagacuaaugagaaauuccaccagaucgaaaaggaguuuagcgaagucgagggcaggauucaggaccuggagaaguacguugaagauacaaaaauagacuuauggucauauaacgcagagcugcucguggcucuugaaaaccaacauaccaucgaucugacggacagugagaugaauaaguuguucgaaaagaccaagaaacagcuacgggagaacgccgaggauaugggaaauggcugcuuuaagauuuaccacaagugugacaacgcuugcaucggguccauucgaaauggaacauaugaucaugacguauaccgcgacgaagcccugaacaauagauuccagaucaaagguguggagcucaagagcggcuacaaagauuggauacuguggaucucuuuugcaauuucaugcuuccuucugugugucgccuugcucggguuuaucaugugggcuugccagaagggaaacauuagguguaauaucugcauauga

SEQ ID NO: 138129 - RNA, 1701 nt, Artificial Sequence; identical to SEQ ID NO: 137931
  derived and/or modified CDS sequence (opt3) from hemagglutinin__InfluenzaA__AGL09830

SEQ ID NO: 138130 - RNA, 1701 nt, Artificial Sequence; identical to SEQ ID NO: 138041
  derived and/or modified CDS sequence (opt3) from hemagglutinin__InfluenzaA__AGL09831

SEQ ID NO: 138131 - RNA, 1701 nt, Artificial Sequence
  derived and/or modified CDS sequence (opt3) from hemagglutinin__InfluenzaA__AGL09832
augaagaccaucauugcccugagcuacauacucugccuuguguucgcucagaaacugcccggcaacgacaauuccacagcaacuuuguguuuagggcaccaugccgucccuaacggaacgaucguuaagaccauuacaaaugauagaaucgaggugacuaacgcgaccgaacugguacaaaauucuucaauuggugagaucugcgacaguccacaccagauacuagauggcgaaaacuguacacucaucgacgcucugcuuggggauccgcagugcgacggauuucagaauaaaaagugggaucuguucguggagaggagcaaagccuauuccaacuguuaccccuaugacgucccugauuacgcaucuuugcggucgcucguggccucaagcggcacccuggaauuuaauaacgagaguuucaauuggacugguguuacacaaaacgggaccuccucugcuugcauucgccgaagcaauuccucauuuuucagucgucugaacuggcucacgcauagcaauuuuaaguauccagcauuaaacgugacuaugcccaacaaugagcaguucgacaagcuguacaucuggggaguccaccauccuggcaccgauaaagaccagauuuuucuuuaugcccagucuuccggcagaaucacagugucaacuaagaggagccaacaggcuguaauaccaaacauugggagucggccccgcaucagaaauauuccuucuaggaucuccaucuacuggaccauuguuaaaccaggagauauauugcugaucaacagcacagguaaucuaauugccccgcggggcuacuucaagauccgcucggggaaaucuuccauaaugcgaucagacgcgcccauuggaaaguguaagagugaaugcaucaccccuaacggcagcaucccaaaugacaaacccuuucagaacgugaauagaauuacguauggugcauguccuagguacgucaagcaguccacucucaaacuggccacagggaugcggaacgugccagagaagcaaacccguggaaucuucggcgcuauugccggcuuuauagaaaaugggugggagggaaugguggaugguugguauggcuuccgccaccagaacucugaggggagaggacaggcagcugaccuuaaaagcacucaagccgcgaucgaucagauuaauggcaagcugaacagguugaucgguaaaacaaaugaaaaguuccaccagaucgagaaggaauuuucagaggucgaagggcggauucaggaccucgagaaauacguugaggauaccaagauagaccuguggaguuauaacgccgaauuacugguggcacucgagaaccaacauacgaucgaucuuaccgacuccgaaaugaauaaacuguucgagaagacuaaaaagcaguugcgagaaaacgcugaggauaugggcaauggaugcuuuaagauuuaccacaaaugugacaacgccugcaucggcacaauucgcaaugggaccuaugaucauaacguauacagagacgaggcucuaaauaacagguuccagaucaagggaguggaacugaaaagcgguuacaaggacuggauacucuggaucucuuuugccauuucaugcuuccugcuuugugucgcacuguugggcuuuaucaugugggccugccagaaagggaauauucgguguaacaucugcauauga

SEQ ID NO: 138132 - RNA, 1701 nt, Artificial Sequence; identical to SEQ ID NO: 138042
  derived and/or modified CDS sequence (opt3) from hemagglutinin__InfluenzaA__AGL09833

SEQ ID NO: 138133 - RNA, 1701 nt, Artificial Sequence
  derived and/or modified CDS sequence (opt3) from hemagglutinin__InfluenzaA__AGL09881
augaagaccaucauugcccugagcuacauacucugccuuguguucgcucagaaacugcccggcaacgacaauuccacagcaacuuuguguuuagggcaccaugccgucccuaacggaacgaucguuaagaccauuacaaaugauagaaucgaggugacuaacgcgaccgaacugguacaaaauucuucaauuggugagaucugcgacaguccacaccagauacuagauggcgaaaacuguacacucaucgacgcucugcuuggggauccgcagugcgacggauuucagaauaaaaagugggaucuguucguggagaggagcaaagccuauuccaacuguuaccccuaugacgucccugauuacgcaucuuugcggucgcucguggccucaagcggcacccuggaauuuaauaacgagaguuucaauugggcugguguuacucaaaacggggcauccucugccugcauucgcggaagcaauuccucauuuuucagucgacugaacuggcucacacauuuaaauuuuaaguauccagcucugaacgugaccaugcccaacaaugagcaguucgacaaguuguacaucuggggcguccaccauccuggcacggauaaagaccagauuuuucuuuaugcccagagcucugggcguaucacuguguccaccaagagaucacaacaggcgguaauaccaaacauuggaagcaggccccggauccgcaauauuccuaguagaaucucuaucuacuggacaauuguuaaaccaggugauauacugcuaaucaacuccacuggcaaucucauugcaccgaggggguacuucaagauccggagcggaaaaucgucuauaaugcgcuccgacgcccccauuggcaaguguaagucagaaugcaucaccccuaacgguaguaucccaaaugacaaacccuuucagaacgugaaucgaauuacauauggggcuuguccuagauacgucaagcagagcacccugaaacuugccacgggaaugaggaacgugccagagaagcaaacucggggcaucuucggcgcaauugcuggguuuauagaaaauggaugggaggguaugguggauggcugguauggguuccgucaccagaacuccgagggacgcggccaggccgcggaccugaaaucuacacaagccgcaaucgaucagauuaaugguaaguugaacagacucaucgggaaaaccaaugaaaaguuccaccagaucgagaaggaauuuagcgaggucgaaggcaggauucaggaccuggagaaauacguugaggauacuaagauagacuuauggucauauaacgcugaacugcucguggcccuugagaaccaacauacaaucgaucugaccgacagugaaaugaauaaauuguucgagaagacgaaaaagcagcuacgggaaaacgcugaggauaugggaaauggcugcuuuaagauuuaccacaaaugugacaacgccugcaucggguccauucgaaauggaaccuaugaucaugacguauaccgcgacgaggcacugaacaauagauuccagaucaaggguguggaacucaaaagcggcuacaaggauuggauacuguggaucucuuuugccauuucaugcuuccuucugugugucgcuuugcucggguuuaucaugugggcgugccagaaaggaaacauuagguguaauaucugcauauga

SEQ ID NO: 138134 - RNA, 1701 nt, Artificial Sequence; identical to SEQ ID NO: 137906
  derived and/or modified CDS sequence (opt3) from hemagglutinin__InfluenzaA__AGL09882

SEQ ID NO: 138135 - RNA, 1701 nt, Artificial Sequence; identical to SEQ ID NO: 137883
  derived and/or modified CDS sequence (opt3) from hemagglutinin__InfluenzaA__AGL09883

SEQ ID NO: 138136 - RNA, 1701 nt, Artificial Sequence; identical to SEQ ID NO: 137883
  derived and/or modified CDS sequence (opt3) from hemagglutinin__InfluenzaA__AGL09884

SEQ ID NO: 138137 - RNA, 1683 nt, Artificial Sequence; identical to SEQ ID NO: 138036
  derived and/or modified CDS sequence (opt3) from hemagglutinin__InfluenzaA__AGL44438

SEQ ID NO: 138138 - RNA, 1701 nt, Artificial Sequence
  derived and/or modified CDS sequence (opt3) from hemagglutinin__InfluenzaA__AGN69267
augaaggccauccuggugguccuccuuuacaccuucacaacuggcaacgcugacacgcugugcauuggguaucacgcaaauaacagcaccgauacaguugacacuguguuggagaagaauguaaccgugacacauuccgucaacuuacuggaagauagacacaauggaaagcuauguaaacucagggguguggcgccccugcaucuuggcaagugcaacauagccggguggcuguugggaaauccugagugugaacuccuguuuaccgcuucuucauggaguuacaucguugagacuagcaacuccgacaauggcacaugcuauccaggugauuucauuaacuacgaagaacugcgggagcagcucucuucggugaguagcuuugaacgcuucgagaucuuuccgaaagccaguuccuggcccaaucacgaaaccaaccgaggggucacggcagccuguccuuaugcuggagcaaauucuuucuaccguaacuuaauuuggcuggugaagaagggcaauagcuauccaaaacuuuccaagucauacaucaacaacaaagagaaggagguauugguucuguggggcauacaucaucccccuacuucaaccgaccaacagagccuauaccagaaugccgaugcuuauguguuugucgggucuuccaaauacucaaagaaguucaaaccagaaaucgccacaagacccaaggugaggggacaggcgggucggaugaacuauuacuggacucucguggagccuggcgacaccauuacauuugaagcaaccgggaaucuggucguuccacgcuaugccuucgcuaugaaaagaggaagcggcagugguaucauuaucucugauacgccggugcacgacugcaacacuacaugucaaacccccaagggggccauaaauacuucccuuccuuuucagaacauucacccaguaacaaucggagagugccccaaauacgucaagagcaccaaacugaggauggcaacgggcuugcggaauauuccuucgauccagucucgcggccucuucggggcuaucgccggauuuauugaagguggcuggaccgggaugauagauggaugguauggcuaccaccaucagaacgagcaagguuccggguacgcggccgaccgaaagucaacacagaaugcaaucgauggcauuacuaacaaggugaauagugugaucgagaaaaugaacacccaguucacagcuguuggaaaggaguucaaucaccuggagaaaagaauagaaaacuuaaauaagaaaguggacgacggccugcucgaugucuggacuuauaacgccgagcuucugguguugcuagaaaacgagaggacccuggacuaccacgauagcaauguaaagaaccucuaugagaagguucggucccagcugaaaaauaacgcuaaggaaauugggaauggauguuuugaguucuaccauaaaugcgacgauacauguauggaaucugugaagaacgguaccuaugacuacccaaaauauagcgaggaagccaaacuuaaucgugaggagaucgauggcgucaagcuggaaucaacucgcaucuaccaaauuuuggcaaucuacaguacgguggccuccagccucguccuguuagugucucugggggcuauuucauuuuggaugugcaguaacggaagccuacagugcagaauauguaucuga

SEQ ID NO: 138139 - RNA, 1701 nt, Artificial Sequence
  derived and/or modified CDS sequence (opt3) from hemagglutinin__InfluenzaA__AGN69278
augaaggccauccuggugguccuccuuuacaccuucacaacugcuaacgcagacacgcugugcauuggcuaucacgccaauaacagcaccgauacaguugacacuguguuggagaagaauguaaccgugacacauuccgucaacuuacuggaagauagacacaaugggaagcuauguaaacucaggggaguggcgccccugcaucuugguaagugcaacauagcuggcuggcuguuggggaauccugagugugaacuccuguuuaccgccucuucauggaguuacaucguugagacuagcaacuccgacaauggaacaugcuauccaggcgauuucauuaacuacgaagaacugcgggagcagcucucuucggugucuagcuuugaacgcuucgagaucuuuccgaaagcaaguuccuggcccaaucacgaaccuaaccgaggugucaccgccgcuuguccauaugcaggggccaauucuuucuaccguaacuuaauuuggcuggugaagaagggaaauagcuaucccaaacuuuccaagucauacaucaacaacaaagagaaggagguauugguucuguggggcauacaucacccuccaacgaguacugaccaacagagccuauaccagaaugcugaugccuauguguuugucggcucauccaaauacaacaagaaguucaaacccgaaaucgcgaccagaccuaaggugagggggcaggcaggacggaugaauuauuacuggacacucguggagccaggugacacuauuaccuuugaagccacaggcaaccuggucguuccgcgcuaugcuuucgccaugaaaagagggucaggaagcggcaucauuaucagugauacccccgugcacgacugcaauacgacuugucaaacaccuaagggugcaauaaacaccucucuuccauuucagaauauucaucccguaacuaucggggagugcccuaaauacgugaaguccacaaaacugaggauggcuaccggauugcggaacauuccaagcauccagucgcgcggccucuucggcgccaucgcgggguuuauugaaggagguuggacgggcaugauagaugggugguauggauaccaccaucagaaugagcaaggcucugguuacgccgcagaccgaaaguccacccagaacgcuaucgaugggauuacaaauaaggucaacucagugaucgagaaaaugaauacucaguucaccgccguuggcaaggaguucaaccaccuggagaaaagaauagaaaauuuaaacaagaaaguggacgacggacugcucgaugucuggacauauaacgcugagcuucugguguugcuagaaaaugagaggacucuggacuaccacgauaguaacguaaagaaucucuaugagaagguucggagccagcugaaaaacaaugccaaggaaauuggcaacggguguuuugaguucuaccauaaaugcgacgauaccuguauggaauccgugaagaauggaacauaugacuaccccaaauauucugaggaagcaaaacuuaaccgugaggagaucgauggugucaagcuggaaagcacccgcaucuaccaaauuuuggccaucuacucaacuguggcuaguucccucguccuguuagugagccugggcgcgauuucuuuuuggaugugcucaaaugggagucuacagugcagaauauguaucuga

SEQ ID NO: 138140 - RNA, 1701 nt, Artificial Sequence
  derived and/or modified CDS sequence (opt3) from hemagglutinin__InfluenzaA__AGN69302
auggaggccaagcuguucgugcucuuuugcgcuuucaccgcacuuaaagccgacacaaucugugucggcuaccacgcgaacaauagcacugauacgguugacaccauucuggaaaagaacgugacaguaacucauuccgugaauuuguuagagaacucucacaaugggaaacugugcucacuaaacggaaagauaccccuccagcuggguaauuguaacgucgcuggcuggauccuugggaauccuaaaugcgaucuguugcucaccgccaacaguuggagcuauauuaucgaaacauccaauucuaaggacggagcauguuacccaggcgaguuugccgauuaugaagaacugaaggagcaacugucgaccgugaguagcuucgaaagauuugagauuuucccgaaagcuacuucauggcccaaccaugacacaaccagggguacgacuguugcaugcucccacucuggggccaauagcuuuuaccggaaccucuuauggaucgugaagaaaggaaauuccuauccuaagcugucaaaaaguuacaccaacaacaagggcaaggaaguccuugugauauggggcguacaucacccacccacagauagcgaccagcagacuuuguaucagaauaaccacaccuacguuucugugggguccucaaaauacuauaagcgcuucacaccugagaucgucgcucgaccaaaagugcgugagcaagccggaagaaugaauuacuauuggacccugcuagaucagggugacacgauuacuuuugaagcgacaggcaaccucaucgcacccuggcaugccuucgcucugaagaaagggagcaguucuggaauuaugauguccgaugcccaggugcacaauuguaccacuaagugccagacaccucauggcgcacuuaaagguaaccugccauuucaaaauguccacccgguuaccaucggggagugucccaaguacguaaagagcacgcaguugaggauggcuaccggacuccggaacauaccuucgauucagucucgcggccuguucggcgccaucgcgggguuuauugaaggagguuggacaggcaugguggacgggugguauggauaccaccaucagaaugagcaaggcuccgguuaugccgcagaucagaaaucaacucagaucgcuaucgacgggauuaguaacaaggugaauagcgucauagagaaaaugaacauccaauucaccuccgugggcaaggaguucaauucuuuagagaaaagaauggaaaaccugaauaagaagguugacgauggauuucucgacguguggacauacaacgccgagcuucugauuuugcuagaaaacgagaggacucuggauuuccacgaccucaaugucaaaaaccuguacgaaaaggugaaaagccagcuucggaauaacgcuaaggagaucggcaaugggugcuuugaguucuaucauaaaugugauaacgaaugcauggagucaguaaagaauggaaccuacaacuauccaaaguacagugaagaguccaaacugaaucgcgaagagauagacgguguuaaguuggagagcaugggcauucaccagauccucgccaucuauucuacaguggcaucaagucuggucuuacuggugagccuaggggccauuuccuuuuggaugugcucuaacggaucgcuccagugucgagucugcaucuga

SEQ ID NO: 138141 - RNA, 1701 nt, Artificial Sequence; identical to SEQ ID NO: 138140
  derived and/or modified CDS sequence (opt3) from hemagglutinin__InfluenzaA__AGN69314

SEQ ID NO: 138142 - RNA, 1701 nt, Artificial Sequence; identical to SEQ ID NO: 138140
  derived and/or modified CDS sequence (opt3) from hemagglutinin__InfluenzaA__AGN69326

SEQ ID NO: 138143 - RNA, 1701 nt, Artificial Sequence
  derived and/or modified CDS sequence (opt3) from hemagglutinin__InfluenzaA__AGN69338
auggaggccaagcuguucgugcucuuuugcgcuuucaccgcacuuaaagccgacacaaucugugucggcuaccacgcgaacaauagcacugauacgguugacaccauucuggaaaagaacgugacaguaacucauuccgugaauuuguuagagaacucucacaaugggaaacugugcucacuaaacggaaagauaccccuccagcuggguaauuguaacgucgcuggcuggauccuugggaauccuaaaugcgaucuguugcucaccgccaacaguuggagcuauauuaucgaaacauccaauucuaagaacggagcauguuacccaggcgaguuugccgacuaugaggaacugaaggagcaacugucgaccgugaguagcuucgaaagauuugagauuuucccgaaagcuacuucauggcccaaucaugauacaaccagggguacgacuguugcaugcucccacucuggggccaacagcuuuuaccggaaucucuuauggaucgugaagaaaggaaacuccuauccuaagcugucaaaaaguuacaccaacaauaagggcaaggaaguccuugugauauggggcguacaucacccacccacagacagcgaucagcagacuuuguaucagaacaaucacaccuacguuucugugggguccucaaaauacuauaagcgcuucacaccugagaucgucgcucgaccaaaagugcgugagcaagccggaagaaugaacuacuauuggacccugcuacaucagggugacacgauuacuuuugaagcgacaggcaaucucaucgcacccuggcacgccuucgcucugaacgaggggagcaguucuggaauuaugagguccgaugcccaggugcauaauuguaccacuaagugccagacaccucacggcgcacuuaaagguaaccugccauuucaaaauguccacccgguuaccaucggggaaugucccaaguacgugaaaagcacgcaguugcggauggcuaccggacuccgcaacauaccuucgauucagucuagaggccuguucggcgccaucgcgggguuuauugagggagguuggacaggcaugguagacgggugguauggauaccaucacaggaaugaacagggcuccgguuaugccgcagaucaaaagucaacucagaucgcuaucgacgggauuaguaacaaggugaauagcgucauagagaaaaugaacauccaguucaccuccgugggcaaggagugcaauucuuuagaaaaacggauggagaaccugaacaagaaaguugaugacggauuccucgacguguggacauacaaugccgaacuucugauuuugcuagagaacgaacgcacucuggauuuucaugaccucaaugucaagaaccuguacgagaaggugaaaagccaacuucgaaauaacgcuaaggagaucggcaauggguguuucgaauuuuaucacaaaugcgauaacgagugcauggaaucaguaaagaauggaaccuacaacuauccaaaauacagugaggaauccaagcugaauagagaggagauagacgguguuaaguuggaaagcaugggcauucaucagauccucgccaucuauucuacaguggcaucaagucuggucuuacuggugagccuaggggccauuuccuucuggauguguucuaacggaucgcuccagugcagggucuguaucuga

SEQ ID NO: 138144 - RNA, 1701 nt, Artificial Sequence
  derived and/or modified CDS sequence (opt3) from hemagglutinin__InfluenzaA__AGO00265
augaaggccagacugcucgugcuucugugcgcuaucgcagccaccgacgcggauacaauuuguauaggcuaccacgcuaacaauagcacugacacggucgauaccaucuuggagaaaaacguuacagugacucauuccguaaauuuacuggaagacucucacaacgggaagcuaugcaggcucaaaggaauugcaccccugcagcuugguaaguguaauaucgccggcuggauucuggggaacccugagugcgaaucauugcucagugagcggagcugguccuauaucguggaaaccccaaauucugagaacggaacauguuacccgggcgauuucauagacuaugaggaacugcgcgagcaacugucgucagucaccagcuuugaacgauucgagaucuuucccaaagagacaaguuggccuaagcauaauacuaccaagggugugacggccgcuugcucccacgcagggaaauguucuuucuaccguaaccucuuauggcugacugaaaaggauggaagcuauccaaaucuuaacaauuccuacguuaacaaaaagggcaaagagguguugguccuguggggcgugcaucaccccucaaauauuaaggaccagcagacccuauaucagaaggaaaacgccuacguaaguguugugagcucuaacuacaauagaagguuuacaccugagaucgcugaacggccaaaaguccgcgggcaagccggaagaaugaacuauuacuggacucuccuggagcccggugauaccauuaucuucgaggcgaauggcaaccuuauagcaccuugguaugccuuugcucuguccaggggguucggaucaggcauuaucacaagcaaugccaguaugcacgaaugcaacaccaagugucagacgccacagggugcaauuaauucuuccuugccguuucagaacauccaucccgugacuaucggggagugcccuaaauacgugcggagcacaaagcuccgcauggucaccggacugcgaaauauuccaucgauacaaucuagaggcuuauucggcgcuaucgccggguuuauugaaggagguuggacuggcaugaucgacgggugguauggauaccaccaucagaacgagcagggcuccgguuaugcggccgaucagaaaucaacacaaaaugcaauaaacgggauuaccaauaagguuaacagugugaucgagaaaaugaauacgcaguucaccgcuguaggcaaggaauuuaacaaccuggagaagaggauggaaaaucucaacaaaaagguggacgauggauuccuugacaucuggacauacaaugccgagcuguugguccuacuggaaaacgagcggacucucgacuuccacgauagcaaugugaaaaaccuguacgaaaagguuaaaucccagcuucguaauaacgcuaaggagauuggcaauggguguuuugaguucuaucacaagugcaacaaugaaugcauggagucugugaaaaacggaaccuacgacuaucccaaguacagcgaagagucaaaacugaaucgcgagaagaucgauggugucaaauuggaaaguaugggcguguaucaaauucucgccauauacuccacaguagcaagcucucugguuuuacuggugucacuaggggccaucaguuuuuggauguguagcaacggaucccuccagugcagaauuuguaucuga

SEQ ID NO: 138145 - RNA, 1701 nt, Artificial Sequence
  derived and/or modified CDS sequence (opt3) from hemagglutinin__InfluenzaA__AGO00277
augaaggccaaacugcucauccuucugugcgcuuugagcgcaaccgacgccgauacaauuuguauaggcuaccacgcgaacaauuccacugacacgguggauaccgucuuagagaagaacguuacagugacucauucuguaaaucugcuagaagacucacacaacgggaaacucugcagacugaagggaaucgcuccccuucagcuggguaaauguaauauugccggcuggaucuuggggaacccugagugcgaaagucuccugagcaagagguccuggucuuauauugcagagaccccaaauucggaaaacggaacauguuacccgggcgauuucgccgacuaugaggagcugcgggaacaacucucaagcgugaguuccuuugagcgcuucgaaaucuuucccaaggagcgaucuuggccuaaucauaacauaaauaucggugucaccgcugcaugcagccacgccgggaaauccucauucuacaagaacuuacuguggcuuacugagaaagauggaaguuauccaaauuugaacaagagcuacgugaauaaaaaggaaaaggagguucuggugcuauggggcguccaucaccccucuaacauugaaaaccagaaaacacucuaucguaaggagaaugcuuacguguccguaguuucaagcaacuacaauagaagguuuaccccugaaaucgccgagcggccaaaagugcgcggccaggcggggagaaugaacuauuacuggacgcugcuugagcccggagacacuauuaucuucgaagcaaaugguaaccugauagccccuugguaugcuuuugccuugaguaggggccucgggucuggaauuaucaccuccaaugcaagcauggaugagugugacacaaagugccagacuccacaaggcgcuauuaacucgucucugccguuccagaauauccaccccuuuaccaucggugaauguccuaaauacguccgguccacaaaguuacgcauggugaccgggcugcgaaacauuccaucaauacagaguagaggacucuucggcgccaucgcgggcuuuauugaagggggaugggccgguaugaucgauggcugguauggguaccaucaccagaaugaacaaggaagcggcuaugcagcugaccagaaauccacgcagaacgccauaaaugguauuacuaacaaggucaauucugugaucgagaagaugaacacacaguucaccgcuguugggaaagaguuuaacaaacuugaaaagaggauggagaaucugaacaagaaaguggaugacggcuucuuggacaucuggacuuacaaugccgaacuacugguacuccuggagaacgaacggacacuugauuuccaugacagcaaugugaagaaccuguacgagaaggucaaaaaucaauugcguaacaaugcaaaggagauuggaaacggcugcuuugaguucuaucacaaauguaauaacgagugcauggaaucagugaagaaugggaccuacgauuaucccaaauacagugaggaguccaagcucaaccgcgaaaagaucgacggaguuaaacuggagagcauggguguguaucagauuuuagccauauacucuacggucgcuucaagucuggugcuacucguaagccugggcgcgaucuccuuuuggaugugcucuaaugggucgcuucaguguagaauuugcaucuga

SEQ ID NO: 138146 - RNA, 1701 nt, Artificial Sequence; identical to SEQ ID NO: 129682
  derived and/or modified CDS sequence (opt3) from hemagglutinin__InfluenzaA__AGO00289

SEQ ID NO: 138147 - RNA, 1698 nt, Artificial Sequence
  derived and/or modified CDS sequence (opt3) from hemagglutinin__InfluenzaA__AGO00301
augaaggccaaacugcucauccuucugugcgcuuugagcgcaaccgacgccgauacaauuuguauaggcuaccacgcgaacaauuccacugacacgguggauaccgucuuagagaagaacguuacagugacucauucuguaaaucugcuagaagacucacacaacgggaaacucugcagacugaagggaaaagcuccccuucagcuggguaauuguaacaucgccggcuggguguuggggaauccugagugcgaaagucuccugagcaacagguccuggucuuauauugcagagaccccaaauucggaaaacggaacauguuacccgggcgauuucgccgacuaugaggagcugcgggaacaacucucaagcgucaguuccuuugagcgcuucgaaaucuuucccaaggagcgaucuuggccuaaucauaccacucguggugugacagcugcaugcccacacgccagaaagagcuccuucuacaaaaacuuaguuuggcugaccgaggcuaaugggucauaucccaaccuuaguaggagcuacgugaauaaccaggaaaaggaggucuuggugcuguggggaguacaucacccuucuaacauugaggaacagcgggcccuauaucgcaaagauaaugcguacguuuccguggucucaagcaacuacaauagaagguuuacgccagaaaucgcaaagcggcccaaagugcgcgaccagaguggccgaaugaacuauuacuggacucuccuggagccuggcgauaccauaaucuucgaggccacagggaaucuuauugcuccaugguaugccuuugcacugucuagaggaccggguuccggcaucauuacuagcaacgcucccuuggacgaaugugauaccaagugccaaacaccucagggggccaucaauucgucucucccauuccagaacauacaccccgugaccauuggagaguguccuaaguacgucagguccacgaaacugcggaugguuacuggcuuacguaauaucccaucagugcagagucgcggucuguuuggggcgauugccggauucaucgaaggcggcuggacagggaugauggacggaugguaugguuaccaucaccaaaacgagcagggcagcggguaugcagcugaucagaaguccacccagaaugccaucaacggaauuacuaauaaaguaaacucugugauagaaaagaugaauacacaauuuaccgcugucggcaaagaguucaacaagcucgagaaaagaauggaaaaccuuaauaagaagguggacgacgguuuuauggauaucuggacguacaacgccgagcuguugguucuacuggaaaaugagaggacccucgacuuccaugauagcaacgugaaaaaucuguacgaaaaggucaaaaaccagcuucggaauaacgcaaaggagcuggggaauggcugcuucgaguuuuaucacaaaugugacaacgaaugcauggagucagugaagaauggaacauacgauuaucccaaguacagugaagaguccaaauugaaccgagagaagauugacggcguaaaacucgaaagcauggggguuuaucgcauccuggccauauacucuacuguggcuucaaguuuaguccugcuagugagccucggagcgauuuccuucuggaugugcucuaaugguucgcugcaguguagaaucugcaucuga

SEQ ID NO: 138148 - RNA, 1701 nt, Artificial Sequence
  derived and/or modified CDS sequence (opt3) from hemagglutinin__InfluenzaA__AGO00313
augaagaccaucauugcccugagcuacauauucugccaggugcucgcucaaaaccuucccggcaaugacaacuccacagcaacucuguguuuggggcaccaugccgucccuaauggaacguuaguuaaaaccaucacaaacgaucagauugaggugacuaaugcgaccgaacugguacagucuucaaguacagguagaaucugcgacagcccacacaggauucuagauggcaagaacuguacccucaucgacgcucugcuuggggauccgcauugcgacggauuucagaaugagaaaugggaucuguucguggaacgguccaaggccuuuucuaacuguuaucccuacgacgucccugauuaugcaucguugcgcucacucguggccagcaguggcacucuggaguucauaaaugaagguuuuaacuggacagggguuacccaaaauggaggcuccuacgcuugcaaacgaggcccagacaacucuuucuuuagccgucugaauuggcucuauaaguccgagucaacguaccccguguuaaacgucacuaugccuaauaacgauaacuucgacaagcuguauaucuggggagugcaccauccaaguaccgauaaagagcagacaaaucuuuacguacaggcaagcgggagaguuacugugucuaccaagaggucccagcaaacaauuauccccaacgucgguucacggccuugggugcgcggcuugagcagugggauuucuaucuacuggaccauagugaaaccaggagacauucugcuaaucaauuccaacggcaaucucauugccccgagagguuauuuuaagaucaggacggggaaaagcucgaucaugcggucugacgcucccauuggaacuuguuccucagaaugcauaacaccuaacggcaguaucccaaaugauaagcccuuccagaacgucaauaagauuaccuacggcgccuguccuaaauauguuaagcagaacacucugaaacuugcgacagggaugcgcaaugugccagagaagcagacccgaggaaucuuuggugcaauagccggcuucauugaaaacgggugggagggaaugaucgacggcugguacgguuuuagacaccaaaauagcgaggggacgggccaggcugccgaucugaaauccacccaggcagcuaucgaccaaauuaacggaaaguugaauaggguaaucgagaaaacaaacgaaaaguuccaccagauugaaaaggaguucucugaaguggagggccggauacaggaucucgagaaauaugucgaagacacuaagaucgaucuguggagcuacaacgccgaguuacugguggcgcucgaaaaucagcauaccauugaccuuacagauucagagaugaacaaacuguuugaaaagacucgucgccaauugagagagaaugccgaggacauggggaacggaugcuucaaaaucuaucacaagugugauaaugcaugcaucgguaguauuaggaacggcaccuacgaccaugacguuuaccgggaugaagcucuaaauaaccgauuucagauaaaggggguggagcugaaauccggauauaaggacuggauccucuggauuagcuucgccaucucuugcuuucugcuuugugucgugcuguugggcuucauuaugugggcuugccagaaagguaauauccgcuguaacauaugcaucuga

SEQ ID NO: 138149 - RNA, 1704 nt, Artificial Sequence; identical to SEQ ID NO: 137145
  derived and/or modified CDS sequence (opt3) from hemagglutinin__InfluenzaA__AGO00325

SEQ ID NO: 138150 - RNA, 1698 nt, Artificial Sequence
  derived and/or modified CDS sequence (opt3) from hemagglutinin__InfluenzaA__AGO00337
augaaggccaaccugcucgugcuucugagcgcuuuggcagccgcggacgcugauaccaucugcauuggcuaccacgccaauaacuccacagacacugucgauacgguuuuagagaaaaaugugaccguaacacauucugugaaccugcuagaagacucacacaaugggaagcucuguagacugaaaggaauagcaccccuucagcuggguaagugcaacaucgccggcugguugcucgggaauccugagugugauccacugcugccggucaggaguuggagcuauauuguggaaacucccaacuccgagaauggaaucugcuacccuggcgacuucauugauuaugaagaacuccgggagcaauuaucuucgguuaguagcuuugaacgcuucgagaucuuuccaaaagaaaguuccuggcccaaccauaauaccaacggugugacagcugcauguucucacgagggaaagagcuccuucuaccgaaaucugcuuugguugaccgagaaggaagggucauauccuaaacugaagaacaguuacgucaauaaaaagggcaaagaggugcuaguacucuggggcauacaucacccacccaacagcaaggaacagcagaaccuguaucagaaugagaacgccuacguuucuguggucacuuccaauuacaaccguagauuuacaccugaaaucgcugagaggccaaaggugcgggaccaagccgggcgcaugaauuauuacuggacccuucugaaaccgggagauacgauuaucuucgaggcgaacgguaauuugauugcacccauguaugccuuugcucucucaagaggcuucgggagcggaaucauaacuucaaacgccucuaugcacgaaugcaauaccaagugucagacaccucugggcgcaauuaacuccagcuuaccauaccagaaugugcaucccgucacuaucggugagugcccuaaauauguuaggucggcuaagcugcggauggugaccgggcuccgcaacacaccaucuauucagucccgaggacuuuuuggcgccaucgcgggcuucaucgaagggggauggaccgguaugauugacggcugguacggguaucaccaucaaaaugagcagggaucaggcuacgccgcagaucagaaaaguacgcagaacgcuauaaaugguaucacuaacaagguaaacacagugauugagaaaaugaauauccaauuuaccgccgucgggaaggaguucaacaagcuggagaaaagaauggaaaauuugaacaagaaaguggacgauggcuuucuagacauauggacuuacaaugcugagcugcucguucugcuugaaaacgagaggacacuggacuuccacgauagcaaugugaagaacuuguaugaaaaagucaagucccagcucaagaauaacgccaaagagauuggaaauggcuguuucgaguuuuaccacaagugcgacaacgaauguauggagucugugcggaaugggaccuaugauuaccccaaauauagcgaagagucaaagcugaaccgugagaaaguagacggaguuaaguuagaaaguauggguaucuaccagauccuggcaauuuauuccacgguggccagcucucuaguccuccuggugucacuuggcgcuaucaguuucuggaugugcagcaauggguccuugcaaugccgcauuuguauauga

SEQ ID NO: 138151 - RNA, 1698 nt, Artificial Sequence; identical to SEQ ID NO: 131326
  derived and/or modified CDS sequence (opt3) from hemagglutinin__InfluenzaA__AGO00349

SEQ ID NO: 138152 - RNA, 1698 nt, Artificial Sequence
  derived and/or modified CDS sequence (opt3) from hemagglutinin__InfluenzaA__AGO00373
augaaggccaaccugcucgugcuucugugcgcuuuggcagccgcggacgcugauaccaucuguauuggcuaccacgccaauaacagcacagacacugucgauacgguuuuagagaaaaaugugaccguaacacauuccgugaaccugcuagaagacucucacaaugggaagcucugcagacugaaaggaauagcaccccuucagcuggguaaguguaacaucgccggcugguugcucgggaauccugagugcgauccacugcugccggucaggucauggaguuauauuguggaaacucccaacagcgagaauggaaucuguuacccuggcgacuucauugauuaugaagaacuccgggagcaauuauccucuguuucgucauuugaacgcuucgagaucuuuccaaaagaaagcaguuggcccgaccauaacaccaauggugugacagcugcaugcucccacgaggggaagucuagcuucuaccgaaaccugcuuugguugaccgagaaggaauccucauauccuaaacugaagaauaguuacgucaacaaaaagggaaaagaggugcuaguacucuggggcauacaucacccacccaauagcaaggaacagcagaaccuguaucagaacgagaaugccuacguuucuguggucacuuccaacuacaaucguagauuuacaccugaaaucgcugagaggccaaaggugcgggaucaagccggccgcaugaacuauuacuggacccuucugaaaccgggggacacgauuaucuucgaggcgaauggaaacuugauugcacccauguaugccuuugcucucucaagagguuucggcagcgggaucauaaccaguaaugccucuaugcacgaauguaacacuaagugccagacaccucugggagcaauuaauuccagcuuaccauaccagaacauccaucccgugacuauuggcgaguguccuaaauaugucaggucggcuaagcugcggaugguuaccggucuccgcaauaucccaucuauccagucccgagggcuuuuuggagccauugcgggcuucauagaaggcggguggacaggaaugaucgaugguugguacggcuaucaccaucaaaacgagcaggggucaggauacgccgcagaccagaaaaguacccagaaugcuauuaacggcaucacgaauaaggugaacacuguaauagagaaaaugaacauucaauuuacagccguggguaaggaguucaauaagcuggagaaaagaauggaaaacuugaauaagaaagucgaugacggguuucuagacaucuggaccuacaacgcugagcugcucgugcugcuugaaaaugagaggacucuggauuuccacgacagcaacaugaagaauuuguaugaaaaaguuaagucccagcucaagaacaaugccaaagagaucggcaacggaugcuucgaguuuuaccacaagugugauaaugaaugcauggagucugugcggaacggcacauaugacuaccccaaauauagcgaagagucaaagcugaaucgugagaaagucgauggggugaaguuagaaaguaugggaauuuaccagauccuggcaauuuauuccaccguagccagcucucuaguucuccuggugucacuuggugcuauaaguuucuggaugugcagcaacggcuccuugcaaugucgcaucugcauuuga

SEQ ID NO: 138153 - RNA, 1698 nt, Artificial Sequence
  derived and/or modified CDS sequence (opt3) from hemagglutinin__InfluenzaA__AGO00385
augaaggccaaccugcucgugcuucugugcgcuuuggcagccgcggacgcugauaccaucuguauuggcuaccacgccaauaacagcacagacacugucgauacgguuuuagagaaaaaugugaccguaacacauuccgugaaccugcuagaagacucucacaaugggaagcucugcagacugaaaggaauagcaccccuucagcuggguaaguguaacaucgccggcugguugcucgggaauccugagugcgauccacugcugccggucggaucauggaguuauauuguggaaacucccaacagcgagaauggcaucuguuacccuggugacuucauugauuaugaagaacucagggagcaauuauccucuguuucgucauuugaacgguucgagaucuuuccaaaagaaagcaguuggcccgaccauaacaccaauggggugacagcugcaugcucccacgagggaaagucuagcuucuaccgcaaccugcuuugguugaccgagaaggaauccucauauccuaaacugaagaauaguuacgucaacaaaaagggcaaagaggugcuaguacucuggggcauacaucacccacccaauagcaaggaacagcagaaccuguaucagaacgagaaugccuacguuucuguggucacuuccaacuacaaucgacguuuuacaccugaaaucgcugagagaccaaaggugagggaucaagccgggcggaugaacuauuacuggacccuucugaaaccgggagacacgauuaucuucgaggcgaaugguaacuugauugcacccauguaugccuuugcucucucacgcggcuucgggagcggaaucauaaccaguaaugccucuaugcacgaauguaacacuaagugccagacaccucugggcgcaauuaauuccagcuuaccauaccagaacauccaucccgugacuauuggugaguguccuaaauaugucagaucggcuaagcugaggaugguuaccgggcuccggaauaucccaucuauccagucccgcggacuuuuuggcgccauugcgggcuucauagaagggggauggacagguaugaucgauggcugguacggguaucaccaucaaaacgagcagggaucaggcuacgccgcagaccagaaaaguacccagaaugcuauuaacgguaucacgaauaaggugaacacuguaauagagaaaaugaacauucaauuuacagccguggggaaggaguucaauaagcuggagaaacgaauggaaaacuugaauaagaaagucgaugacggcuuucuagacaucuggaccuacaacgcugagcugcucgugcugcuugaaaaugagagaacucuggauuuccacgacagcaacguuaagaauuuguaugaaaaagugaagucccagcucaagaacaaugccaaagagaucggaaacggcugcuucgaguuuuaccacaagugugauaaugaaugcauggagucugucaggaacgggacauaugacuaccccaaauauagcgaagagucaaagcugaaucgggagaaaguggauggaguaaaguuagaaaguauggguauuuaccagauccuggcaauuuauuccaccguugccagcucucuagugcuccuggucucacuuggcgcuauaaguuucuggaugugcagcaacggguccuugcaaugucguaucugcauuuga

SEQ ID NO: 138154 - RNA, 1698 nt, Artificial Sequence
  derived and/or modified CDS sequence (opt3) from hemagglutinin__InfluenzaA__AGO00397
augaaggccaaccugcucgugcuucugugcgcuuuggcagccgcggacgcugauaccaucuguauuggcuaccacgccaauaacagcacagacacugucgauacgguuuuagagaaaaaugugaccguaacacauuccgugaaccugcuagaagacucucacaaugggaagcucugcagacugaaaggaauagcaccccuucagcuggguaaguguaacaucgccggcugguugcucgggaauccugagugcgauccacugcugccggucggaucauggaguuauauuguggaaacucccaacagcgagaauggcaucuguuacccuggugacuucauugauuaugaggaacucagggagcaauuauccucuguuucgucauuugaacgguucgagaucuuuccaaaagaaagcaguuggcccgaccauaacaccaauggggugacagcugcaugcucccacgagggaaagucuagcuucuaccgcaaccugcuuugguugaccgagaaggaauccucauauccuaaacugaagaauaguuacgucaacaaaaagggcaaagaggugcuaguacucuggggcauacaucacccacccaauagcaaggaacagcagaaccuguaucagaacgagaaugccuacguuucuguggucacuuccaacuacaaucgacguuuuacaccugaaaucgcugagagaccaaaggugaaagaucaagccgggaggaugaacuauuacuggacccuucugaagccgggagacacgauuaucuucgaggcgaaugguaacuugauugcacccauguaugccuuugcucucucacggggcuucgggagcggaaucauaaccaguaaugccucuaugcacgaauguaacacuaaaugccagacaccucugggcgcaauuaauuccagcuuaccauaccagaacauccaucccgugacuauuggugaguguccuaaguauguccgcucggcuaaacugagaaugguuaccgggcucaggaauaucccaucuauccagucccggggacuuuuuggcgccauugcgggcuucauagaagggggauggacagguaugaucgauggcugguacggguaucaccaucaaaacgagcagggaucaggcuacgccgcagaccagaagaguacccagaaugcuauuaacgguaucacgaauaaagugaacacuguaauagaaaagaugaacauucaauuuacagccguggggaaggaguucaauaaacuggagaagcgcauggaaaacuugaauaaaaaggucgaugacggcuuucuagacaucuggaccuacaacgcugagcugcucgugcugcuugaaaaugagcgaacucuggauuuccacgacagcaacguuaaaaauuuguaugaaaaggugaagucccagcucaaaaacaaugccaaggagaucggaaacggcugcuucgaguuuuaccacaaaugugauaaugaaugcauggagucugucagaaacgggacauaugacuaccccaaguauagcgaagagucaaaacugaauagggagaagguggauggaguaaaguuagaaaguauggguauuuaccagauccuggcaauuuauuccaccguugccagcucucuagugcuccuggucucacuuggcgcuauaaguuucuggaugugcagcaacggguccuugcaaugucggaucugcauuuga

SEQ ID NO: 138155 - RNA, 1698 nt, Artificial Sequence
  derived and/or modified CDS sequence (opt3) from hemagglutinin__InfluenzaA__AGO00409
augaaggccaaccugcucgugcuucugugcgcuuuggcagccgcggacgcugauaccaucuguauuggcuaccacgccaauaacagcacagacacugucgauacgguuuuagagaaaaaugugaccguaacacauuccgugaaccugcuagaagacucucacaaugggaagcucugcagacugaaaggaauagcaccccuucagcuggguaaguguaacaucgccggcugguugcucgggaauccugagugcgauccacugcugccggucggaucauggaguuauauuguggaaacucccaacagcgagaauggcaucuguuacccuggugacuucauugauuaugaggaacucagggagcaauuauccucuguuucgucauuugaacgguucgagaucuuuccaaaagaaagcaguuggcccgaccauaacaccaauggggugacagcugcaugcucccacgagggaaagaacucuuucuaccgcaaucugcuuugguugaccgagaagaaaagcuccuauccugaacugaagaacucauacgucaauaaaaagggcaaagaggugcuaguacucuggggcauacaucacccacccaacaguaaggaacagcagaaccuguaucagaaugagaacgccuacguuagcguggucacuucuaauuacaaccgacguuuuacaccugaaaucgcugagagaccaaaggugaaagaucaagccgggaggaugaauuauuacuggacccuucugaagccgggagacacgauuaucuucgaggcgaacgguaauuugauugcacccauguaugccuuugcucucucccggggcuucgggucaggaaucauaacuagcaacgccaguaugcacgaauguaauaccaaaugccagacaccucugggcgcaauuaacucuuccuuaccauaccagaauauccaucccgugacuauuggugaguguccuaaguauguccgcagcgcuaaacugagaaugguuaccgggcucaggaacaucccaucgauccagucucggggacuuuuuggcgccauugcgggcuucauagaagggggauggacagguaugaucgauggcugguacggguaucaccaucaaaaugagcagggauccggcuacgccgcagaccagaagucaacccagaacgcuauuaaugguaucacgaacaaagugaacacuguaauagaaaagaugaauauucaauuuacagccguggggaaggaguucaacaaacuggagaagcgcauggaaaauuugaacaaaaaggucgaugacggcuuucuagacaucuggaccuacaaugcugagcugcucgugcugcuugaaaacgagcgaacucuggauuuccacgacaguaauguuaaaaacuuguaugaaaaggucaagagccagcucaaaaauaacgccaaggagaucggaaauggcugcuucgaguuuuaccacaaaugugauaacgaaugcauggaguccgugagaaaugggacauaugacuaccccaaguauucugaagagagcaaacugaacagggagaagguggauggaguaaaguuagaaucaauggguauuuaccagauccuggcaauuuauaguaccguugccuccagccuagugcuccuggucucucuuggcgcuauaucauucuggaugugcaguaaugggagcuugcaaugucggaucugcauuuga

SEQ ID NO: 138156 - RNA, 1698 nt, Artificial Sequence
  derived and/or modified CDS sequence (opt3) from hemagglutinin__InfluenzaA__AGO00421
augaaggccaaccugcucgugcuucugugcgcuuuggcagccgcggacgcugauaccaucuguauuggcuaccacgccaauaacagcacagacacugucgauacgguuuuagagaaaaaugugaccguaacacauuccgugaaccugcuagaagacucucacaaugggaagcucugcaaacugaagggaauagcaccccuucagcuggguaaauguaacaucgccggcugguugcucgggaauccuggaugcgauccacugcugccggucggcucauggaguuauauuguggagacucccaacagcgaaaaugguaucuguuacccuggggacuucauugauuaugaggaacucagagagcaauuauccucuguuucgucauuugagagguucaagaucuuuccaaaggaaagcaguuggcccgaccauaacaccacaggagugaccgcugcaugcucccacgagggcaaaaauucuuucuaccggaaccugcuuugguugacuaagaaagaaagcuccuauccugagcugaagaauagcuacgucaacaaaaagcgcaaggaggugcuaguacucuggggcauacaucacccacccaauaguaaagaacagcagaaccuguaucagaacgagaaugccuacguuagcguggucacaucuaacuacaaucgacguuuuaccccugaaaucgcugagagaccaaaggugaaagggcaagccggaaggaugaacuauuacuggacgcuucugaagccgggugauacuauuaucuucgaagcgaauggcaacuugauugcacccauguaugccuuugcucucucccggggguucggaucaggcaucauaaccagcaaugccaguaugcacgaguguaacacaaaaugccagacuccucugggugcaauuaauucuuccuuaccauaccagaacauccaucccgugaccauuggggaguguccuaaguauguccgcagcgcuaaacugagaaugguuacaggacucaggaauaucccaucgauccagucucggggccuuuuuggcgccauugcgggguucauagaaggagguuggaccggcaugaucgacgggugguacggauaucaccaucaaaacgagcagggcuccgguuacgccgcagaucagaagucaacgcagaaugcuauuaacgggaucacuaauaaggugaacacaguaauagaaaagaugaacauucaauuuaccgccgugggcaaggaguucaauaaacuggaaaagcgcauggagaacuugaauaaaaaggucgacgauggauuucuagacaucuggacuuacaacgcugagcugcucgugcugcuugaaaaugagcgaacacuggacuuccacgauaguaacguuaagaauuuguaugaaaaagugaaaagccagcucaaaaacaaugccaaggagaucggcaacgggugcuucgaauuuuaccacaaaugugacaaugagugcauggaguccgucagaaacggaaccuaugauuaccccaaguauucugaagagagcaagcugaauagggaaaaaguggacgguguaaaguuagagucaaugggcauuuaccagauccuggcaauuuauaguacgguugccuccagccuagugcuccuggucucucuuggggcuauaucauucuggaugugcaguaacggaucauugcaaugucggaucugcauuuga

SEQ ID NO: 138157 - RNA, 1698 nt, Artificial Sequence
  derived and/or modified CDS sequence (opt3) from hemagglutinin__InfluenzaA__AGO00433
augaaggccaaccugcucgugcuucugugcgcuuuggcagccgcggacgcugauaccaucuguauuggcuaccacgccaauaacagcacagacacugucgauacgguuuuagagaaaaaugugaccguaacacauuccgugaaccugcuagaagacucucacaaugggaagcucugcagacugaaaggaauagcaccccuucagcuggguaaguguaacaucgccggcugguugcucgggaauccugagugcgauccacugcugccggucaggucauggaguuauauuguggaaacucccaacagcgagaauggaaucuguuacccuggcgacuucauugauuaugaggagcuccgggagcaauuauccucuguuucgucauuugaacgcuucgagaucuuuccaaaagaaagcaguuggcccaaccauaauaccaacggugugacagcugcaugcucccacgaggggaagucuagcuucuaccgaaaucugcuuugguugaccgagaaggaaggauccuauccuaaacuggagaacucauacgucaauaagaaaggcaaggaagugcuaguacucuggggcauacaucacccacccaacaguaaagagcagcagaaccuguaucagaaugaaaacgccuacguuagcguggucacuucuaauuacaaccguagauuuacaccugagaucgcugagaggccaaaggugcgggaccaagccgggcgcaugaauuauuacuggacccuucugaagccgggagauacgauuaucuucgaagcgaacgguaauuugauugcacccauguaugccuuugcucucuccagaggcuucgggucaggaaucauaacuagcaacgccaguaugcacgaguguaauaccaaaugccagacaccucugggcgcaauuaacucuuccuuaccauaccagaauauccaucccgugacuauuggugaauguccuaaguaugucaggagcgcuaaacugcggaugguuaccgggcuccgcaacaucccaucgauccagucucgaggacuuuuuggcgccauugcgggcuucauagaagggggauggacagguaugaucgacggcugguacggguaucaccaucaaaaugaacagggauccggcuacgccgcagaucagaagucaacccagaacgcuauuaaugguaucacgaacaaagugaacacuguaauagagaagaugaauauucaauuuacagccguggggaaagaguucaacaagcuggaaaagagaauggagaauuugaacaaaaaggucgacgauggcuuucuagacaucuggaccuacaaugcugaacugcucgugcugcuugagaacgaaaggacucuggacuuccacgauaguaauguuaaaaacuuguaugagaaggugaaaagccagcucaagaauaacgccaaggagaucggaaauggcugcuucgaauuuuaccacaaaugugacaacgagugcauggaauccguccggaaugggacauaugauuaccccaaguauucugaggagagcaaacugaaccgugaaaagguggacggaguaaaauuagagucaauggguauuuaccagauccuggcaauuuauaguaccguugccuccagccuagugcuccuggucucucuuggcgcuauaucauucuggaugugcaguaaugggagcuugcaaugucgcaucugcauuuga

SEQ ID NO: 138158 - RNA, 1698 nt, Artificial Sequence
  derived and/or modified CDS sequence (opt3) from hemagglutinin__InfluenzaA__AGO00445
augaaggccaaccugcucgugcuucugugcgcuuuggcagccgcggacgcugauaccaucuguauuggcuaccacgccaauaacagcacagacacugucgauacgguuuuagagaaaaaugugaccguaacacauuccgugaaccugcuagaagacucucacaaugggaagcucugcagacugaaaggaauagcaccccuucagcuggguaaguguaacaucgccggcugguugcucgggaauccugagugcgauccacugcugccggucaggucauggaguuauauuguggaaacucccaacagcgagaauggaaucuguuacccuggcgacuucauugauuaugaggaacuccgggagcaauuauccucuguuucgucauuugaacgcuucgagaucuuuccaaaagaaagcaguuggcccaaccauaauaccaacggugugacagcugcaugcucccacgaggggaagucuagcuucuaccgaaaucugcuuugguugaccgagaaggaaggauccuauccuacucugaaaaacucauacgucaauaagaaaggcaaggaggugcuaguacucuggggcauacaucacccacccaacaguaaagaacagcagaaccuguaucagaaugagaacgccuacguuagcguggucacaucuaauuacaaccguagauuuaccccugaaaucgcugagaggccaaaggugcgggaccaagccgggcgcaugaauuauuacuggacgcuucugaagccgggagauacuauuaucuucgaggcgaacgguaauuugauugcacccauguaugccuuugcucucuccagaggcuucgggucaggaaucauaaccagcaacgccaguaugcacgaauguaauacaaaaugccagacuccucugggcgcaauuaacucuuccuuaccauaccagaauauccaucccgugaccauuggugaguguccuaaguaugucaggagcgcuaaacugcggaugguuacagggcuccgcaacaucccaucgauccagucucgaggacuuuuuggcgccauugcgggcuucauagaagggggauggaccgguaugaucgacggcugguacggguaucaccaucaaaaugagcagggauccggcuacgccgcagaucagaagucaacgcagaacgcuauuaaugguaucacuaacaaagugaacacaguaauagaaaagaugaauauucaauuuaccgccguggggaaagaguucaacaagcuggagaagagaauggaaaauuugaacaaaaaggucgacgauggcuuucuagacaucuggacuuacaaugcugagcugcucgugcugcuugaaaacgagaggacacuggacuuccacgauaguaauguuaaaaacuuguaugaaaaggugaaaagccagcucaagaauaacgccaaggagaucggaaauggcugcuucgaguuuuaccacaaaugugacaacgaaugcauggaguccguccggaaugggaccuaugauuaccccaaguauucugaagagagcaaacugaaccgugagaagguggacggaguaaaauuagaaucaauggguauuuaccagauccuggcaauuuauaguacgguugccuccagccuagugcuccuggucucucuuggcgcuauaucauucuggaugugcaguaaugggagcuugcaaugucgcaucugcauuuga

SEQ ID NO: 138159 - RNA, 1701 nt, Artificial Sequence
  derived and/or modified CDS sequence (opt3) from hemagglutinin__InfluenzaA__AGO02696
augaaggccauccugguggucaugcucuacaccuucgcuacagcaaacgccgacacucuuugcauuggcuaucacgcgaauaacagcacggauaccguugacacagugcuggagaaaaauguaacugugacccauuccgucaacuuguuagaagauaagcacaaugggaaacuguguaagcuaagaggaguggcuccccuccaucuggguaaaugcaacauagccggcuggauccuugggaauccugagugugaaucucugucaacagcaaguagcugguccuacauuguugagaccucuucgucagacaacggaacuugcuauccaggcgauuuuaucgacuacgaagaguugagggagcagcucagcaguguguccucuuucgaacgguuugagauuuucccgaagacaagcuccuggcccaaucacgauucaaacaagggugucaccgccgcuuguccucaugcaggggccaaaggauuuuauaagaaucugaucuggcuggugaaaaagggcaacaguuacccaaaacucagcauaucuuauaucaaugacaagggcaaggaaguauuaguucugugggggauucaccaccccuccacgacugcugaucaacagucacuuuaccagaacgccgacaccuacguguucgucggaacaagccgcuauaguaaaaaguuuaaaccugagaucgcgauucgaccaaaggugcgugaucaggaggguagaaugaauuacuauuggacuuugguggaacccggcgacaaaaucaccuucgaggcaacagggaaccuggucguuccuagguacgccuuugcuauggaacggaacgccggaucuggcauaauuaucuccgauaccccagugcaugacugcaauacgacuugucaaacaccgaagggugcaauuaacaccagccuacccuuccagaauauccacccuaucacuauugggaaaugcccaaaguauguaaagucgacaaaacuccgccuggcuaccggacuuagaaacgugcccucuauacaguccaggggccuguuuggcgccaucgcgggguucauugagggagguuggacgggcauggucgacgggugguacggauaucaucaccagaaugaacaaggcucagguuacgccgcagauuugaagaguacccagaacgcuaucgacaaaauaacaaauaaggugaacagcguuauugagaaaaugaauacucaguuuaccgccguggggaaggaguucaaccaccucgaaaagcggaucgagaaucugaacaaaaaggucgaugacggcuucuuagauaucuggacauacaaugcugaacugcucgugcuucuggagaacgaacgcacuuuggacuaucaugauuccaauguuaaaaaccuauacgagaagguacgaaaccagcugaaaaauaacgccaaggagauuggaaauggcuguuuugaguucuaucacaagugcgacaacaccuguauggaaucugugaaaaaugggacauacgauuauccuaaguacagcgaagaggcaaaacucaacagagaagagaucgacggagucaagcuggagucaaccaggauuuaucaaauacuugccaucuacaguacugcugcguccagccugguguuggucgugucucucggugcaauuucauuuuggaugugcaguaauggcagccugcagugccggaucuguaucuga

SEQ ID NO: 138160 - RNA, 1701 nt, Artificial Sequence; identical to SEQ ID NO: 138088
  derived and/or modified CDS sequence (opt3) from hemagglutinin__InfluenzaA__AGO02697

SEQ ID NO: 138161 - RNA, 1701 nt, Artificial Sequence; identical to SEQ ID NO: 137906
  derived and/or modified CDS sequence (opt3) from hemagglutinin__InfluenzaA__AGO02698

SEQ ID NO: 138162 - RNA, 1701 nt, Artificial Sequence; identical to SEQ ID NO: 137906
  derived and/or modified CDS sequence (opt3) from hemagglutinin__InfluenzaA__AGO02699

SEQ ID NO: 138163 - RNA, 1701 nt, Artificial Sequence
  derived and/or modified CDS sequence (opt3) from hemagglutinin__InfluenzaA__AGO02700
augaaggccauccuggugguccuccuuuacaccuucgcuacagcaaacgccgacacucugugcauuggcuaucacgcgaauaacagcacggauaccguugacacaguguuggagaaaaauguaacugugacccauuccgucaacuuacuggaagauaagcacaaugggaaacuauguaagcucagaggaguggcuccccugcaucuugguaaaugcaacauagccggcuggauccuggggaauccugagugugaaucuuugucaacagcaaguagcugguccuacauuguugagaccucuucgucagacaacggaacuugcuauccaggcgauuuuaucaauuacgaggagcucagggagcagcugagcaguguguccucuuucgaacgguuugagauuuucccgaagacaagcuccuggcccaaccacgacucaaauaagggugucaccgccgcuuguccucaagcaggggccaaaaguuuuuauaagaaccugaucuggcucgugaaaaagggaaauagcuacccaaaauuaucuaaguccuauauaaacgauaagggcaaagaaguacugguucuuuggggcauccaucaccccucaacgagcgcugaccagcagaguuuguaccagaaugccgaugcguacguguucgucgggacuucuaaguauuccaaaaaguuuaaaccugagauugcagugcgcccaaaggugcgagaccaagagggacguaugaacuacuauuggacccuggucgaacccggugauaaaaucacauucgaggccacuggcaaccuacucguuccuagauacgcuuuugccauggaaaggaaugcagggagcggaauuaucauaucggacaccccagugcacgauugcaacacaaccugucagacgccgaagggcgcuauuaauacuucucugcccuuccagaacauccauccuauuacaaucgguaagugcccaaaauauguaaaguccaccaaacuucggcuggccacuggguugcgcaaugugcccucaauccagaguagaggacucuuuggcgcgauugccggcuucauagaagggggauggacagguauggucgacggcugguacggguaucaccaucaaaacgcacagggaagcggcuacgcugccgaccugaaguccacccagaaugcuaucgauaaaauuacgaacaagguaaauucuguuaucgaaaagaugaacacccaguuuacagccguggguaaagaguucaaucacuuagagaagaggauagaaaaccugaauaaaaaggucgacgauggguuccucgacauuuggacuuacaacgcagagcuucugguguugcuagaaaaugagcggacccuggauuaucacgacagcaacgugaaaaaccucuacgaaaagguucgcucacaacugaagaauaacgccaaagagaucggcaauggauguuuugaguucuaucauaagugcgauaacacauguauggaaagugugaaaaauggcacuuacgacuauccucgauacuccgaggaagcuaaacuuaacagagaggaaaucgaugggauuaagcuggagagcaccaggaucuaucagauuuuggcgauauacucuacagucgcaucaagucucgugcugaucgucagcuuaggagccauuuccuuuuggaugugcucuaaugguucgcugcagugccggaucuguaucuga

SEQ ID NO: 138164 - RNA, 1701 nt, Artificial Sequence
  derived and/or modified CDS sequence (opt3) from hemagglutinin__InfluenzaA__AGO02701
augaaggccauccuggugguccuccuuuacaccuucgcuacagcaaacgccgacacucugugcauuggcuaucacgcgaauaacagcacggauaccguugacacaguguuggagaaaaauguaacugugacccauuccgucaacuuacuggaagauaagcacaaugggaaacuauguaagcucagaggaguggcuccccugcaucuugguaaaugcaacauagccggcuggauccuggggaauccugagugugaaucuuugucaacagcaaguagcugguccuacauuguugagaccucuucgucagacaacggaacuugcuauccaggcgauuuuaucaauuacgaggagcucagggagcagcugagcagugugucccacuucgaacgguuugagauuuucccgaagacaucuagcuggcccaaccaugacuccaauaagggugucaccgccgcuuguccucacgcaggggccaaaucauuuuauaagaaccugaucuggcucgugaaaaagggaaauaguuacccaaaauuaagcaagucuuauauaaacgauaagggcaaagaaguacugguucuuuggggcauccaccaucccuccacgucagcugaccaacagagcuuguaccagaaugccgaugcguacguguucgucgggacuagcaaguauucuaaaaaguuuaaaccugagauugcagugcgcccaaaggugcgagaccaggagggacguaugaacuacuauuggacccuggucgaacccggugauaaaaucacauucgaggccacuggcaaccuacucguuccuagauacgcuuuugccauggaaaggaaugcaggguccggaauuaucauaagcgacaccccagugcacgauugcaacacaaccugucaaacgccgaagggcgcuauuaauacuucgcugcccuuccagaacauccauccuauuacaaucgguaagugcccaaaauauguaaagucuaccaaacuucggcuggccacuggguugcgcaaugugcccuccauccagucaagaggacucuuuggcgcgauugccggcuucauagaagggggauggacagguauggucgacggcugguacggguaucaccaccagaacggacaaggcagugguuacgcagcugacuuaaagagcacccagaaugccaucgauaaaauuacgaacaagguaaauuccguuaucgaaaagaugaacacccaguuuacagcuguggggaaagaguucaaucaucuggagaagaggauagaaaaccugaauaaaaaggucgacgauggcuuccucgacauuuggacuuacaacgccgagcuucugguguugcuagaaaaugagcggacccuggauuaucacgacucuaacgugaaaaaccucuacgaaaagguucgcagccagcugaagaauaacgcaaaagagaucggaaauggcuguuuugaguucuaucauaagugcgauaacacauguauggaaucagugaaaaaugggacuuacgacuauccuaaguacagugaggaagccaaacuuaaccgagaggaaaucgauggagucaagcuggaguccaccagaauuuaucaaaucuuggcuauuuacagcacaguggcgucuucacucguccuggugguuaguuuaggugcaauaaguuuuuggaugugcuccaauggcucucugcagugcaggaucuguauuuga

SEQ ID NO: 138165 - RNA, 1683 nt, Artificial Sequence; identical to SEQ ID NO: 138036
  derived and/or modified CDS sequence (opt3) from hemagglutinin__InfluenzaA__AGO51374

SEQ ID NO: 138166 - RNA, 1701 nt, Artificial Sequence
  derived and/or modified CDS sequence (opt3) from hemagglutinin__InfluenzaA__AGO86686
augaagaccaucauugcccugagcuacauacucugccuugcuuucgcacagaaacugcccggcaacgacaauuccacagccacuuuguguuuagggcaccaugcggugccuaacggaacgcuggucaagaccaucacaaaugaucaaauugagguuacuaacgcuaccgagcuagugcagucuucaaguacagguagaaucugcgacagcccacaccagauucucgauggcgaaaauuguacccugaucgacgcccuucugggggauccgcauugcgacggauuucagaacaaagaaugggauuuguucguagagagguccaaggcauauucuaauuguuaccccuaugacgugccugauuacgccucgcuccggucacuggucgcuagcaguggcacucuggaauuuaacaaugaguccuucaacuggacagguguggcacaaaaugggaccucuagcgccugcaaacgccgauccauaaagucauuuuucagucgucucaacugguuacaccagcuggagaauagauauccagcucuuaacguuacgaugcccaauaacgacaaguuugauaaauuguacaucuggggagugcaucacccuagcacugacucugaucagauuuccgucuaugcccaggcgucaggcagggugaccguaagcacaaagcggagucaacagacuguuaucccaaacauuggcucucgccccugggugagagggaucuccagcaggauaucgauuuacuggaccaucgucaaaccuggagacauucugcuaaucaauucuacagguaaccucaucgcaccacggggcuacuucaagauucgcuccgggaaaucaaguauaaugcgaagcgacgccccgaucggaaaguguaauuccgaaugcauuacccccaacggcucuaucccuaaugauaagccauuucagaacgugaauagaauaacguauggugcuugucccagguacgugaaacagaacacucugaaacuugccacagggaugcggaaugucccugagaaacaaacccguggaauuuucggcgcaaucgcuggcuuuaucgaaaacgggugggagggaaugauggacgguugguauggcuuccgccaccagaauagcgaggggacuggacaggccgcggaucugaagucaacacaagccgcaauuaaccagaucaauggcaaauugaacaagcucauugaaaagaccaaugagaaguuucaucagauagaaaaggaguucagugaaguugaggguagaauccaggaccuggagaaauacguggaagauacgaagauugacuuaugguccuauaacgcugagcugcucguagcccuugaaaaccaacacaccaucgaucugacagacagcgagaugaauaaauuguucgaaaggacucggaagcagcuacgagagaacgcugaggauauggggaauggcugcuuuaaaaccuaccauaagugugacaacgccugcaucggaucuauucgcaauggcacauaugaucacgacguguacagagacgaagcacugaacaauagguuccagauaaagggggucgagcucaaaucaggauacaaggauuggauccuguggauuaguuuugccaucagcugcuuccuucugugugugguuuugcucgguuuuauuaugugggcuugccagaaaggcaacauccgguguaauauaugcaucuga

SEQ ID NO: 138167 - RNA, 1701 nt, Artificial Sequence; identical to SEQ ID NO: 138088
  derived and/or modified CDS sequence (opt3) from hemagglutinin__InfluenzaA__AGQ16240

SEQ ID NO: 138168 - RNA, 1701 nt, Artificial Sequence; identical to SEQ ID NO: 138088
  derived and/or modified CDS sequence (opt3) from hemagglutinin__InfluenzaA__AGQ16241

SEQ ID NO: 138169 - RNA, 1701 nt, Artificial Sequence
  derived and/or modified CDS sequence (opt3) from hemagglutinin__InfluenzaA__AGQ16242
augaaggccauccuggugguccuccuuuacaccuucgcuacagcaaacgccgacacucugugcauuggcuaucacgcgaauaacagcacggauaccguugacacaguguuggagaagaauguaacugugacccauuccgucaacuuacuggaagauaagcacaaugggaaacuauguaagcucagaggaguggcuccccugcaucuugguaaaugcaacauagccggcuggauccuggggaauccugagugugaaucuuugucaacagcaaguagcugguccuacauuguugagaccucuucgucagacaacggaacuugcuauccaggcgauuuuaucaauuacgaagaacucagggagcagcugagcaguguguccucuuucgaacgguuugagauuuucccgaagacaagcuccuggcccaaccacgacucaaauaagggugucaccgccgcuuguccucaugcaggggccaaaaguuuuuauaagaaccugaucuggcucgugaaaaagggaaauagcuacccaaaauuaucuacguccuauauaaacgauaagggcaaggaaauccugguacuuuggggcauucaccaccccucaacuaccgcugaccaacagagcuuguaccagaaugccgaugcguacguuuucguggggacaagucgcuauucuaaaaaguuuaaaccugagaucgcaauucgaccaaagguccgugaccaggagggaagaaugaacuacuauuggacucugguggaacccggugauaaaaucaccuucgaggccacaggcaaccuaguggucccuagguacgcuuuugccauggaacggaaugcaggguccggaauaauuaucagcgacaccccaguucaugauugcaacacgacuugucaaacaccggagggcgcuauuaauaccucgcuccccuuccagaacauccacccuaucacuauugguaagugcccaaaauaugugaagucuacaaagcugcgccuugccaccgggcugagaaauguacccuccauacagucaaggggauuguuuggcgcgaucgccggcuucauugaagggggauggacggguaugguggacggcugguacggguaucaucaccagaacgagcaaggaaguggcuacgcagcugaccucaaaagcacccagaaugccaucgauaagauaacaaacaaagucaauuccgugauugagaagaugaacacucaguuuaccgcuguugguaaagaguucaaucaccuggagaagcggaucgaaaacuuaaauaagaaaguggacgauggguuccuggacaucuggacauacaacgccgagcuccuuguccuguuggaaaaugagcgcacucuagauuaucaugacucuaacgugaagaaccuguacgagaaaguacgaaaucagcucaagaacaaugcaaaagaaauuggcaacggauguuuugaguucuaucacaagugcgauaauaccuguauggaaagcguuaagaacggcacauacgacuauccuaaauacucagaggaagccaagcugaauagagagaaaaucgauggggugaaacuugagaguaccaggauuuaucaaauacuggcuaucuacuccacugucgcgagcucuuuggugcucgucgugucacugggagcaauuaguuuuuggaugugcagcaacgguuccuuacagugccggaucuguaucuga

SEQ ID NO: 138170 - RNA, 1701 nt, Artificial Sequence; identical to SEQ ID NO: 138108
  derived and/or modified CDS sequence (opt3) from hemagglutinin__InfluenzaA__AGQ16243

SEQ ID NO: 138171 - RNA, 1701 nt, Artificial Sequence
  derived and/or modified CDS sequence (opt3) from hemagglutinin__InfluenzaA__AGQ16245
augaaggccauccuggugguccuccuuuacaccuucgcuacagcaaacgccgacacucugugcauuggcuaucacgcgaauaacagcacggauaccguugacacaguguuggagaaaaauguaacugugacccauuccgucaacuuacuggaagauaagcacaaugggaaacuauguaagcucagaggaguggcuccccugcaucuugguaaaugcaacauagccggcuggauccuggggaauccugagugugaaucuuugucaacagcaaguagcugguccuacauuguugagaccucuucgucagacaacggaacuugcuauccaggcgauuuuaucaauuacgaagaacucagggagcagcugagcaguguguccucuuucgaacgguuugagauuuucccgaagacaagcuccuggcccaaccacgacucaaauaagggugucaccgccgcuuguccucaugcaggggccaaaaguuuuuauaagaaccugaucuggcucgugaaaaagggaaauagcuacccaaaauuaucuaaguccuauauaaacgauaagggcaaagaaguacugguucuuuggggcauccaccaccccucaacgacugcugaccaacagagcuuguaccagaaugccgaugcguacguguucgucgggaccagucgcuauucuaagaaauuuaagccugagauugcaauccgaccaaaagugcgugaccaggagggaagaaugaacuacuauuggacacugauugaacccggugauaagaucacuuucgaggccaccggcaaccuaguggucccuagguacgcuuuugccauggaacggaaugcaggguccggaauaauuaucagcgacacaccaguucaugauugcaacaccacgugucaaacuccggagggcgcuauuaauacaucgcuccccuuccagaacauccacccuaucaccauugguaaaugcccaaaguaugugaagucuacuaaacugcgccuugccacagggcugagaaauguacccuccauacagucaaggggauuguuuggcgcgaucgccggcuucauugaagggggauggaccgguaugguggacggcugguacggguaucaucaccagaacgagcaaggaaguggcuacgcagcugaccucaagagcacgcagaaugccaucgauaaaauaaccaacaaggucaauuccgugauugagaaaaugaacacacaguuuacugcuguugguaaggaguucaaucaccuggagaagcggaucgaaaacuuaaauaaaaagguggacgauggguuccuggacaucuggaccuacaacgccgagcuccuuguccuguuggaaaaugagcgcacacuagauuaucaugacucuaacgugaaaaaccuguacgagaagguacgaaaucagcucaaaaacaaugcaaaggaaauuggcaacggauguuuugaguucuaucacaagugcgauaauacuuguauggaaagcguuaaaaacggcaccuacgacuauccuaaguacucagaggaagccaaacugaauagagagaagaucgauggggugaaacuugagaguacaaggauuuaucaaauacuggcuaucuacuccaccgucgcgagcucuuuggugcucgucgugucacugggagcaauuaguuuuuggaugugcagcaacgguuccuuacagugccggaucuguaucuga

SEQ ID NO: 138172 - RNA, 1701 nt, Artificial Sequence; identical to SEQ ID NO: 138108
  derived and/or modified CDS sequence (opt3) from hemagglutinin__InfluenzaA__AGQ16247

SEQ ID NO: 138173 - RNA, 1701 nt, Artificial Sequence
  derived and/or modified CDS sequence (opt3) from hemagglutinin__InfluenzaA__AGQ16248
augcaggccauccuggugguccuccuuuacaccuucgcuacagcaacugccgacacgcugugcauuggcuaucacgcgaacaauagcaccgauacaguugacacuguguuggagaagaacguaaccgugacacauuccgucaauuuacuggaagauaaacacaacgggaagcuauguaaacucagaggaguggcuccccugcaucuugguaagugcaauauagccggcuggauccuggggaacccugagugugaaucuuugucaaccgcaaguagcugguccuacauuguugagacuucuucgucagacaauggaacaugcuauccaggcgauuuuaucaacuacgaagaacucagggagcaacugagcaguguguccucuuucgaacgguuugagauuuucccgaaaaccagcuccuggcccaaucacgacucaaacaagggugucacggccgcuuguccucaugcaggggccaagaguuuuuauaaaaaucugaucuggcucgugaagaaaggaaacagcuacccaaaguuaucucaguccuauauaaaugauaaaggcaaggaaguacugguucuuuggggcauccaccaccccucaacuaccgcugaccagcagagcuuguaccaaaacgccgaugcguacguguucgucgggacaagucgcuauucuaagaaauuuaagccugagauugcaauccgaccaaaagugcgugaccaggagggaagaaugaauuacuauuggacucugguggaacccggugauaagauuaccuucgaggccacaggcaaccuagucguuccuagguacgcuuuuaccauggaacggaacgccggguccggaaucauaauuagcgacacgccaauccaugauugcaauacuacaugucagaccccggagggcgcaauuaacacuucgcuccccuuccagaauauccacccuaucacaauugguaaaugcccaaaguaugugaaaucuaccaagcugcgccuugcuacggggcugagaaacguacccuccauacaaucaaggggauuguuuggcgccaucgcgggcuucauugaagggggauggaccgguaugguggacggcugguacggguaucaucaccagaaugagcagggaaguggcuacgccgcagaccucaagagcacacagaacgcuaucgauaaaauaacuaauaaggucaacuccgugauugagaaaaugaauacccaauuuacagccguugguaaggaguucaaccaccuggagaaacggaucgaaaauuuaaacaagaagguggacgauggguuccuggacaucuggacuuacaaugcugagcuccuuguccuguuggaaaacgagcgcacccuagauuaucaugacucuaaugugaaaaaccuguacgagaagguacgaaaccagcucaaaaauaacgccaaggaaauuggcaauggauguuuugaguucuaucacaaaugcgauaacacauguauggaaagcguuaagaauggcaccuacgacuauccuaaguacucagaggaagcaaaacugaacagagagaagaucgauggggugaaacuugagaguacuaggauuuaucagauacuggccaucuacuccacggucgcuagcucuuuggugcucgucgugucacugggagcgauuaguuuuuggaugugcagcaaugguuccuuacaaugccggaucuguaucuga

SEQ ID NO: 138174 - RNA, 1701 nt, Artificial Sequence; identical to SEQ ID NO: 137906
  derived and/or modified CDS sequence (opt3) from hemagglutinin__InfluenzaA__AGQ16329

SEQ ID NO: 138175 - RNA, 1701 nt, Artificial Sequence; identical to SEQ ID NO: 137931
  derived and/or modified CDS sequence (opt3) from hemagglutinin__InfluenzaA__AGQ16331

SEQ ID NO: 138176 - RNA, 1701 nt, Artificial Sequence; identical to SEQ ID NO: 137906
  derived and/or modified CDS sequence (opt3) from hemagglutinin__InfluenzaA__AGQ16332

SEQ ID NO: 138177 - RNA, 1701 nt, Artificial Sequence; identical to SEQ ID NO: 137906
  derived and/or modified CDS sequence (opt3) from hemagglutinin__InfluenzaA__AGQ16333

SEQ ID NO: 138178 - RNA, 1701 nt, Artificial Sequence
  derived and/or modified CDS sequence (opt3) from hemagglutinin__InfluenzaA__AGQ16335
augaagaccaucauugcccugagcuacauacucugccuuguguucgcucagaaacugcccggcaacgacaauuccacagcaacuuuguguuuagggcaccaugccgucccuaacggaacgaucguuaagaccauuacaaaugauagaaucgaggugacuaacgcgaccgaacugguacaaaauucuucaauuggugagaucugcgacaguccacaccaggugcuagauggcgaaaacuguacacucauagacgcucugcuuggggauccgcagugcgacggauuucagaauaaaaagugggaucuguucgucgagaggagcaaagccuauuccaacuguuaccccuaugacgugccugauuacgcaucuuugcggucgcucguugccucaagcggcacccuggaauuuaauaacgagaguuucaauuggacuggugugacacaaaacgggaccuccucugcuugcauccgccgaagcaauuccucauuuuucagucgucugaacuggcucacgcauuuaaauuuuaaguauccagcacugaacgucacuaugcccaacaaugagcaguucgacaaacuuuacauuuggggagugcaccauccuggcaccgauaaagaccagaucuuuuuguaugcccagagcucuggcagaauuacaguauccacuaagaggucacaacaggcuguuaucccaaacauagggagccggccccgcauuagaaauaucccuaguaggauuucuaucuacuggaccaucgugaaaccaggagauauucugcuaauaaacuccacagguaaucucaucgccccgcggggcuacuucaagauucgcagcgggaaaucgucuaucaugcgauccgacgcgcccauaggaaaguguaagucagaaugcauuaccccuaacggcaguaucccaaaugacaaacccuuucagaacgucaauagaaucacguauggugcauguccuagguacgugaagcagaacacucugaaacuugccacagggaugcggaaugugccagagaagcaaacccguggaauuuucggcgcuaucgccggcuuuauugaaaacgggugggagggaauggucgaugguugguauggcuuccgccaccagaauagcgaggggagaggacaggcagcugaccugaaauccacucaagccgcgauagaucagaucaacggcaaguugaauaggcucauugguaaaacaaacgaaaaguuccaccagaucgagaaggaauuuucugagguugaagggcggauccaggaccuggagaaauacguggaggauaccaagauugacuuauggagcuauaacgccgaacugcucguagcacuugagaaucaacauacgauagaucugaccgacucagaaaugaacaaauuguucgagaagacaaagaagcagcuacgagaaaaugcugaggauaugggcaacggaugcuuuaagaucuaccacaaaugugacaaugccugcauuggcaguauccgcaacgggacuuaugaucaugacguguacagagacgaggcucugaauaacagguuccagauuaagggagucgaacucaaauccgguuacaaggauuggauccuguggaucagcuuugccauaucuugcuuccuucuguguguggcauugcucggcuuuauuaugugggccugccagaaagggaauauccgguguaacauuugcaucuga

SEQ ID NO: 138179 - RNA, 1701 nt, Artificial Sequence
  derived and/or modified CDS sequence (opt3) from hemagglutinin__InfluenzaA__AGQ16336
augaagaccaucauugcccugagcuacauacucugccuuguguucgcucagaaacugcccggcaacgacaauuccacagcaacuuuguguuuagggcaccaugccgucccuaacggaacgaucguuaagaccauuacaaaugauagaaucgaggugacuaacgcgaccgaacugguacaaaauucuucaauuggugagaucugcgacaguccacaccagauacuagauggcgaaaacuguacacucaucgacgcucugcuuggggauccgcagugcgacggauuucagaauaaaaagugggaucuguucguggagaggagcaaagccuauuccaacuguuaccccuaugacgucccugauuacgcaucuuugcggucgcucguggccucaagcggcacccuggaauuuaauaacgagaguuucaauuggacugguguuacacaaaacgggaccuccucugcuugcauucgccgaagcaaucguuccuuuuucucaagacugaacuggcucacgcauuuaaauuuuaaguauccagcacugaacgugacuaugcccaacaaugagcaguucgacaaacuuuacaucuggggaguccaccauccuggcaccgauaaagaccagaucuuuuuguaugcccagaguagcggcaggauuacagugucuacuaagcggucccaacaggcuguaauaccaaacauugggucacgccccagaaucaggaauauuccuagccggaucaguaucuacuggaccauuguuaaaccaggagauauacugcuaaucaacucuacagguaaucucauugccccgcgcggcuacuucaagauccgauccgggaaaagcucgauaaugagaucugacgcgcccauuggaaaguguaaguccgaaugcaucaccccuaacggcucaaucccaaaugacaaacccuuucagaacgugaauaggauuacguauggugcauguccucgguacgucaagcagaguacucugaaacuugccacagggaugcguaacgugccagagaagcaaacccgcggaaucuucggcgcuauugccggcuuuauagaaaaugggugggagggaaugguggaugguugguauggcuucagacaccagaacagcgaggggaggggacaggcagcugaccugaaauccacucaagccgcgaucgaucagauuaauggcaaguugaaccggcucaucgguaaaacaaaugaaaaguuccaccagaucgagaaggaauuuucugaggucgaagggcgcauucaggaccuggagaaauacguugaggauaccaagauagacuuauggagcuauaacgccgaacugcucguggcacuugagaaccaacauacgaucgaucugaccgacucagaaaugaauaaauuguucgagaagacaaagaagcagcuacgagaaaacgcugaggauaugggcaauggaugcuuuaagauuuaccacaaaugugacaacgccugcaucggcaguauuagaaaugggacuuaugaucaugacguauacagggacgaggcucugaacaaucgguuccagaucaagggaguggaacucaaauccgguuacaaggauuggauacuguggaucagcuuugccauuucuugcuuccuucugugugucgcauugcucggcuuuaucaugugggccugccagaaagggaacauucgcuguaauaucugcauauga

SEQ ID NO: 138180 - RNA, 1701 nt, Artificial Sequence; identical to SEQ ID NO: 138178
  derived and/or modified CDS sequence (opt3) from hemagglutinin__InfluenzaA__AGQ16337

SEQ ID NO: 138181 - RNA, 1701 nt, Artificial Sequence; identical to SEQ ID NO: 137916
  derived and/or modified CDS sequence (opt3) from hemagglutinin__InfluenzaA__AGQ16338

SEQ ID NO: 138182 - RNA, 1701 nt, Artificial Sequence
  derived and/or modified CDS sequence (opt3) from hemagglutinin__InfluenzaA__AGQ16339
augaagaccaucauugcccugagcuacauacucugccuuguguucgcucagaaacugcccggcaacgacaauuccacagcaacuuuguguuuagggcaccaugccgucccuaacggaacgaucguuaagaccauuacaaaugauagaaucgaggugacuaacgcgaccgaacugguacaaaauucuucaauuggugagaucugcgacaguccacaccagauacuagauggcgaaaacuguacacucaucgacgcucugcuuggggauccgcagugcgacggauuucagaauaaaaagugggaucuguucguggagaggagcaaagccuauuccaacuguuaccccuaugacgucccugauuacgcaucuuugcggucgcucguggccucaagcggcacccuggaauuuaauaacgagaguuucaauugggcugguguuacucaaaacgggacauccucugcaugcauucgcggaagcaauuccucauuuuucagucgacugaacuggcucacccauuuaaauuuuaaguauccagcccugaacgugacgaugcccaacaaugagcaguucgacaaguuguacaucuggggcguccaccauccuggcacugauaaagaccagauuuuucuuuaugcucagagcucugggcguaucaccguguccacaaagagaucacaacaggccguaauaccaaacauuggaagcaggccccggauccgcaauauuccuaguagaaucucuaucuacuggacuauuguuaaaccaggugauauacugcuaaucaacuccaccggcaaucucauugcgccgaggggguacuucaagauccggagcggaaaaucgucuauaaugcgcuccgacgcacccauuggcaaguguaagucagaaugcaucacaccuaacgguaguaucccaaaugacaaacccuuucagaacgugaaucgaauuaccuauggggccuguccuagauacgucaagcagagcacgcugaaacuugcuacuggaaugaggaacgugccagagaagcaaacacggggcaucuucggcgccauugcaggguuuauagaaaauggaugggaggguaugauggauggcugguauggguuccgucaccagaacuccgagggacgcggccaggcugccgaccugaaaucuacccaagcggccaucgaucagauuaaugguaaguugaacagacucaucgggaaaacuaaugaaaaguuccaccagaucgagaaggaauuuagcgagguggaaggcaggauucaggaccuggagaaauacgucgaggauacaaagauagacuuauggucauauaacgcagaacugcucguugcucuugagaaccaacauaccaucgaucugacggacagugaaaugaauaaauuguucgagaagaccaaaaagcagcuacgggaaaacgccgaggauaugggaaauggcugcuuuaagauuuaccacaaaugugacaacgcuugcaucggguccauucgaaauggaacauaugaucaugacguguaccgcgacgaggcccugaacaauagauuccagaucaaggguguagaacucaaaagcggcuacaagaacuggauacuguggaucucuuuugcaauuucaugcuuccuucuguguguggccuugcucggguuuaucaugugggcuugccagaaaggaaauauuagguguaacaucugcauauga

SEQ ID NO: 138183 - RNA, 1701 nt, Artificial Sequence; identical to SEQ ID NO: 138042
  derived and/or modified CDS sequence (opt3) from hemagglutinin__InfluenzaA__AGQ16340

SEQ ID NO: 138184 - RNA, 1701 nt, Artificial Sequence; identical to SEQ ID NO: 137906
  derived and/or modified CDS sequence (opt3) from hemagglutinin__InfluenzaA__AGQ16341

SEQ ID NO: 138185 - RNA, 1701 nt, Artificial Sequence; identical to SEQ ID NO: 137916
  derived and/or modified CDS sequence (opt3) from hemagglutinin__InfluenzaA__AGQ16342

SEQ ID NO: 138186 - RNA, 1701 nt, Artificial Sequence
  derived and/or modified CDS sequence (opt3) from hemagglutinin__InfluenzaA__AGQ16343
augaagaccaucauugcccugagcuacauacucugccuuguguucgcucagaaacugcccggcaacgacaauuccacagcaacuuuguguuuagggcaccaugccgucccuaacggaacgaucguuaagaccauuacaaaugauagaaucgaggugacuaacgcgaccgaacugguacaaaauucuucaauuggugagaucugcgacaguccacaccagauacuagauggcgaaaacuguacacucaucgacgcucugcuuggggauccgcagugcgacggauuucagaauaaaaagugggaucuguucguggagaggagcaaagccuauuccaacuguuaccccuaugacgucccugauuacgcaucuuugcggucgcucguggccucaagcggcacccuggaauuuaauaacgagaguuucaauugggcugguguuacucaaaacgggacauccucugcaugcauucgcggaagcaauuccucauuuuucagucgacugaacuggcucacccauuuaaauuuuaaguauccagcccugaacgugacgaugcccaacaaugagcaguucgacaaguuguacaucuggggcguccaccauccuggcacugauaaagaccagauuuuucuuuaugcucagagcucugggcguaucaccguguccacaaagagaucacaacaggccguaauaccaaacauuggaagcaggccccggauccgcgauauuccuaguagaaucucuaucuacuggacuauuguuaaaccaggugacauacugcuaaucaauuccaccggcaaccucauugcgccgaggggguacuucaagauccggagcggaaaaucgucuauaaugcgcuccgacgcacccauuggcaaguguaagucagaaugcaucacaccuaaugguaguaucccaaacgauaaacccuuucagaaugugaaccgaauuaccuauggggccuguccuagauacgucaagcagagcacgcugaaacuugcuacuggaaugaggaaugugccagagaagcaaacacggggcaucuucggcgccauugcaggguuuauagaaaacggaugggaggguaugguggacggcugguauggguuccgucaccaaaauuccgagggacgcggccaggcugccgaucugaaaucuacccaggcggccaucgaccagauuaacgguaaguugaauagacucaucgggaaaacuaacgaaaaguuccaccagaucgagaaggaauuuagcgaggucgaaggcaggauucaggaucuggagaaauacguugaggacacaaagauagauuuauggucauauaaugcagaacugcucguggcucuugagaaccaacauaccaucgaccugacggauagugaaaugaacaaauuguucgagaagaccaaaaagcagcuacgggaaaaugccgaggacaugggaaacggcugcuuuaagauuuaccacaaaugugauaaugcuugcaucggguccauucgaaacggaacauaugaccaugacguauaccgcgaugaggcccugaauaacagauuccagaucaaggguguggaacucaaaagcggcuacaaggacuggauacuguggaucucuuuugcaauuucaugcuuccuucugugugucgccuugcucggguuuaucaugugggcuugccagaaaggaaauauuagguguaacaucugcauauga

SEQ ID NO: 138187 - RNA, 1701 nt, Artificial Sequence; identical to SEQ ID NO: 137916
  derived and/or modified CDS sequence (opt3) from hemagglutinin__InfluenzaA__AGQ16344

SEQ ID NO: 138188 - RNA, 1701 nt, Artificial Sequence; identical to SEQ ID NO: 137906
  derived and/or modified CDS sequence (opt3) from hemagglutinin__InfluenzaA__AGQ16345

SEQ ID NO: 138189 - RNA, 1701 nt, Artificial Sequence
  derived and/or modified CDS sequence (opt3) from hemagglutinin__InfluenzaA__AGQ16346
augaagaccaucauugcccugagcuacauacucugccuuguguucgcucagaaacugcccggcaacgacaauuccacagcaacuuuguguuuagggcaccaugccgucccuaacggaacgaucguuaagaccauuacaaaugauagaaucgaggugacuaacgcgaccgaacugguacaaaauucuucaauuggugagaucugcgacaguccacaccagauacuagauggcgaaaacuguacacucaucgacgcucugcuuggggauccgcagugcgacggauuucagaauaaaaagugggaucuguucguggagaggagcaaagccuauuccaacuguuaccccuaugacgucccugauuacgcaucuuugcggucgcucguggccucaagcggcacccuggaauuuaauaacgagaguuucaauuggacugguguuacacaaaacgggaccuccucugcuugcauucgccgaagcaauuccucauuuuucagucgucugaacuggcucacgcauuuaaauuuuaaguauccagcacugaacgugacuaugcccaacaaugagcaguucgacaaguuguacaucuggggaguccaccauccuggcaccgauaaagaccagauuuuucuuuaugcccagagcucuggcagaaucacaguguccacuaagaggucacaacaggcuguaauaccaaacauugggagccggccccgcaucagaaauauuccuaguaggaucucuaucuacuggaccauuguuaaaccaggagauauacugcuaaucaacuccacagguaaucucauugccccgcggggcuacuucaagauccgcagcgggaaaucgucuauaaugcgauccgacgcgcccauuggaaaguguagaucagaaugcaucaccccuaacggcaguaucccaaaugacaagcccuuucagaacgugaauaggauuacguauggugcauguccucgguacgucaaacagagcacucugaaacuugccacagggaugcguaacgugccagagaagcaaacccgcggaaucuucggcgcuauugccggcuuuauagaaaaugggugggagggaaugguggaugguugguauggcuucagacaccagaacuccgaggggaggggacaggcagcugaccugaagucuacucaagccgcgaucgaucagauuaauggcaaauugaaccggcucaucgguaagacaaaugaaaaauuccaccagaucgagaaggaauuuagcgaggucgaagggcgcauucaggaccuggagaaguacguugaggauaccaaaauagacuuauggucauauaacgccgaacugcucguggcacuugagaaccaacauacgaucgaucugaccgacagugaaaugaauaaguuguucgagaaaacaaagaaacagcuacgagaaaacgcugaggauaugggcaauggaugcuuuaagauuuaccacaagugugacaacgccugcaucggcuccauuagaaaugggacuuaugaucauaacguauacagggacgaggcucugaauaaccgguuccagaucaaaggaguggaacucaagagcgguuacaaagacuggauacuguggaucucuuuugccauuucaugcuuccuucugugugucgcauugcucggcuuuaucaugugggccugccagaaggggaauauucgcuguaacaucugcauauga

SEQ ID NO: 138190 - RNA, 1701 nt, Artificial Sequence; identical to SEQ ID NO: 137906
  derived and/or modified CDS sequence (opt3) from hemagglutinin__InfluenzaA__AGQ16347

SEQ ID NO: 138191 - RNA, 1701 nt, Artificial Sequence; identical to SEQ ID NO: 138042
  derived and/or modified CDS sequence (opt3) from hemagglutinin__InfluenzaA__AGQ16348

SEQ ID NO: 138192 - RNA, 1701 nt, Artificial Sequence; identical to SEQ ID NO: 137906
  derived and/or modified CDS sequence (opt3) from hemagglutinin__InfluenzaA__AGQ16349

SEQ ID NO: 138193 - RNA, 1701 nt, Artificial Sequence
  derived and/or modified CDS sequence (opt3) from hemagglutinin__InfluenzaA__AGQ16350
augaagaccaucauugcccugagcuacauacucugccuuguguucgcucagaaacugcccggcaacgacaauuccacagcaacuuuguguuuagggcaccaugccgucccuaacggaacgaucguuaagaccauuacaaaugauagaaucgaggugacuaacgcgaccgaacugguacaaaauucuucaauuggugagaucugcgacaguccacaccagauacuagauggcgaaaacuguacacucaucgacgcucugcuuggggauccgcagugcgacggauuucagaauaaaaagugggaucuguucguggagaggagcaaagccuauuccaacuguuaccccuaugacgucccugauuacgcaucuuugcggucgcucguggccucaagcggcacccuggaauuuaauaacgagaguuucaauuggacugguguuacacaaaacgggaccuccucugcuugcauucgccgaagcaauuccucauuuuucagucgucugaacuggcucacgcauuuaaauuuuaaguauccagcacugaacgugacuaugcccaacaaugagcaguucgacaaacuuuacaucuggggaguccaccauccuggcaccgauaaagaccagaucuuuuuguaugcccagagcucuggcagaauuacaguguccacuaagaggucacaacaggcuguaauaccaaacauugggagccggccccgcaucagaaauauuccuaguaggaucucuaucuacuggaccauuguuaaaccaggagauauacugcuaaucaacuccacagguaaucucauugccccgcggggcuacuucaagauccgcagcgggaaaucgucuauaaugcgauccgacgcgcccauuggaaaguguaagucagaaugcaucaccccuaacggcaguaucccaaaugacaaacccuuucagaacgugaauagaauuacguauggugcauguccuagguacgucaagcagagcacucugaaacuugccacagggaugcggaacgugccagagaagcaaacccguggaaucuucggcgcuauugccggcuuuauagaaaaugggugggagggaaugguggaugguugguauggcuuccgccaccagaacuccgaggggagaggacaggcagcugaccugaaaucuacucaagccgcgaucgaucagauuaauggcaaguugaacaggcucaucgguaaaacaaaugaaaaguuccaccagaucgagaaggaauuuagcgaggucgaagggcggauucaggaccuggagaaauacguugaggauaccaagauagacuuauggucauauaacgccgaacugcucguggcacuugagaaccaacauacgaucgaucugaccgacagugaaaugaauaaauuguucgagaagacaaagaagcagcuacgagaaaacgcugaggauaugggcaauggaugcuuuaagauuuaccacaaaugugacaacgccugcaucggcuccauucgcaaugggacuuaugaucauaacguauacagagacgaggcucugaauaacagguuccagaucaagggaguggaacucaaaagcgguuacaaggacuggauacuguggaucucuuuugccauuucaugcuuccuucugugugucgcauugcucggcuuuaucauguggaccugccagaaagggaauauucgguguaacaucugcauauga

SEQ ID NO: 138194 - RNA, 1701 nt, Artificial Sequence
  derived and/or modified CDS sequence (opt3) from hemagglutinin__InfluenzaA__AGQ47719
augaaggccauccugcucgugcuucugugcaccuucacagcuacuaacgcagacacguuguguauuggcuaccacgccaauaacagcaccgauacagucgacacuguuuuagagaaaaaugugaccguaacacauuccgugaaccugcuagaagauagacacaaugggaagcucugcaaacugggagguauagcgccccuucaucugggcaaguguaacaucgcugggugguugcucggaaauccugagugcgaacugcuguuuaccgucucuucauggaguuauauuguggagacuagcaacuccgacaauggcacauguuacccaggugauuucaucaacuaugaggaacucagggagcaguuaucuucgguuagcucauuugaacgguucgagauuuuuccgaaaaccaguuccuggcccgaccacgaaacgaaucgcggggugacugccgcaugcccuuacgccggagcuaacucuuucuaucgaaaucugaucuggcuugucaagaagggcaacagcuacccaaaauuguccaagucauaugugaauaacaaaggcaaggagguacugguucuaugggggauacaucaucccccuaccaguacagaucaacagagccucuaccagaacgcagacgccuacguguuugucggaucuuccaaauauaaucguaaguucaagccagagaucgcugccagacccaaagugaggggucaggcgggccggaugaacuacuauuggacucugauugaaccuggggauaccaucacauuugaggcaaccggaaaucuuguggucccacgcuacgccuucgcuaugaacagaggcucagguagcgggauuaucauaagugacgccccgauucacgauuguaauacgaagugccaaacucccaaaggagcaaucaacacaucucugccuuuucagaauauucacccaguuaccaucggcgaaugucccaaguaugugaaauccacuaaguugaggauggcuacaggccuccggaacaucccuagcauucagucgcgcgggcuguucggagccauagcggguuuuaucgagggcggguggaccggaaugauugacggcugguacgguuaucaccaucagaaugggcaaggcucuggauacgccgcagaucagaaauccacgcagaacgcuaucgacggcauaaccaauaagguaaacucagugauugaaaagaugaauacacaguucacugccgucgggaaagaguucaaccacuuagagaagcgaaucgaaaaucugaacaaaaagguggacgauggauuucucgacguuuggaccuacaacgcugagcuucugguguugcuagaaaaugagagaacacuggauuuccacgacaguaacgucaaaaaucucuaugaaaaggugaggagccaacugcggaacaaugccaaggagaucgguaacggcugcuuugaguucuaccauaaaugugaugacacuugcauggaauccguaaagaaugggaccuaugauuacccaaaauauucugaggaaagcaaacuuaaccgugaggaaauugacggaguuaagcuggagucaacacgcaucuaccagauuuuggcaauauauaguaccgccgcuuccagccucgugcuguuagucucucugggcgcgaucucauuuuggaugugcaguaaugguagccuacaguguagaauuugcaucuga

SEQ ID NO: 138195 - RNA, 1698 nt, Artificial Sequence; identical to SEQ ID NO: 130163
  derived and/or modified CDS sequence (opt3) from hemagglutinin__InfluenzaA__AGQ47728

SEQ ID NO: 138196 - RNA, 1701 nt, Artificial Sequence
  derived and/or modified CDS sequence (opt3) from hemagglutinin__InfluenzaA__AGQ47740
augaaggccagacugcucgugcuucugugcgcuuuggcagccaccgacgcggauacaaucuguauuggcuaccacgcuaacaauagcacugacacggucgauaccuuacuggagaaaaacguuacagugacucauuccguaaaucuacucgaagacucucacaacgggaagcugugcaaacuuaagggaauagccccgcugcaguuggguaaauguaauaucgcaggcuggcuccuggggaacccugagugcgauucacugcucccagccaggaguuggagcuauauuguggaaacccccaauuccgagaacggagcuuguuaccccggcgacuucaucgauuaugaagaguuacgggagcaacugucuucggucucaagccuugaacgcuuugagauuuucccuaaggaaaguuccuggccaaaucauaacacaaucaagggugugaccgcaucuugcagccaccgagggcaguccucauuuuaccguaauuugcuguggcuaacuaaaaagggagacaguuaucccaaacucaacaauagcuacguuaacaauaagggcaaagaggugcugguccuuuggggcgugcaucacccuucuuccucaaacgagcagcagagccuguauagaaacgaaaaugccuacguaaguguugugucuuccaacuacaauaggcgguucacaccagagauagcugcccgccccaaggucagagaucaaaccgggaggaugaacuauuacuggacguugcucgaaccuggagacacuaucauguuugaggcgaccgguaaucugauugcaccaugguaugccuucgcuuuaagccggggcuuugggucgggaaucauuacaucuaacgccuccaugcacgaauguaauacuaagugccagaccccgcagggcgcaaucaacucaagucugcccuuccagaauauacauccugugacaauuggugaguguccaaaauacgugcgcagcaccaagcuccgaauggucacggggcuuagaaacauccccuccauucaaucuaggggacuguuuggcgcuaucgccggcuucaucgaagggggauggacugguaugauugauggcugguauggguaccaccaucagaaugaacagggaagcggcuaugcggccgaccagaaaucaacacaaaacgcaauaaaugguaucaccaacaagguuaauagugugauugagaaaaugaacacucaguuuacagcuguagggaaggaguucaacaauuuggagaaacggauggaaaaccuaaauaagaagguggaugacggcuuucuggacaucuggaccuacaacgccgagcuccugguccuucuggagaaugaacguacguuggauuuccacgaccucaacgugaaaaaucuguacgagaagguuaaaucccaguuaaagaacaaugcuaaagaaauaggaaacggcugcuucgaguuuuaucacaagugugauaaugaaugcauggagagcgugcgcaacgggaccuacgacuauccuaaguacucugaggaaucaaaacugaauagagagaagauugauggagucaaacuagaaaguauggguguguaucaaauccucgccaucuacagcacaguagcauccucucugguucuuuuggugucgcugggcgccauuagcuucuggaugugcuccaacgggucacuccaguguaggaucugcauuuga

SEQ ID NO: 138197 - RNA, 1701 nt, Artificial Sequence
  derived and/or modified CDS sequence (opt3) from hemagglutinin__InfluenzaA__AGQ47752
augaaggccaaacugcucauccuucugugcgcuuugagcgcaaccgacgccgauacaauuuguauaggcuaccacgcgaacaauuccacugacacgguggauaccgucuuagagaagaacguuacagugacucauucuguaaaucugcuagaagacucacacaacgggaaacucugcagacugaagggaaaagcuccccuucagcuggguaaguguaauaucgccggcuggguguuggggaacccugagugcgaaagucuccugagcaauagguccuggucuuauauugcagagaccccaaacucggaaaauggaaucuguuacccgggcgauuucgccgacuaugaggagcugcgggaacaacucucaagcgucaguuccuuugagcgcuucgaaauuuuucccaaggagcgaucuuggccuaaacauaacacaauccguggugugaccgcugcaugcagccacgccgggaaguccucauucuacaaaaauuuaguuuggcugacugaggcuaacggaaguuauccagcccuuagcacaucuuacgugaauaaccaggaaaaggaggucuuggugcuguggggcguacaucaccccuccaauauagaggaacagagaacccuauauaggaaagauaacgcguacguuucaguggucagcaguaacuacaaucggcgcuuuacgccugaaaucgcaaagagaccaaaggugagggaccagcccggccggaugaacuauuacuggacucuccuggagccuggggauaccauuaucuucgaggccacaggaaaucuuauugcuccaugguaugccuuugcacugucucgcgguccgggcuccgggaucauaacuagcaacgcucccauggacgaaugugauaccaaaugccaaacaccucagggagccauuaauucgucuuugccauuccagaacauccaccccgugaccauuggcgaguguccuaaguacguccgauccacgaaacucagaaugguuacuggucugaggaauaucccaucaauccagagucggggguuauuuggagcgauugccggcuucauagaaggcggguggacaggaaugauggacgguugguauggcuaccaucaccaaaacgagcaggggagcggauaugcagcugaucagaaguccacccagaaugccaucaacggcauuacuaauaaagugaacucuguaaucgaaaagaugaauacacaauuuaccgcuguggguaaagaguucaacaagcuggagaagcguauggaaaaucucaacaaaaaggucgacgacggguuucuugauauauggacguacaacgccgagcuguuggugcuacuggaaaaugagcgcacccucgacuuccaugauagcaacguuaaaaaucuguacgaaaaggugaaaaaccagcuuagaaauaacgcaaaggagcugggcaauggaugcuucgaguuuuaucacaagugugacaacgaaugcauggagucagucaaaaauggcacauacgauuaucccaaguacagugaagaguccaaauugaacagggagaagauugacggggugaaacucgaaagcaugggaguauaucggauccuggccaucuacucuacuguugcuucaaguuuagugcugcuagucagccucggugcgauuuccuucuggaugugcucuaauggcucgcugcagugucgaaucugcauuuga

SEQ ID NO: 138198 - RNA, 1701 nt, Artificial Sequence
  derived and/or modified CDS sequence (opt3) from hemagglutinin__InfluenzaA__AGQ47764
augaaggccaaacugcucauccuucugugcgcuuugaccgcaacagacgccgauacuauuuguauaggcuaccacgcgaacaauagcacggacaccguggauacagucuuagagaagaacguuacugugacccauuccguaaaucugcuagaagacucucacaacgggaaacucugcagacugaagggaaucgcuccccuucagcuggguaaauguaauauugccggcuggaucuuggggaacccugagugcgaaucacuccugaguaagaggagcugguccuauauugcagagacaccaaauucugaaaacggagccuguuacccgggcgauuucgcugacuaugaggagcugcgggaacaacucucgucagugagcaguuuugagcgcuucgaaaucuuucccaaggagcgauccuggccuaaacauaauauaacccguggugucacugcagccugcucucacgcugggaaaagcuccuucuacaaaaacuuacuguggcuuacagagaccgauggaucauauccaaaguugaguaaaagcuacgugaauaacaaggaaaaggagguucuggugcuauggggcguccaucaccccucuaauaucgaagaccagaaaacgcucuauagaaaggagaacgccuacguguccguaguuucaagcaauuacaacaggcgguuuacuccugaaauugcggagcgcccaaaagugagaggccaggcagggaggaucaacuauuacuggacccugcuugagcccggagauacaauuaucuucgaagccaaugguaaccugauagcuccuugguaugccuuugcauugagucgggacuucggcucugggauuaucacuuccaaugcuagcauggaugagugugacaccaagugccagacaccacaaggagccauuaacucgucucucccguuucagaauauccaccccgucaccaucggcgaauguccuaaauacgugaaguccacgaaacugcgcauggugacugguuuacgaaacauuccaucaauacagaguagagggcuguucggagcgaucgccggcuuuauugagggcggguggacaggaaugaucgaugguugguauggcuaccaucaccagaaugaacaagggagcggauaugcagcugaccagaaguccacccagaacgccauaaauggcauuacuaacaaggucaauucuguuaucgagaaaaugaacacacaguucaccgcuguggguaaggaguuuaauaaacucgaaaagaggauggagaaccuuaauaaaaagguagacgauggguuccuggacaucuggacguacaacgccgaauugcuagugcugcucgagaacgaacggacccuggauuuccaugacagcaaugucaagaaccuuuacgagaaagugaagaaucaacugcguaacaaugcaaaagagauuggcaacggaugcuuugaguucuaucacaaguguaauaacgaaugcauggaaucaguuaaaaauggcacauacgauuaucccaaguacagugaggaguccaaguugaaccgcgaaaagaucgacggggugaagcucgagagcaugggagucuaucagauucuggccauauacucuacuguggcuucaaguuuaguacugcuaguuagccucggugcgaucuccuuuuggaugugcucuaauggcucgcugcaguguagaauuugcaucuga

SEQ ID NO: 138199 - RNA, 1701 nt, Artificial Sequence
  derived and/or modified CDS sequence (opt3) from hemagglutinin__InfluenzaA__AGQ47776
augaaggccaaacugcucauccuucugugcgcuuugagcgcaaccgacgccgauacaauuuguauaggcuaccacgcgaacaauuccacugacacgguggauaccgucuuagagaagaacguuacagugacucauucuguaaaucugcuagaagacucacacaacgggaaacucugcagacugaagggaaucgcuccccuucagcuggguaaauguaauauugccggcuggaucuuggggaacccugagugcgaaagucuccugagcaagagguccuggucuuauauugcagagaccccaaauucggaaaacggaacauguuacccgggcgauuucgccgacuaugaggagcugcgggaacaacucucaagcgugaguuccuuugagcgcuucgaaaucuuucccaaggagcgaucuuggccuaaacauaauauaaacaucggugucaccgcugcaugcagccacgccgggaaguccucauucuacaaaaauuuacuguggcuuacugagaaggauggaaguuauccaaacuugaauaaaagcuacgugaacaagaaggaaaaagagguucuggugcuauggggcguccaucaccccucuaauauugaagaccagaagacacucuaucguaaagagaacgcuuacguguccguaguuucaagcaacuacaauagaagguuuaccccugaaaucgccgagcggccaaaggugcgcggccaggcggggagaaugaacuauuacuggacgcugcuugagcccggagauacuauuaucuucgaagcaaaugguaaccugauagccccuugguaugcuuuugccuugaguaggggccucgggucuggaauuaucaccuccaaugcaagcauggacgagugugauacaaaaugccagacuccacaaggcgcuauuaacucgucucugccguuccagaauauccaccccuuuaccaucggugaauguccuaaguacguccgguccacaaaauuacgcauggugaccgggcugcgaaacauuccaucaauacagaguagaggacucuucggcgccaucgcgggcuuuauugaagggggauggacggguaugaucgacggcugguauggguaccaucaccagaaugaacaaggaagcggcuaugccgcagaucagaaguccacucagaacgcuauaaaugguauuacaaacaaggucaauucugugaucgagaaaaugaacacccaguucacugccguugggaaggaguuuaauaaacuugaaaagaggauggagaaccugaacaaaaagguggacgacggcuucuuggauaucuggacauacaaugcugaacuacugguacuccuggagaacgaacggacccuugacuuccaugauagcaaugugaagaaccuguacgagaaagucaagaaucaauugcguaacaaugccaaagagauuggaaacggcugcuuugaguucuaucacaaguguaauaacgagugcauggaaucagugaaaaaugggacguacgacuaucccaaguacagugaggaguccaagcucaaccgcgagaaaaucgauggaguuaagcuggaaagcauggguguguaucagauuuuagcaauauacucuaccgucgccucaagucuggugcuacucguaagccugggcgcuaucuccuuuuggaugugcucuaaugggucgcuucaguguagaauuugcaucuga

SEQ ID NO: 138200 - RNA, 1701 nt, Artificial Sequence
  derived and/or modified CDS sequence (opt3) from hemagglutinin__InfluenzaA__AGQ47788
augaaggccaaacugcucgugcuucugugcgcuuugagcgcaaccgacgccgauacaaucuguauuggcuaccacgcgaacaauuccacugacacggucgauaccguuuuagagaagaacgugacaguaacucauucugugaaucugcuagaagacucacacaacgggaaacucugcagacugaagggaauagcuccccuucagcuggguaaauguaauaucgccggcuggauuuuggggaacccugagugcgaaagucucuucagcaagaaguccuggucuuauaucgcagagaccccaaauucggaaaacggaacauguuacccgggcuauuuugccgauuacgaggagcugagggaacaacugucaagcgucaguuccuucgagcgguuugaaauuuuccccaaagagcgcucuuggccuaagcauaaugugacccgagguguuacugcugcaugcagccacaaagggaaguccucauuuuaucguaaccucuuauggcugacagagaaagacggaaguuacccaaaucuuagcaagucuuaugugaacaauaaggaaaaagaggucuuggugcuguggggcguacaucaccccuccaacaucgaagaucagaagacccuauacagaaaagagaaugccuacguuucaguggucagcaguaacuauaacaggcgguucacgccugaaauagcugagcgcccaaaggugagaggccaggccgggaggaucaauuacuauuggacucuccuggagcccggagacaccauuaucuuugaagcgaacgguaaucuuauugcaccuuggcacgccuucgcucugucucggggcuuuggguccggaaucauaacaagcaacgccucgauggaugagugugacacuaaaugccagaccccacaaggcgcaauuaauucuuccuugccguuccagaacauccaucccgugacaauuggugaauguccuaaguacguccgcucaaccaaacuccgaaugguuacggggcugagaaauaucccaaguauccagagcaggggauuauuuggcgcuauugccggcuucauagaagggggauggacugguaugaucgauggcugguauggguaccaccaucagaacgagcaaggauccggcuaugcggccgaccagaagucuacacagaaugcaauuaacgguaucaccaauaaggugaacagcguaauagagaaaaugaauacucaguuuacagcuguggggaaggaguucaacaaacuggaaaagcggauggagaaucucaacaaaaaggucgaugacggcuuccuugacauuuggaccuacaacgccgaacuguuggugcuacuggagaaugaacguacgcucgauuuucacgacucaaacguuaagaaucuguacgagaaagugaagagucaacuuaaaaacaaugcuaaggagaucggaaacggcugcuucgaauuuuaucacaaauguaauaacgagugcauggaauccgucaagaaugggaccuacgauuaucccaaguacagcgaggagucuaaacugaaccgcgaaaagaucgacggagugaaauuggagucaauggguguauaucagauucucgccaucuacaguacaguugcaagcucccugguguuacuggucucucuaggcgccauuucguucuggaugugcagcaaugggucccuccaguguagaauaugcaucuga

SEQ ID NO: 138201 - RNA, 1701 nt, Artificial Sequence
  derived and/or modified CDS sequence (opt3) from hemagglutinin__InfluenzaA__AGQ47800
augaaggccagacugcucgugcuucugugcgcuuuggcagccaccgacgcggauacaaucuguauuggcuaccacgcuaacaauagcacugacacggucgauaccauauuagagaaaaacguuacagugacucauuccguaaaucugcuagaagacucucacaacgggaagcucugcaggcugaaaggaaucgcaccccuucagcuggguaaguguaauauugccggcuggaucuuggggaacccugagugcgaaucacuccugagugagcggagcugguccuauauuguggaaaucccaaauucugagaacggaaccuguuacccgggcgauuucacagacuaugaggaacugcgcgagcaacucucgucagucagcaguuuugaacgauucgagauauuucccaaagaguccucuuggccuaagcauaauaccgcccguggugugacugcugcaugcagccacgccgggaaguccucauucuacagaaacuuacuguggcuuacagaaaaagauggaaguuauccaaauuugaagaacagcuacguuaauaaaaagggcaaagaggugcugguccuauggggcgugcaucaccccucuuccaucaaggaacagcagacccucuaucagaaggagaacgcuuacguaucaguugugagcaguaauuacaacaggcgguuuacgccugaaauugccgagcgcccaaaagucagagaccaagcggggaggaugaacuauuacuggacucugcuugagcccggagauaccaucauuuucgaagcaaaugguaaccugaucgccccuugguaugcuuuugccuugucucggggcuucggguccggaauaauuacaagcaaugcaucgaugcacgagugugacacuaagugccagaccccacagggcgcuaucaacucuucccucccguuucagaauauucaucccgugacaaucggugaauguccuaaauacgugcgcucaaccaagcugcgaauggucacgggguuaagaaacaucccaaguauucaaagcaggggacuguucggcgccauagcgggcuuuaucgaagggggauggacugguaugauugauggcugguauggguaccaccaucagaaugaacagggauccggcuaugccgcagaccagaaaucuacacaaaacgcuaucaaugguauaaccaacaagguuaauagcgugauugagaaaaugaacacucaguucacagccguagggaaggaguuuaauaaccucgaaaagcggauggagaaucuuaacaaaaagguggaugacggcuuccuggacaucuggaccuacaacgcugaauugcuaauccugcucgagaaugaacguacgcuggauuuccacgacucaaacgucaaaaaucuuuacgagaaggugaaaagucagcugcgcaacaaugccaaggagauuggaaacggcugcuuugaguucuaucacaaguguaauaacgagugcauggaauccguuaaaaaugggaccuacgauuaucccaaguacagcgaggagucuaaauugaacagagaaaagaucgacggagugaaacucgagucaaugggugucuaucaaauucuggcaauauacaguacaguggccagcuccuuaguacugcuaguuucucucggcgcuaucucguuuuggaugugcagcaaugggucccugcaguguaggauuugcaucuga

SEQ ID NO: 138202 - RNA, 1701 nt, Artificial Sequence
  derived and/or modified CDS sequence (opt3) from hemagglutinin__InfluenzaA__AGQ47811
augaaggccaaacugcucgugcuucugugcgcuuugagcgcaaccgacgccgauacaaucuguauuggcuaccacgcgaacaauuccacugacacggucgauaccguuuuagagaagaacgugacaguaacucauucugugaaucugcuagaagacucacacaacgggaaacucugcagacugaagggaauagcuccccuucagcuggguaaauguaauaucgccggcuggauuuuggggaacccugagugcgaaagucucuucagcaagaaguccuggucuuauaucgcagagaccccaaauucggaaaacggaacauguuacccgggcuuuuucgccgauuaugaggagcugagggaacaacugucaagcgucaguuccuuugagcgguucgaaauuuuucccaaagagcgcucuuggccuaagcauaaugugacccgagguguuacugcugcaugcagccacaaagggaaguccucauucuaccguaaccucuuauggcugacagagaaaaauggaaguuauccaaaccuuagcaagucuuacgugaauaacaaggaaaaagaggucuuggugcuguggggcguacaucaccccuccaauaucgaagaccagaagaccauauauagaaaagagaacgccuacguuucaguggucagcaguaacuacaauaggcgguuuacgccugaaaucgcugagcgcccaaaggugagaggccaggccgggaggauuaacuauuacuggacucuacucgagcccggagauaccaucauuuucgaagcgaaugguaaccugaucgcaccuuggcacgccuuugcucuuucucggggcuucggguccggaauaauuacaagcaaugccucgauggacgagugugauacuaaaugccagaccccacaaggcgcaaucaacucuucccugccguuucagaauauucaucccgugacaaucggugaauguccuaaguauguccgcucaaccaaauugcgaaugguuacggggcucagaaacaucccaaguauucagagcaggggacuguucggcgcuauagccggcuuuaucgaagggggauggacugguaugauugacggcugguacggguaucaccaucagaaugaacaaggauccggcuacgcggccgaucagaagucuacacagaacgcaaucgacgguauaaccaauaaggugaacagcguaauugagaaaaugaauacucaguucacagcuguggggaaggaguucaacaaauuagaaaagcggauggagaaucugaacaaaaaggucgaugacggcuuucucgacaucuggaccuauaacgccgaacuucugguguugcuagagaaugaacguacgcuggauuuccacgacucaaacguuaagaaucucuacgagaaagugaagagucaacugaaaaacaaugcuaaggagaucggaaacggcugcuuugaguucuaccacaaauguaauaacgagugcauggaauccgucaagaaugggaccuaugauuaccccaaguauagcgaggagucuaaacuuaaccgcgaaaagauugacggagugaaacuggagucaauggguguauaccagaucuuggccauuuauaguacaguugcaagcucccucgugcuguuagucucucugggcgccauaucguuuuggaugugcagcaaugggucccuacaguguagaaucugcauuuga

SEQ ID NO: 138203 - RNA, 1701 nt, Artificial Sequence
  derived and/or modified CDS sequence (opt3) from hemagglutinin__InfluenzaA__AGQ47823
augaaggccaaacugcucgugcuucugugcgcuuucaccgcaacauacgccgacacuaucuguauuggcuaucacgcgaacaauagcacggauaccgucgacacaguuuuggagaagaacgugacuguaacccauuccgugaauuuacuggaagauucucacaacgggaaacuaugcagacucaagggaauagcuccccugcagcuugguaauuguucagucgccggcuggauccuggggaacccuaaaugcgagaguuuguuuagcaaggaauccuggucuuacauugcagagacaccaaauccggaaaacggaaccuguuaucccggcuacuucgccgacuaugaggagcucagggaacaacugucgucagugagcaguuuugagcgguucgaaaucuuuccuaaggaguccucuuggccaaaucauacuguuacaaaaggugugaccacgagcugcucccacaacgggaagucaaguuucuaccgcaaucugcucugguuaacugagaaaaacggacuguaucccaaucuuagcaagucuuacgucaacaauaaagaaaaggagguguugguacuguggggcguucaucacccuuccaacauucgagaucagcgugcuaucuaccacaccgaaaacgcauaugugucagucgugagcagucauuacucuagaagguuuacaccagagauagccaagcggcccaaagugcgcggccaggaagggagaaucaauuauuacuggacucuacucgagccuggagacaccauuaucuucgaggcuaacgguaaucugauugccccaugguaugcguuugcacuuuccaggggcuucgggagcggaaucauaacaucgaacgccucuauggaugaaugugacgcuaagugccagaccccgcaaggcgccauuaauuccucacugcccuuucagaacguccacccuguuacgaucggugaguguccaaaauacgugcggaguacuaaguugcgcaugguaacagggcuccgaaauauucccagcauccaguccagaggacuguucggcgcaaucgcuggcuuuauugaagggggauggaccgguaugauagauggcugguauggguaccaucaccagaacgagcaaggaucuggcuacgccgcggaccagaaaagcacucagaaugccaucaacgguauuacaaauaaggugaacucagucaucgaaaagaugaauacccaguucacggcaguggggaaggaguucaacaaguuagagaggcggauggaaaaucugaacaaaaagguugaugacggcuuucucgauauauggaccuauaacgcugagcuucugguguugcuagaaaauggacguacacuggacuuccacgacaguaacgucaaaaaucucuacgagaaggugaaaucccaacugaagaacaaugccaaggaaauuggcaacgggugcuuugaguucuaucauaaauguaauaacgagugcauggaaagcguaaagaauggaacuuacgauuauccuaaauacucugaggaaucaaaacuuaaccgcgguaaaaucgacggcguuaagcuggagaguauggggguguaucagaucuuggcuauuuacagcaccgucgccuccucucucgugcuguuagucucgcugggagcaaucagcuuuuggaugugcuccaauggcucacuacaguguagaauuugcauauga

SEQ ID NO: 138204 - RNA, 1701 nt, Artificial Sequence
  derived and/or modified CDS sequence (opt3) from hemagglutinin__InfluenzaA__AGQ47835
augaagaccaucauugcccugagcuacauauucugccucgugcuuggccaggacuuucccgggaacgauaauuccacagcuacucuguguuugggacaccaugcagucccuaacgguacgaucguuaaaaccauuacaaaugaccaaaucgaggugacuaacgccaccgaauuaguacagucuucaaguacaggcaagauuugcaauaacccacacagaauccuggaugggauaaauuguacccuaaucgacgcgcuccugggagauccgcauugcgacggcuuccagaacgagacuugggaucuuuuuguggaaaggagcaaggcuuucuccaauuguuaucccuacuaugucccugacuacgccucucugcggucguugguggcaucaagcgguacacucgaguuuauuaacgaaggguucaauuggaccggaguuacgcagaacggcggcaguaaugccugcaagcgcgggccaaacuccggauuuuucucucgacugaauuggcuguauaaaagcgguacuaccuaccccgugcucaacgucacaaugccuaacaaugauaacuuugacaaguuauauaucuggggcgugcaccauccauccacugaucaagagcagaccaaucuguacguacaggcuucagggcguguuacagugaguaccaagagaagccagcaaacgauuacucccaacaucggaucuaggccuuggguccggggccuuuccucacgcauaagcauuuacuggacaaucgugaaaccaggugacauuuuggugaucaauaguaacgggaaucugaucgcaccgagaggauauuucaagaugaggaccggcaaaucuuccauuaugcggagcgaugcccccauaggcacuuguaucucggagugcauuacaccuaacgggucuaucccaaaugacaagcccuuucagaacgucaauaaaauaaccuacggagcuuguccuaaguauguuaagcagaacacgcuaaaacucgccaccgguaugcgcaaugugccagaaaagcagacacgaggcauuuucggggcgaucgcaggauuuaucgagaacggcugggaagguaugguagacgggugguacggcuucagacaccaaaauuccgagggaacuggccaggccgcugaucugaaaucaacccaggccgcaauugaccaaaucaacgggaaacuuaacagggugauugagaaaacaaaugaaaaguuccaccagauagagaaagaauuuagugaggucgaaggacggauccaggaucuggagaaguauguggaggacacuaagauugauuuguggagcuacaacgcugaacuccugguugccuuagagaaucagcauaccaucgaccugacagauuccgaaaugaacaaacucuucgagaagacccgucgccaacuuagagaaaaugcggaggacauggguaacggcugcuuuaaaaucuaucacaagugugauaaugccugcauugggucuauaaggaacggaacuuacgaccaugauguguaccgggacgaggcacugaauaaccgauuccagaucaaaggcgucgaacuaaagagcgguuauaaggacuggauuuuguggaucucauuugcuauuaguugcuuccugcucugugugguacugcuuggguuuaucaugugggccugccagaaaggcaauauacgcuguaacaucugcauuuga

SEQ ID NO: 138205 - RNA, 1701 nt, Artificial Sequence
  derived and/or modified CDS sequence (opt3) from hemagglutinin__InfluenzaA__AGQ47847
augaaggccagacugcucauccuucugugcgcuuuggcagccaccgacgcggauacaauuuguauaggcuaccacgcuaacaauagcacugacacgguggauaccgucuuagagaaaaacguuacagugacucauuccguaaaucugcuagaagacucucacaacgggaagcucugcaggcugaaaggaaucgccccgcuucagcuggguaaguguaauauugcaggcugguugcucgggaacccugagugcgauucacugcugccagccaguagcugguccuauaucguggaaacccccaauucuaaaaacggaauuuguuaccccggcgacuucaucgauuaugaggaacuccgggagcaauuaucgucagucagcaguuuugagcgcuucgaaauauuuccuaaggaguccucuuggccaaagcauaauacaaccaaaggugugacugcugcaugcagccacgccgggaaguccucauucuaccgaaaccugcuuugguugacaaagaaggaagacaguuaucccaaacugagcaauucuuacguuaacaagaagggaaaagaggugcuaguccucuggggcgugcaucacccuuccaauucaaaggagcagcagacccuguaucagaacgaaaaugcuuacguaagcguugugaguucuaacuacaaccguagauuuacgccagagaucgccgaaaggcccaaaguccgggaucaagcgggccgcaugaauuauuacuggacucuucuggagccuggggacaccauuaucuucgaagcaaacggaaauuugauugccccaugguaugcuuuugcccucuccagagguuucggcagcgggaucauaacaucgaacgcaucuaugcacgaguguaauacuaagugccagaccccgcagggagcuauuaacuccucacugcccuuucagaauauccauccugugacaauuggcgaguguccaaaauacgugaagagugccaaauuaaggauggucaccggucugcggaacauccccagcauccaaucccgcggacucuucggggcgauugccggcuuuauagaaggcggguggacgggaaugaucgaugguugguauggcuaccaccaucagaaugagcaggggucuggauaugcagcugaccagaaaagcacucaaaacgccauuaauggcaucacaaacaagguuaauucagugauagagaaaaugaacacccaguucacugcuguagguaaggaauuuaauaaccuugaaaaacgaauggagaaccugaauaagaaaguggaugacggguucuuggacauuuggacauacaacgccgagcuacugguccuccuggaaaaugagagaacccuugauuuccacgacaguaacgugaagaaucuguacgaaaagguuaaaauccaguugaagaacaaugcaaaagagaucggcaacggaugcuuugaguucuaucacaagugugauaaugaaugcauggaguccgugaggaacggcacguacgacuauccuaaauacagcaaggaaucuaagcucaaucgggagaaaauugauggggucaagcuggaaccaaugggaguguaucaaaucuuagccauuuacucaaccguagcuaguagccugguucuacucgugucccugggugcgauaucuuuuuggaugugcucgaacggcagccuucagugucguaucugcauuuga

SEQ ID NO: 138206 - RNA, 1701 nt, Artificial Sequence
  derived and/or modified CDS sequence (opt3) from hemagglutinin__InfluenzaA__AGQ47870
augaaggccauccugcucgugcuucugugcaccuucgcugcaacaaacgccgacacuuuguguauuggcuaccacgcgaauaacagcacggauaccgucgacacaguuuuagagaaaaaugugacuguaacccauuccgugaaccugcuagaagauagacacaaugggaagcucugcaaacugggagguauagcuccccuucaucugggcaaguguaacaucgccgggugguugcucggaaauccugagugcgaacugcugcucacagucucuucauggaguuauauuguggagaccagcaacuccgacaauggcacuuguuacccaggugauuuuaucaacuaugaagaguuaagggagcagcugucuucgguuaguagcuucgaacgguuugagauuuucccgaaaacaaguuccuggcccaaucacgaaaccaaccgcggggugacggcagccugcccuuacgcuggagcaaauucuuuuuaucgaaaccuuaucugguuggucaagaagggcaauagcuacccaaaacuguccaagucauaugugaacaacaaaggcaaggaggugcuaguucucugggggauacaucaucccccuacuucaaccgaccaacagagccuguaccagaaugccgaugcuuacguguucgucggaucuuccaaauauaaccguaaguuuaagccagagaucgccgcgagacccaaagugaggggucaggcaggccggaugaauuacuauuggacacuuauugaaccuggggacacuaucaccuucgaggccacaggaaaccugguggucccacgcuacgcuuuugccaugaauagaggcucagguagcgggauuaucauaagugaugcaccgguucacgacuguaacaccaagugccaaacgcccaaaggagcuauuaauacuucuuugccuuuccagaacauccacccagugacaauuggcgaaugucccaaguauguaaaauccaccaagcucaggauggccacuggccugcggaauaucccuagcauccagucgcgcggguuauuuggagcgauugccgguuucauagagggcggguggacaggaaugaucgauggcugguacgguuaucaccaucagaacgaacaagggucuggcuacgcagcugaccagcgauccacccagaaugccauugauggaaucacgaacaaaguaaauucagucauagagaagaugaacacccaguuuacagcugugggcaaggaguucaaucaccuggagaaaagaauugaaaaccucaacaagaaaguugacgacggguuccuugauaucuggacuuacaaugccgaacuguuggugcuacuggagaacgaaaggacccucgacuuucacgauaguaaugucaagaaccuguaugagaaagugcggagccaacuucguaauaacgcaaaggagaucggaaaugguugcuucgaauuuuaccauaagugugacgauacaugcauggaguccguuaaaaacggcacuuaugacuacccaaaguauucugaagagagcaaacugaaucgcgaagagauugaugggguaaaguuggagucaaccagaaucuaccagauucucgccauauauaguacaguggcuuccagccuggucuuacuggugucucuaggagcgaucucauucuggaugugcaguaacggcagccuccaguguaggauuugcaucuga

SEQ ID NO: 138207 - RNA, 1701 nt, Artificial Sequence
  derived and/or modified CDS sequence (opt3) from hemagglutinin__InfluenzaA__AGQ47882
augaaggccauccugcucgugcuucugugcaccuucgcugcaacaaacgccgacacuuuguguauuggcuaccacgcgaauaacagcacggauaccgucgacacaguuuuagagaaaaaugugacuguaacccauuccgugaaccugcuagaagauagacacaaugggaagcucugcaaacugggagguauagcuccccuucaucugggcaaguguaacaucgccgggugguugcucggaaauccugagugcgaacugcugcucacagucucuucauggaguuauauuguggagaccagcaacuccgacaauggcacuuguuacccaggugauuuuaucaacuaugaagaguuaagggagcagcugucuucgguuaguagcuucgaacgguuugagauuuucccgaaaacaaguuccuggcccaaucacgaaaccaaccgcggggugacggcagccugcccuuacgcuggagcaaauucuuuuuaucgaaaccuuaucugguuggucaagaaggagaauagcuacccaaaacuguccaagucauaugugaacaacaaaggcaaggaggugcuaguucucuggggcauacaucaucccccuacuucaaccgaccaacagagccuguaccagaaugccgaugcuuacguguucgucgggucuuccaaauauaaccguaaguuuaagccagaaaucgccgcgagacccaaagugaggggacaggcaggucggaugaauuacuauuggacacuuauugagccuggcgacacuaucaccuucgaagccacagggaaccugguggucccacgcuacgcuuuugccaugaauagaggaucaggcagcgguauuaucauaagugaugcaccgguucacgacuguaacaccaagugccaaacgcccaaaggggcuauuaauacuucuuugccuuuccagaacauccacccagugacaauuggagagugucccaaguauguaaaauccaccaagcucaggauggccacuggccugcggaauaucccuagcauccagucgcgcggcuuauuuggggcgauugccggauucauagaagguggcuggacagggaugaucgauggaugguacggcuaucaccaucagaacgagcaagguucuggguacgcagcugaccagcgauccacccagaaugccauugauggcaucacgaacaaaguaaauucagucauagagaagaugaacacccaguuuacagcugugggaaaggaauuuaaucaccuggagaaaagaauugaaaaccucaacaagaaaguugacgacggcuuccuugauaucuggacuuacaaugccgagcuguuggugcuacuggaaaacgagaggacccucgacuuccacgauaguaaugucaagaaccuguaugagaaagugcggagccaacuucguaauaacgcaaaggaaaucgggaauggaugcuucgaguuuuaccauaagugugacgauacaugcauggaauccguuaaaaacgguacuuaugacuacccaaaguauucugaggaaagcaaacugaaucgcgaggagauugauggcguaaaguuggaaucaaccagaaucuaccagauucucgccauauauaguacaguggcuuccagccuggucuuacuggugucucuaggggcgaucucauucuggaugugcaguaacggaagccuccaguguaggauuugcaucuga

SEQ ID NO: 138208 - RNA, 1701 nt, Artificial Sequence; identical to SEQ ID NO: 137143
  derived and/or modified CDS sequence (opt3) from hemagglutinin__InfluenzaA__AGQ47894

SEQ ID NO: 138209 - RNA, 1701 nt, Artificial Sequence
  derived and/or modified CDS sequence (opt3) from hemagglutinin__InfluenzaA__AGQ47906
augaagaccaucauugcccugagcuacauauucugccucgcucuuggccaggaccugcccgggaacgauaauuccacagcaacuuuguguuuaggacaccaugccgugccuaacgguacgcuggucaaaaccaucacagacgaucaaauugagguuacuaaugcgaccgaacuugugcagucuucaaguacaggcaagaucugcaacaauccacacaggauucucgacgggaucgauuguacccugauagacgcucuacugggagauccgcauugcgacguauuucagaacgagacuugggauuuguucguggaaagaagcaaagccuuuuccaauuguuaucccuacgacgucccugauuaugcaucucuccggucgcugguggccucaagcggcacacuggaguucaucaccgaagguuuuacguggacugggguuacccagaacggaggcaguaaugcuugcaagcgcggcccaggguccggauucuuuucucgacucaacugguuaacaaaaagcgguuccacuuaccccgugcugaaugucaccaugccuaacaaugacaacuucgauaaguuguauauuuggggcauccaccauccaucaacaaaucaagagcagaccaguuuguacgugcaggcaagcgggcguguaacgguuucuacuagaaggucccagcaaacaauuauccccaacauaggaucacggccuugggugcgcggccugagcaguagaauuucuaucuauuggaccauugucaagccaggugacgugcuagugaucaacuccaaugggaaccucaucgccccgaggggauacuuuaaaaugcggacuggcaagagcucgauuaugcgcucugacgcucccauagauacauguaucuccgagugcauuaccccuaauggcucaaucccaaacgacaaacccuuccagaaugucaacaagauaacguacggggccuguccuaaauauguuaagcagaauacccugaaacuugcgacaggaaugcgaaacgugccagaaaagcagacuagaggucuguuuggcgcaauugccggguucaucgagaauggaugggaaggcaugaucgaugguugguacggguuuaggcaccaaaacagugagggcaccggacaggcugccgaccuuaagagcacacaggcagcuauugaucaaaucaauggcaaacucaaccggguaauugagaagacuaaugaaaaauuccaccagauagagaaggaguucuccgaaguggaagggcguauccaggaccuggagaaauaugucgaggauaccaagauugacuuauggucuuacaacgccgaacugcucguggcgcuugagaaucagcauacaaucgaucugaccgacagcgaaaugaacaaguuguuugagaaaacucgcagacaacuaagggaaaacgccgaggauaugggaaaugguugcuucaagaucuaucacaaaugugacaacgcaugcauugagucaauacggaauggcacguacgaccaugauguuuaucgagacgaagcucugaacaaucgcuuucagaucaaggggguggagcucaaaaguggauacaaggauuggauucuguggaucuccuucgccauuagcugcuuucuucugugugucguguugcucggcuucaucaugugggcuugccagagagguaacauaagguguaauaucugcauuuga

SEQ ID NO: 138210 - RNA, 1701 nt, Artificial Sequence
  derived and/or modified CDS sequence (opt3) from hemagglutinin__InfluenzaA__AGQ47918
augaagaccaucauugcccugagcuacauauucugccucgcucuuggccaggaccugcccgggaacgauaauaacacagcaacuuuguguuuaggacaccaugccgugccuaaugguacgcuggucaaaaccaucacagacgaucaaauugagguuacuaacgcgaccgaacuugugcaguccucuucaacaggcaagaucugcaauaacccacacaggauucucgacgggaucgauuguacccugauagacgcucuacugggagauccgcauugcgacguauuucagaaugagacuugggauuuguucguggaaagaaguaaagccuuuagcaacuguuaucccuacgacgucccugauuaugcaucccuccggucucugguggccucgucaggcacacuggaguucaucaccgaagguuuuacguggacugggguuacccagaauggaggcagcaacgcuugcaagcgcggcccagggaguggauucuuuucccgacucaauugguuaacaaaaucugguagcacuuaccccgugcugaacgucaccaugccuaauaacgacaauuucgauaaacuuuauauuuggggcgugcaccauccauccacaaaccaagagcagaccucauuguacguacaggcaagugggcguguuacggugagcacuagaaggucucagcaaacaaucauucccaacaucggaucccggccuuggguccgcggccugucaagcagaauaaguauuuauuggaccaucgugaagccaggugacgugcuagucauuaauucuaacgggaaucucaucgccccgaggggauacuuuaagaugcggacuggcaaguccagcaucaugcgcucggacgcucccauugauacauguauaucugagugcaucaccccuaacggcuccauuccaaaugacaaacccuuccagaacguuaauaagaucacguacggggccuguccuaaauaugugaagcagaacacccugaaacuugcgacaggaaugcgaaauguaccagaaaagcagacuagaggucuguuuggcgcaauagccggguucauugagaacggaugggaaggcaugaucgaugguugguacggguuuaggcaccaaaauucagagggcaccggacaggcugccgacuugaagaguacacaggcagcuaucgaucaaauuaacggcaaacucaaucgggugaucgagaagacuaacgaaaaauuccaccagauugagaaggaguucagcgaagucgaagggcguauacaggaccuggagaaauauguggaggauaccaagaucgacuuaugguccuacaaugccgaacugcucguugcgcuugagaaccagcauacaauugaucugaccgacucugaaaugaacaaguuguuugagaaaacucgcagacaacuaagggaaaaugccgaggauaugggaaacgguugcuucaagaucuaucacaaaugugacaaugcaugcaucgagagcauucggaacggcacguacgaccaugauguguaucgagacgaagcucugaauaaccgcuuucagauaaagggggucgagcucaaaucaggauacaaggauuggauccuguggauuaguuucgccaucuccugcuuucuucugugugugguauugcucggcuucauuaugugggcuugccagagagguaauaucagguguaacauaugcaucuga

SEQ ID NO: 138211 - RNA, 1701 nt, Artificial Sequence
  derived and/or modified CDS sequence (opt3) from hemagglutinin__InfluenzaA__AGQ47930
augaaggccaaccugcucgugcuucugugcgcuuuggcagccgcggacgcugauaccaucuguauuggcuaccacgccaauaacagcacagacacugucgauacggcauuagagaaaaauguuaccgugacacauuccguaaaccugcuagaagacucucacaaugggaagcucugcagacugaaaggaauagcuccccuucagcuggguaaguguaacaucgccggcugguugcucgggaauccugagugcgauccacugcugccggugaggucauggaguuauauugucgaaacucccaacagcgagaauggaaucuguuacccuggcgacuucauugauuaugaagaacuccgggagcaauuauccucugugucgucauuugaacgcuucgagaucuuuccaaaagaaagcaguuggcccaaccauaauaccaacaaggguguuacagcagccugcucccacgcugggaagucuagcuucuaccgaaaucugcuuugguugaccgagaaagagggauccuauccuaagcugaaaaacucauacgugaauaagaaaggcaaggaaguccuagugcucuggggcauacaucacccaaguaacagcaaggaccagcagaaccuguaucagaaugagaacgccuacguaucuguugugacuuccaauuacaaccguagauuuacacccgaaaucgcggagaggccuaaaguccgggaucaagcagggcgcaugaauuauuacuggacccuucugaagccaggagacacgauuaucuucgaagccaacgguaauuugauugcuccgauguaugccuuugcacucucaagaggcuucgggagcggaaucauaacuucaaacgcuucuaugcacgaguguaauaccaaaugccagacaccccugggcgccauuaacuccagcuuaccuuuucagaauauccauccagugacuauuggugagugucccaaguacgugaggucggcgaaacugcggauggucaccgggcuccgcaacaucccuucuauccagucccgaggacuuuucggcgccauugcaggcuuuauagaagggggauggacagguaugaucgauggcugguauggguaccaccaucaaaaugagcagggaucaggcuaugcugccgaccagaagaguacccagaacgcuauuaaugguaucacgaacaaaguuaacagcgugauagaaaagaugaauauucaauucacugccguagggaaggaguuuaacaaacuggaaaagagaauggagaauuugaacaaaaagguggaugacggcuuccuagacaucuggacauacaaugcagagcugcucguccugcuugaaaacgagaggacccuggauuuccacgacuccaaugugaaaaacuuguacgaaaagguuaagucucagcucaaaaauaacgccaaggagaucggaaauggcugcuuugaguucuaucacaaaugugauaacgagugcauggagagcgugcggaaugggacuuacgacuauccaaaguacucagaagagaguaaacugaaccgugaaaaggucgauggagugaaguuagaguccauggguauuuaucagauccuggcuauuuacagcacaguagcgucuagucuaguucuccuggugagucuuggcgcaaucagcuuuuggaugugcuccaaugggucuuugcaaugucgcauaugcauuuga

SEQ ID NO: 138212 - RNA, 1698 nt, Artificial Sequence; identical to SEQ ID NO: 131326
  derived and/or modified CDS sequence (opt3) from hemagglutinin__InfluenzaA__AGQ47942

SEQ ID NO: 138213 - RNA, 1698 nt, Artificial Sequence
  derived and/or modified CDS sequence (opt3) from hemagglutinin__InfluenzaA__AGQ47954
augaaggccaaccugcucgugcuucugugcgcuuuggcagccgcggacgcugauaccaucuguauuggcuaccacgccaauaacagcacagacacugucgauacgguuuuagagaaaaaugugaccguaacacauuccgugaaccugcuagaagacucucacaaugggaagcucugcagacugaaaggaauagcaccccuucagcuggguaaguguaacaucgccggcugguugcucgggaauccugagugcgauccacugcugccggucaggucauggaguuauauuguggaaacucccaacagcgagaauggaaucuguuacccuggcgacuucauugauuaugaagaacuccgggagcaauuauccucuguuucgucauuugaacgcuucgagaucuuuccaaaagaaagcaguuggcccaaccauaauaccaacggugugacagcugcaugcucccacgaggggaagucuagcuucuaccgaaaucugcuuugguugaccgagaaggaaggauccuauccuaaacugaagaacucauacgucaauaaaaagggcaaagaggugcuaguacucuggggcauacaucacccacccaacaguaaggaacagcagaaccuguaucguaaugagaacgccuacguuagcguggucacuucuaauuacaacagaagguuuacaccugaaaucgcugagcggccaaaggugcgcgaccaggccgggagaaugaauuauuacuggacccuucugaaaccgggagauacgauuaucuucgaggcgaacgguaauuugauugcacccauguaugccuuugcucucuccaggggcuucgggucaggaaucauaacuagcaacgccaguaugcacgaauguaauaccaagugccaaacaccucugggcgcaauuaacucuuccuuaccauaccagaauauccaucccgugacuauuggugaguguccuaaauauguccggagcgcuaagcugcgcaugguuaccgggcuccgaaacaucccaucgauccagucuagaggacuuuuuggcgccauugcgggcuucauagaagggggauggacagguaugaucgacggcugguacggguaucaccaucagaaugagcaaggauccggcuacgccgcagaucagaaaucaacccagaacgcuauuaaugguaucacgaacaaggugaacacuguaauagagaaaaugaauauucaguuuacagccguggggaaggaguucaacaagcuggagaaaaggauggaaaauuugaacaagaaagucgacgauggcuuucuagacaucuggaccuacaaugcugagcugcucgugcugcuugaaaacgagcggacucuggacuuccacgauaguaauguuaagaacuuguaugaaaaagucaagagccaacucaagaauaacgccaaagagaucggaaauggcugcuucgaguuuuaccacaagugugacaacgaaugcauggaguccgugcguaaugggacauaugauuaccccaaauauucugaagagagcaagcugaaccgcgagaaaguggacggaguaaaguuagaaucaauggguauuuaccagauccuggcaauuuauaguaccguugccuccagccuagugcuccuggucucucuuggcgcuauaucauucuggaugugcaguaaugggagcuugcaguguagaaucugcauuuga

SEQ ID NO: 138214 - RNA, 1698 nt, Artificial Sequence
  derived and/or modified CDS sequence (opt3) from hemagglutinin__InfluenzaA__AGQ47966
augaaggccaaccugcucgugcuucugugcgcuuuggcagccgcggacgcugauaccaucuguauuggcuaccacgccaauaacagcacagacacugucgauacgguuuuagagaaaaaugugaccguaacacauuccgugaaccugcuagaagacucucacaaugggaagcucugcagacugaaaggaauagcaccccuucagcuggguaaguguaacaucgccggcugguugcucgggaauccugagugcgauccacugcugccggucggaucauggaguuauauuguggaaacucccaacagcgagaauggcaucuguuacccuggugacuucauugauuaugaggaacucagggagcaauuauccucuguuucgucauuugaacgguucgagaucuuuccaaaagaaagcaguuggcccgaccauaacaccaauggggugacagcugcaugcucccacgagggaaagaacucuuucuaccgcaaucugcuuugguugaccgagaaggaaagcuccuauccuaaacugaagaacucauacgucaauaaaaagggcaaagaggugcuaguacucuggggcauacaucacccacccaacaguaaggaacagcagaaccuguaucagaaugagaacgccuacguuagcguggucacuucuaauuacaaccgacguuuuacaccugaaaucgcugagagaccaaaggugaaagaucaagccgggaggaugaauuauuacuggacccuucugaagccgggagacacgauuaucuucgaggcgaacgguaauuugauugcacccauguaugccuuugcucucucccggggcuucgggucaggaaucauaacuagcaacgccaguaugcacgaauguaauaccaaaugccagacaccucugggcgcaauuaacucuuccuuaccauaccagaauauccaucccgugacuauuggugaguguccuaaguauguccgcagcgcuaaacugagaaugguuaccgggcucaggaacaucccaucgauccagucucggggacuuuuuggcgccauugcgggcuucauagaagggggauggacagguaugaucgauggcugguacggguaucaccaucaaaaugagcagggauccggcuacgccgcagaccagaagucaacccagaacgcuauuaaugguaucacgaacaaagugaacacuguaauagaaaagaugaauauucaauuuacagccguggggaaggaguucaacaaacuggagaagcgcauggaaaauuugaacaaaaaggucgaugacggcuuucuagacaucuggaccuacaaugcugagcugcucgugcugcuugaaaacgagcgaacucuggauuuccacgacaguaauguuaaaaacuuguaugaaaaggucaagagccagcucaaaaauaacgccaaggagaucggaaauggcugcuucgaguuuuaccacaaaugugauaacgaaugcauggaguccgugagaaaugggacauaugacuaccccaaguauucugaagagagcaaacugaacagggagaagguggauggaguaaaguuagaaucaauggguauuuaccagauccuggcaauuuauaguaccguugccuccagccuagugcuccuggucucucuuggcgcuauaucauucuggaugugcaguaaugggagcuugcaaugucggaucugcauuuga

SEQ ID NO: 138215 - RNA, 1698 nt, Artificial Sequence
  derived and/or modified CDS sequence (opt3) from hemagglutinin__InfluenzaA__AGQ47978
augaaggccaaccugcucgugcuucugugcgcuuuggcagccgcggacgcugauaccaucuguauuggcuaccacgccaauaacagcacagacacugucgauacgguuuuagagaaaaaugugaccguaacacauuccgugaaccugcuagaagacucucacaaugggaagcucugcagacugaaaggaauagcaccccuucagcuggguaaguguaacaucgccggcugguugcucgggaauccugagugcgauccacugcugccggucggaucauggaguuauauuguggaaacucccaacagcgagaauggcaucuguuacccuggugacuucauugauuaugaggaacucagggagcaauuauccucuguuucgucauuugaacgguucgagaucuuuccaaaagaaagcaguuggcccgaccauaacaccaauggggugacagcugcaugcucccacgagggaaagaacucuuucuaccgcaaucugcuuugguugaccaagaaagagagcuccuauccugaacugaagaacucauacgucaauaaaaagggcaaagaggugcuaguacucuggggcauacaucacccacccaacaguaaggaacagcagaaccuguaucagaaugagaacgccuacguuagcguggucacuucuaauuacaaccgacguuuuacaccugaaaucgcugagagaccaaaggugaaagaucaagccgggaggaugaauuauuacuggacccuucugaagccgggagacacgauuaucuucgaggcgaacgguaauuugauugcacccauguaugccuuugcucucucccggggcuucgggucaggaaucauaacuagcaacgccaguaugcacgaauguaauaccaaaugccagacaccucugggcgcaauuaacucuuccuuaccauaccagaauauccaucccgugacuauuggugaguguccuaaguauguccgcagcgcuaaacugagaaugguuaccgggcucaggaacaucccaucgauccagucucggggacuuuuuggcgccauugcgggcuucauagaagggggauggacagguaugaucgauggcugguacggguaucaccaucaaaaugagcagggauccggcuacgccgcagaccagaagucaacccagaacgcuauuaaugguaucacgaacaaagugaacacuguaauagaaaagaugaauauucaauuuacagccguggggaaggaguucaacaaacuggagaagcgcauggaaaauuugaacaaaaaggucgaugacggcuuucuagacaucuggaccuacaaugcugagcugcucgugcugcuugaaaacgagcgaacucuggauuuccacgacaguaauguuaaaaacuuguaugaaaaggucaagagccagcucaaaaauaacgccaaggagaucggaaauggcugcuucgaguuuuaccacaaaugugauaacgaaugcauggaguccgugagaaaugggacauaugacuaccccaaguauucugaagagagcaaacugaacagggagaagguggauggaguaaaguuagaaucaauggguauuuaccagauccuggcaauuuauaguaccguugccuccagccuagugcuccuggucucucuuggcgcuauaucauucuggaugugcaguaaugggagcuugcaaugucggaucugcauuuga

SEQ ID NO: 138216 - RNA, 1698 nt, Artificial Sequence
  derived and/or modified CDS sequence (opt3) from hemagglutinin__InfluenzaA__AGQ47990
augaaggccaaccugcucgugcuucugugcgcuuuggcagccgcggacgcugauaccaucuguauuggcuaccacgccaauaacagcacagacacugucgauacgguuuuagagaaaaaugugaccguaacacauuccgugaaccugcuagaagacucucacaaugggaagcucugcagacugaaaggaauagcaccccuucagcuggguaaguguaacaucgccggcugguugcucgggaauccugagugcgauccacugcugccggucggaucauggaguuauauuguggaaacucccaacagcgagaauggcaucuguuacccuggugacuucauugauuaugaggagcucagggagcaauuauccucuguuucgucauuugaacgguucaaaaucuuuccaaaggagagcaguuggcccgaccauaacaccaauggggugacagcugcaugcucccacgaaggaaagaacucuuucuaccgcaaucugcuuugguugaccaaaaaggagagcuccuauccugagcugaaaaacucauacgucaauaagaaaggcaaggaagugcuaguacucuggggcauacaucacccacccaacaguaaggagcagcagaaccuguaucagaaugaaaacgccuacguuagcguggucacuucuaauuacaaccgacguuuuacaccugagaucgcugaaagaccaaaagugaaggaucaagccgggaggaugaauuauuacuggacccuucugaaaccgggagacacgauuaucuucgaggcgaacgguaauuugauugcacccauguaugccuuugcucucucccggggcuucgggucaggaaucauaacuagcaacgccaguaugcacgaguguaauaccaagugccagacaccucugggcgcaauuaacucuuccuuaccauaccagaauauccaucccgugacuauuggugaauguccuaaauauguccgcagcgcuaagcugagaaugguuaccgggcucaggaacaucccaucgauccagucucggggacuuuuuggcgccauugcgggcuucauagaagggggauggacagguaugaucgauggcugguacggguaucaccaucaaaaugaacagggauccggcuacgccgcagaccagaaaucaacccagaacgcuauuaaugguaucacgaacaaggugaacacuguaauagagaagaugaauauucaauuuacagccguggggaaagaguucaacaagcuggaaaaacgcauggagaauuugaacaagaaagucgaugacggcuuucuagacaucuggaccuacaaugcugaacugcucgugcugcuugagaacgaacgaacucuggauuuccacgacaguaauguuaagaacuuguaugagaaggugaaaagccagcucaagaauaacgccaaagaaaucggaaauggcugcuucgaguuuuaccacaagugugauaacgagugcauggaauccgucagaaaugggacauaugacuaccccaaauauucugaggaaagcaagcugaacagggagaagguggauggaguaaaauuagagucaauggguauuuaccagauccuggcaauuuauaguaccguugccuccagccuagugcuccuggucucucuuggcgcuauaucauucuggaugugcaguaaugggagcuugcaaugucggaucugcauuuga

SEQ ID NO: 138217 - RNA, 1698 nt, Artificial Sequence
  derived and/or modified CDS sequence (opt3) from hemagglutinin__InfluenzaA__AGQ48002
augaaggccaaccugcucgugcuucugugcgcuuuggcagccgcggacgcugauaccaucuguauuggcuaccacgccaauaacagcacagacacugucgauacgguuuuagagaaaaaugugaccguaacacauuccgugaaccugcuagaagacucucacaaugggaagcucugcagacugaaaggaauagcaccccuucagcuggguaaguguaacaucgccggcugguugcucgggaauccugagugcgauccacugcugccggucggaucauggaguuauauuguggaaacucccaacagcgagaauggcaucuguuacccuggugacuucauugauuaugaagaacucagggagcaauuauccucuguuucgucauuugaacgguucaaaaucuuuccaaaggagagcaguuggcccgaccauaacaccaauggggugacagcugcaugcucccacgaaggaaagaacucuuucuaccgcaaucugcuuugguugaccaaaaaggagagcuccuauccugagcugaaaaacucauacgucaauaagaaacgaaaggaagugcuaguacucuggggcauacaucacccacccaacaguaaggagcagcagaaccuguaucagaaugaaaacgccuacguuagcguggucacuucuaauuacaaccguagauuuacaccugagaucgcugaaaggccaaaagugaaggaucaagccggccggaugaauuauuacuggacccuucugaaaccgggggacacgauuaucuucgaggcgaacggaaauuugauugcacccauguaugccuuugcucucucccgcgguuucggcucagggaucauaacuagcaacgccaguaugcacgaguguaauaccaagugccagacaccucugggagcaauuaacucuuccuuaccauaccagaauauccaucccgugacuauuggcgaauguccuaaauaugucagaagcgcuaagcugaggaugguuaccggucuccggaacaucccaucgauccagucucgcgggcuuuuuggagccauugcgggcuucauagagggcggguggacaggaaugaucgaugguugguacggcuaucaccaucaaaaugaacagggguccggauacgccgcagaccagaaaucaacccagaacgcuauuaauggcaucacgaacaaggugaacacuguaauagagaagaugaauauucaauuuacagccguggguaaagaguucaacaagcuggagaaacgaauggagaauuugaacaagaaagucgaugacggguuucuagacaucuggaccuacaaugcugaacugcucgugcugcuugagaacgaaagaacucuggauuuccacgacaguaauguuaagaacuuguaugagaaggugaaaagccagcucaagaauaacgccaaagaaaucggcaauggaugcuucgaguuuuaccacaagugugauaacgagugcauggaauccgucaggaauggcacauaugacuaccccaaauauucugaggaaagcaagcugaaccgggagaagguggaugggguaaaauuagagucaaugggaauuuaccagauccuggcaauuuauaguaccguugccuccagccuagugcuccuggucucucuuggugcuauaucauucuggaugugcaguaauggcagcuugcaaugucguaucugcauuuga

SEQ ID NO: 138218 - RNA, 1698 nt, Artificial Sequence
  derived and/or modified CDS sequence (opt3) from hemagglutinin__InfluenzaA__AGQ48014
augaaggccaaccugcucgugcuucugugcgcuuuggcagccgcggacgcugauaccaucuguauuggcuaccacgccaauaacagcacagacacugucgauacgguuuuagagaaaaaugugaccguaacacauuccgugaaccugcuagaagacucucacaaugggaagcucugcagacugaaaggaauagcaccccuucagcuggguaaguguaacaucgccggcugguugcucgggaauccuggaugcgauccacugcugccggucggcucauggaguuauauuguggagacucccaacagcgaaaaugguaucuguuacccuggggacuucauugauuaugaggaacucagggagcaauuauccucuguuucgucauuugagcgguucaaaaucuuuccaaaggaaagcaguuggcccgaccauaacaccaauggagugacagcugcaugcucccacgagggcaagaacucuuucuaccgcaaucugcuuugguugaccaaaaaggaaagcuccuauccugagcugaaaaacucauacgucaauaagaaacgaaaggaggugcuaguacucuggggcauacaucacccacccaacaguaaggaacagcagaaccuguaucagaaugagaacgccuacguuagcguggucacuucuaauuacaaccguagauuuacaccugaaaucgcugagaggccaaaagugaaggaucaagccgggcggaugaauuauuacuggacccuucugaaaccgggagacacgauuaucuucgaagcgaacgguaauuugauugcacccauguaugccuuugcucucucccgcggcuucgggucaggaaucauaacuagcaacgccaguaugcacgaguguaauaccaagugccagacaccucugggcgcaauuaacucuuccuuaccauaccagaauauccaucccgugacuauuggugaguguccuaaauaugucagaagcgcuaagcugaggaugguuaccgggcuccggaacaucccaucgauccagucucgcggacuuuuuggcgccauugcgggcuucauagaagggggauggacagguaugaucgauggcugguacggguaucaccaucaaaaugagcagggauccggcuacgccgcagaccagaaaucaacccagaacgcuauuaaugguaucacgaacaaggugaacacuguaauagaaaagaugaauauucaauuuacagccguggggaaagaguucaacaagcuggaaaaacgaauggagaauuugaacaagaaagucgaugacggcuuucuagacaucuggaccuacaaugcugagcugcucgugcugcuugaaaacgagagaacucuggauuuccacgacaguaauguuaagaacuuguaugaaaaggugaaaagccagcucaagaauaacgccaaagagaucggaaauggcugcuucgaauuuuaccacaagugugauaacgagugcauggaguccgucaggaaugggacauaugacuaccccaaauauucugaagagagcaagcugaaccgggaaaagguggauggaguaaaauuagagucaauggguauuuaccagauccuggcaauuuauaguaccguugccuccagccuagugcuccuggucucucuuggcgcuauaucauucuggaugugcaguaaugggagcuugcaaugucguaucugcauuuga

SEQ ID NO: 138219 - RNA, 1698 nt, Artificial Sequence
  derived and/or modified CDS sequence (opt3) from hemagglutinin__InfluenzaA__AGQ48026
augaaggccaaccugcucgugcuucugugcgcuuuggcagccgcggacgcugauaccaucuguauuggcuaccacgccaauaacagcacagacacugucgauacgguuuuagagaaaaaugugaccguaacacauuccgugaaccugcuagaagacucucacaaugggaagcucugcaaacugaagggaauagcaccccuucagcuggguaaauguaacaucgccggcugguugcucgggaauccuggaugcgauccacugcugccggucggcucauggaguuauauuguggagacucccaacagcgaaaaugguaucuguuacccuggggacuucauugauuaugaggaacucagagagcaauuauccucuguuucgucauuugagagguucaagaucuuuccaaaggaaagcaguuggcccgaccauaacaccaauggagugacagcugcaugcucccacgagggcaaaaacucuuucuaccggaaucugcuuugguugaccaagaaagaaagcuccuauccugagcugaagaacucauacgucaauaaaaagcgcaaggaggugcuaguacucuggggcauacaucacccacccaacaguaaagaacagcagaaccuguaucagaaugagaacgccuacguuagcguggucacuucuaauuacaaccgacguuuuacaccugaaaucgcugagagaccaaaggugaaagaucaagccgggaggaugaauuauuacuggacccuucugaagccgggagacacgauuaucuucgaagcgaacgguaauuugauugcacccauguaugccuuugcucucucccggggcuucgggucaggaaucauaacuagcaacgccaguaugcacgaguguaauaccaaaugccagacaccucugggcgcaauuaacucuuccuuaccauaccagaauauccaucccgugacuauuggugaguguccuaaguauguccgcagcgcuaaacugagaaugguuaccgggcucaggaacaucccaucgauccagucucggggacuuuuuggcgccauugcgggcuucauagaagggggauggacagguaugaucgauggcugguacggguaucaccaucaaaaugagcagggauccggcuacgccgcagaccagaagucaacccagaacgcuauuaaugguaucacgaacaaggugaacacuguaauagaaaagaugaauauucaauuuacagccguggggaaggaguucaacaaacuggaaaagcgcauggagaauuugaacaaaaaggucgaugacggcuuucuagacaucuggaccuacaaugcugagcugcucgugcugcuugaaaacgagcgaacucuggauuuccacgacaguaauguuaagaacuuguaugaaaaagugaaaagccagcucaaaaauaacgccaaggagaucggaaauggcugcuucgaauuuuaccacaaaugugauaacgagugcauggaguccgucagaaaugggacauaugacuaccccaaguauucugaagagagcaagcugaacagggaaaaaguggauggaguaaaguuagagucaauggguauuuaccagauccuggcaauuuauaguaccguugccuccagccuagugcuccuggucucucuuggcgcuauaucauucuggaugugcaguaaugggagcuugcaaugucggaucugcauuuga

SEQ ID NO: 138220 - RNA, 1698 nt, Artificial Sequence
  derived and/or modified CDS sequence (opt3) from hemagglutinin__InfluenzaA__AGQ48038
augaaggccaaccugcucgugcuucugugcgcuuuggcagccgcggacgcugauaccaucuguauuggauaccacgccaauaacagcacagacacugucgauacgguuuuagagaaaaaugugaccguaacacauuccgugaaccugcuagaagacucucacaaugggaagcucugcaaacugaagggaauagcaccccuucagcuggguaaauguaacaucgccggcugguugcucgggaauccuggaugcgauccacugcugccggucggcucauggaguuauauuguggagacucccaacagcgaaaaugguaucuguuacccuggggacuucauugauuaugaggaacucagagagcaauuauccucuguuucgucauuugagagguucaagaucuuuccaaaggaaagcaguuggcccgaccauaacaccaauggagugacagcugcaugcucccacgagggcaaaaacucuuucuaccggaaucugcuuugguugaccaagaaagaaagcuccuauccugagcugaagaacucauacgucaauaaaaagcgcgaggaagugcuaguacucuggggcauacaucacccacccaacagugaggaacagcagaaccuguaucagaaugagaacgccuacguuagcguggucacuucuaauuacaaccgacguuuuacaccugaaaucgcugagagaccaaaggugaaagggcaagccggaaggaugaauuauuacuggacccuucugaagccgggugauacgauuaucuucgaggcgaacggcaauuugauugcacccauguaugccuuugcucucucccggggguucggaucaggcaucauaacuagcaacgccaguaugcacgaauguaauaccaaaugccagacaccucugggugcaauuaacucuuccuuaccauaccagaauauccaucccgugacuauuggggaguguccuaaguauguccgcagcgcuaaacugagaaugguuaccggacucaggaacaucccaucgauccagucucggggccuuuuuggcgccauugcgggguucauagaaggagguuggacaggcaugaucgacgggugguacggauaucaccaucaaaaugagcagggcuccgguuacgccgcagaucagaagucaacccagaacgcuauuaaugggaucacgaacaaagugaacacuguaauagaaaagaugaauauucaauuuacagccgugggcaaggaguucaacaaacuggagaagcgcauggaaaauuugaacaaaaaggucgacgauggauuucuagacaucuggaccuacaaugcugagcugcucgugcugcuugaaaacgagcgaacucuggacuuccacgauaguaauguuaaaaacuuguaugaaaaggucaagagccagcucaaaaauaacgccaaggagaucggcaaugggugcuucgaguuuuaccacaaaugugacaacgaaugcauggaguccgugagaaauggaacauaugauuaccccaaguauucugaagagagcaaacugaacagggagaagguggacgguguaaaguuagaaucaaugggcauuuaccagauccuggcaauuuauaguaccguugccuccagccuagugcuccuggucucucuuggggcuauaucauucuggaugugcaguaauggcagcuugcaaugucggaucugcauuuga

SEQ ID NO: 138221 - RNA, 1698 nt, Artificial Sequence
  derived and/or modified CDS sequence (opt3) from hemagglutinin__InfluenzaA__AGQ48050
augaaggccaaccugcucgugcuucugugcgcuuuggcagccgcggacgcugauaccaucuguauuggauaccacgccaauaacagcacagacacugucgauacgguuuuagagaaaaaugugaccguaacacauuccgugaaccugcuagaagacucucacaaugggaagcucugcaaacugaagggaauagcaccccuucagcuggguaaauguaacaucgccggcugguugcucgggaauccuggaugcgauccacugcugccggucggcucauggaguuauauuguggagacucccaacagcgaaaaugguaucuguuacccuggggacuucauugauuaugaggaacucagagagcaauuauccucuguuucgucauuugagagguucaagaucuuuccaaaggaaagcaguuggcccgaccauaacaccaauggagugacagcugcaugcucccacgagggcaaaaacucuuucuaccggaaucugcuuugguugaccaagaaagaaagcuccuauccugagcugaagaacucauacgucaauaaaaagcgcgaggaagugcuaguacucuggggcauacaucacccacccgauagugaggaacagcagaaccuguaucagaacgagaaugccuacguuagcguggucacuucuaacuacaaucgacguuuuacaccugaaaucgcugagagaccaaaggugaaagggcaagccggaaggaugaacuauuacuggacccuucugaagccgggugacacgauuaucuucaaagcgaauggcaacuugauugcacccauguaugccuuugcucucucccggggguucggaucaggcaucauaacuagcaaugccaguaugcacgaguguaacaccaagugccagacaccucugggugcaauuaauucuuccuuaccauaccagaacauccaucccgugacuauuggggaauguccuaaauauguccgcagcgcuaagcugagaaugguuaccggacucaggaauaucccaucgauccagucucggggccuuuuuggcgccauugcgggguucauagagggagguuggacaggcaugaucgaugggugguacggauaucaccaucaaaacgaacagggcuccgguuacgccgcagaccagaaaucaacccagaaugcuauuaacgggaucacgaauaaggugaacacuguaauagagaagaugaacauucaauuuacagccgugggcaaagaguucaauaagcuggaaaaacgcauggagaacuugaauaagaaagucgaugacggauuucuagacaucuggaccuacaacgcugaacugcucgugcugcuugagaaugaacgaacucuggauuuccacgacaguaacguuaagaauuuguaugagaaggugaaaagccagcucaagaacaaugccaaagaaaucggcaacgggugcuucgaguuuuaccacaagugugauaaugagugcauggaauccgucagaaacggaacauaugacuaccccaaauauucugaggaaagcaagcugaauagggagaagguggaugguguaaaauuagagucaaugggcauuuaccagauccuggcaauuuauaguaccguugccuccagccuagugcuccuggucucucuuggggcuauaucauucuggaugugcaguaacggcagcuugcaaugucggaucugcauuuga

SEQ ID NO: 138222 - RNA, 1689 nt, Artificial Sequence
  derived and/or modified CDS sequence (opt3) from hemagglutinin__InfluenzaA__AGQ80946
auggccaucauuuaccugauacuccuuuucaccgcugugagaggcgaccagaucugcauuggguaucacagcaacaauuccacagagaaggucgauacuauccuggaaaggaacguuacggugacccaugcacaagacauuuuggagaaaacacacaauggaaaguuauguaaacugaacgguauacccccucuagaacucggcgauugcucuaucgccggguggcugcuuggaaauccagagugugaccggcuguugacuguaccggaauggucauacaucauggagaaggagaacccccgcaauggccucugcuauccugguaguuuuaacgauuacgaagaacugaaacaucugcucagcuccgugacccacuucgaaaaggucaagauuuuaccaaaagaccgauggacacagcauaccacuacagggggaucucgugcgugugcugugucgggcaaucccucauuuuucagaaacaugguuuggcugaccaagaaaggcccuaauuauccaguggccaaggggagcuacaacaauacgaguggagaucagaugcuuaucauuugggguguccaccaccccaacgacgaggcagagcagaggacuuuguaucaaaaugugggcaccuacguauccguugggacaucuacucugaacaaacggagcgugccugaaaucgccacccgcccaaaggucaacggacagggcgguagaauggaguuuuccuggacaauacuagaugugcucgacaccauuaauuucgaaucaacggggaaccugaucgcuccggaguacggauuuaagauuaguaaaaggggcagcucuggcaucaugaagacugaagggacacuugagaauugcgagaccaaaugucagacuccccugggagcaaucaacacaaccuugccuuuccauaauauucacccacucacgauaggugaaugccccaaguaugugaaauccgagcggcuggucuuagccaccggccugcgcaacguuccucagaucgaaucacgagggcucuuuggagcuauugccggcuucaucgaggguggguggcaaggcaugguggauggaugguacggcuaucaucacagcaaugaccaggggaguggauacgcggcagauaaggaaucuacacagaaagccauagacgguauuacuaacaagguaaauuccgugaucgagaagaugaacacccaguuugaggcugucggcaaagaguucagcaaucuugagaagagacuggaaaacuugaauaaaaagauggaggacggguuucuagauguguggacauauaacgccgaacugcucguucugauggagaaugagaggacucuugacuuccacgauucgaacgugaaaaaccuguacgacaagguccggaugcaauugcgugauaaugcaaaggaacucggaaacggcuguuucgaguuuuaucauaaaugcgacgaugaauguaugaacucugugaagaaugguaccuacgacuacccaaaauaugaggaggaauccaagcugaaucgcaacgagaucaaagggguaaaguuaucaaauaugggcguuuaccagauucuggcuaucuaugccacaguggcgggaagucuaagccucgccauuaugauagcaggcaucucccuguggaugugcucuaacgggagccuucagugcagaauuuguaucuga

SEQ ID NO: 138223 - RNA, 1689 nt, Artificial Sequence
  derived and/or modified CDS sequence (opt3) from hemagglutinin__InfluenzaA__AGQ80947
auggccaucauuuaccugauacuccuuuucgcuaccgugagaggcgaccagaucugcauuggguaucacagcaacaauuccacagagaaggucgauacuauccuggaaaggaacauuacgguuacccaugcacaagacaucuuggagaaaacacacaauggaaaguuauguaaacugaacgguauacccccucuagaacucggcaauugcucuaucgccggguggcugcuuggaaacccagagugugaucggcuguugacugugccggaauggucauacauuauggagaaggagaauccccgcgacggccucugcuauccugguaguuuuaacgauuacgaagaacugaaacaucugcucagcuccguaacccacuucgaaaaggugaagaucuuaccaaaagaccgauggacacagcauaccacuacagggggaucucgugcgugugcugucucgggcaaucccucauuuuucagaaacaugguguggcugaccaagaaaggcagcaauuauccuauugccaaggggaguuacaacaauacguccggagagcagaugcuuaucauaugggguguucaccacccaaacgaugacgcagagcagaggacuuuguaucaaaaugugggcaccuacgucucuguggggacaagcacucugaacaaacgguccauucccgaaaucgccacccgcccuaagguaaacggacagggcgguagaauggaguuuucauggacaauucuagauaugcucgacaccaucaauuucgaaaguacggggaaccugaucgcuccagaguacggauuuaagauuagcaaaagggggucuuccggcauaaugaagacugaaggcacacuugagaauugcgagaccaaaugucagacuccgcugggagcaaucaacacaaccuugcccuuccauaauauucacccucucacgaucggugaaugcccaaaguauguuaaaucagagcggcugguguuagccaccggccugcgcaacgucccccagauagaaagccgagggcucuuuggagcuauugccggcuucaucgaggguggguggcaaggcaugguggauggaugguacggcuaucaucacaguaaugaccaggggucuggauacgcggcagauaaggaauccacacagaaagccaucgacgguauuacuaacaaggugaauagcgucaucgagaagaugaacacccaguuugaggcuguuggcaaagaguucaauaaccuugagaagagacuggaaaauuugaacaaaaagauggaggacggguuucuagauguguggacauauaaugccgaacugcucguacugauggagaacgagaggacucuugacuuccacgauucgaacgugaaaaaucuguacgacaagguccggaugcaauugaaggauaacgcaaaagaacucggaaauggcuguuucgaguuuuaucauaagugcgacgaugaauguaugaacucugugaaaaaugguaccuacgacuacccuaaguaugaggaggaauccaaacugaaccguaaugagauuaaggggguuaaguuaucaaacaugggcguguaccagauacuggcuaucuaugccacagucgcgggaagucuaagccucgccauuaugaucgcaggcgugucccuguggaugugcucuaaugggagccuucagugccgcaucuguauuuga

SEQ ID NO: 138224 - RNA, 1689 nt, Artificial Sequence
  derived and/or modified CDS sequence (opt3) from hemagglutinin__InfluenzaA__AGQ80948
auggccaucauuuaccugauacuccuuuucgcugcagugagaggcgaccagaucugcauuggguaucacagcaacaauuccaccgagaaggucgauacaauccuggaaaggaacguuacugugacgcaugcccaagacauuuuggagaaaacccacaauggaaaguuauguaaacugaacgguauacccccucuagaacucggcaauugcucuaucgcgggguggcugcuuggaaacccagagugugaucggcuguugacaguaccggaauggucauacaucauggagaaggagaauccccgcaacggccucugcuauccugguaguuuuaaugacuacgaggaacugaaacaucugcucagcuccgugacucacuucgaaaaggucaagauuuuaccaaaagaucgauggacccagcauacaaccacugggggaucucgugcuugugccguguuuggcaaccccucguucuuuagaaauaugguuuggcugacaaagaaaggcucaaacuauccuaucgcaaaggggagcuacaauaacaccaguggagagcagaugcuuauuaucuggggugugcaccacccaaaugacgaugccgagcagaggacguuguaucaaaacgucggcacuuacguguccguagggaccucuacacugaacaaacggagcauacccgaaauugcuacucgcccuaagguuaauggacagggcgguagaauggaguucuccuggaccauccuagacaugcucgauacaauuaacuuugaaucaaccgggaaucugaucgcaccagaguacggauucaagaucaguaaaaggggcagcucuggcauuaugaagacggaagggacucuugagaacugcgagacaaaaugucagaccccgcugggagccauaaauacuacauugcccuuucauaacauccacccucucaccauuggugaaugcccaaaguaugugaaauccgagcggcuggucuuagcuacgggccugcgcaaugugccccagaucgaaucacgaggacucuucggggccauagcgggcuuuauugaggguggguggcaaggcaugguggacggaugguacggcuaucaucacagcaacgaucaggggaguggauacgcagccgacaaggaaucuacccagaaagcuaucgaugguaucacaaauaaggucaacuccguuauugagaagaugaauacucaguucgaggccgugggcaaagaauuuaacaaucuugagaagagacuggaaaacuugaauaaaaagauggaggacggguuccuagacguauggaccuauaacgcagaacugcucgugcugauggagaacgagaggacacuugauuuccacgacagcaaugucaaaaaccuguacgauaagauccggaugcaauugaaggacaaugcuaaagaacucggaaacggcuguuuugaguucuaucauaagugcgaugacgaauguaugaacucggugaaaaaugguacuuacgauuacccuaaguaugaggaggaaucuaaacugaaucguaacgagauuaaggggguuaaguuauccaauaugggcguguaccagauacuggccaucuaugcgaccgucgccggaucacuaagucucgcaauuaugaucgcuggcaucagccuguggaugugcuccaacgggucucuucagugccgcauuuguauauga

SEQ ID NO: 138225 - RNA, 1689 nt, Artificial Sequence
  derived and/or modified CDS sequence (opt3) from hemagglutinin__InfluenzaA__AGQ80949
auggccaucauuuaccugauacuccuuuucgcugcagugagaggcgaccagaucugcauuggguaucacagcaacaauuccaccgagaaggucgauacaauccuggaaaggaacguuacugugacgcaugcccaagacauuuuggagaaaacccacaauggaaaguuauguaaacugaacgguauacccccucuagaacucggcgauugcucuaucgcgggguggcugcuuggaaauccagagugugaccggcuguugacaguaccggaauggucauacaucauggagaaggagaacccccgcaauggccucugcuauccugguaguuuuaacgauuacgaagaacugaaacaucugcucagcuccgugacucacuucgaaaaggucaagauuuuaccaaaagaccgauggacccagcauacaaccacugggggaucucgugcuugugccgugucgggcaaucccucauuuuucagaaacaugguuuggcugacaaagaaaggcagcaauuauccuaucgcaaaggggaguuacaacaauaccuccggagagcagaugcuuauuaucuggggugugcaccacccaaacgaugacgccgagcagaggacguuguaucaaaaugucggcacuuacgugucuguagggaccagcacacugaacaaacgguccauacccgaaauugcuacucgcccuaagguuaacggacagggcgguagaauggaguuuucauggaccauccuagauaugcucgacacaauuaauuucgaaaguaccgggaaccugaucgcaccagaguacggauuuaagaucagcaaaagggggucuuccggcauuaugaagacggaaggcacucuugagaauugcgagacaaaaugucagaccccgcugggagccauaaacacuacauugcccuuccauaauauccacccucucaccauuggugaaugcccaaaguaugugaaaucagagcggcuggucuuagcuacgggccugcgcaacgugccccagaucgaaagccgagggcucuuuggagccauagcgggcuucauugaggguggguggcaaggcaugguggauggaugguacggcuaucaucacaguaaugaccaggggucuggauacgcagccgauaaggaauccacccagaaagcuaucgacgguaucacaaacaaggucaauagcguuauugagaagaugaacacucaguuugaggccgugggcaaagaguucaauaaccuugagaagagacuggaaaauuugaacaaaaagauggaggacggguuucuagauguauggaccuauaaugcagaacugcucgugcugauggagaacgagaggacacuugacuuccacgauucgaacgucaaaaaucuguacgacaagauccggaugcaauugaaggauaacgcuaaagaacucggaaauggcuguuucgaguuuuaucauaagugcgacgaugaauguaugaacucugugaaaaaugguacuuacgacuacccuaaguaugaggaggaauccaaacugaaccguaaugagauuaaggggguuaaguuaucaaacaugggcguguaccagauacuggccaucuaugcgaccgucgccggaagucuaagccucgcaauuaugaucgcuggcaucucccuguggaugugcucuaaugggagccuucagugccgcauuuguauauga

SEQ ID NO: 138226 - RNA, 1701 nt, Artificial Sequence
  derived and/or modified CDS sequence (opt3) from hemagglutinin__InfluenzaA__AGQ80950
augaagaccaucauugcccugagcuacauauucugccucgcuuuuggccagaaccuucccgggaaugacuccucuacagcaacucuguguuugggacaccaugccguguuaaacgguacgaucgucaaaaccauuacagaugaccaaaucgagguuacuaaugcgaccgaacuggugcagucaaguagcacaggcaagauuugcaacaauccucacaaaauccuagaugggagagacuguacccucauagaugcucugcuuggagacccacauugcgauguauuccaggacgagacuugggaucuguuuguggaaagguccucugccuucucgaacuguuauccguacgacguccccgauuaugcaucauugcggagccucguggccaguuccggcacacuggaguuuaucaccgaagguuucacguggacugggguuucucagaauggaggcagcggcgcuugcaagcgcgggccugcaaacggauuuuucucccgacugaauuggcucaccaaaucagguaacgccuacccaguguuaaaugucacaaugcccaacagugacaauuuugauaagcuguauauuuggggcgugcaccauccuagcacuaaccaagagcagaccaaucuuuacguacaggcuucugggcguguuacaguguccaccagaaggucacagcaaacgaucauuccaaacaucggaagccggcccuggguccgcggccagagugguagaauaucuauuuauuggacuaucgugaagccuggggacguguuggucauuaacuccaauggaaaccugaucgccccaaggggcuacuucaaaaugcggacaggcaagagcucgaucaugcgcucugacgcgccgauugagaccuguauauccgaaugcaucacucccaaugggucaauuccuaacgauaaaccauuucagaauguuaacaagaucacauacggagcaugucccaaauaugugaagcagaauacccuaaagcucgccacggguaugcgaaacguaccugagaaacaaaccagaggccuguucggggcuauagccggauuuauugaaaauggcugggaggguaugaucgacgggugguacggcuucaggcaccagaacagugagggaacaggccaggcagcugaucuuaagagcacucaagccgcgaucgaccagauuaaugggaaacugaaccgggugaucgaaaagaccaaugagaaauuccaccagauugaaaaggaguuuuccgaagucgagggacguauacaggauuuggagaaauauguggaagacacaaagaucgaucucuggucuuacaacgccgagcuguuaguugcacuggaaaaucaacauacuauugaccucaccgauagcgagaugaacaaacuuuucgaaaagacacgcagacagcugagggagaacgcugaggacauggguaauggcugcuuuaagaucuaucacaaaugugauaacgccugcaucgaaucaauucggaaugggaccuacgaccaugacauauaucgagaugaggcuuugaacaaucgcuuccagaucaagggaguggaacuaaaaaguggcuacaaggacuggauucuguggaucuccuuugccauuagcugcuuccuccugugugucgugcuucuggguuuuaucaugugggcaugccagagagggaacauaagguguaauaucugcauuuga

SEQ ID NO: 138227 - RNA, 1695 nt, Artificial Sequence
  derived and/or modified CDS sequence (opt3) from hemagglutinin__InfluenzaA__AGQ80951
augcugagcaucgugauucucuuccuucuggucgccgaguccucuucacagaacuacaccggcaaucccguuauaugcauggggcaccaugcuguggcaaacggaacaaugguaaagacuuugacggacgaucaaguggaagucgugaccgcccaggaguuaguugaaagucagaaucugccugagcuauguccaagcccgcucagacugguggacggucagacaugcgauaucauuaacggcgcgcuugggucccccggaugugaccaccugaauggcgcugaaugggauaucuuuauugagaggccuaacgccauggacacuugcuauccauucgauguccccgacuaccaaucuuugcggucgauccucgcaaauaacgguaaauuugaguucauagccgaagaguuucaguggucaaccgugaagcagaaugggaaaagcggagcuuguaagcgcgcaaacguaaaugauuucuuuaaccgacugaauuggcugguuaaaagugacggcaacgccuauccucuccagaauuuaacaaaggugaacaacggcgauuacgcucgucuguauaucuggggaguccaucacccauccaccgacacugaacaaacaaaucuuuacaagaacaaucccgggagagugaccgugucuacgaaaacuagccagaccuccgucguuccuaacauugguucaaggccaugggugcggggccagagugggcgcaucagcuucuauuggacaauuguagagccgggagauuugaucguguuuaauacuauaggcaaccugauugcccccagaggucauuacaagcuaaauucucagaaaaaguccaccauccucaacacagcgaccccuauugggucaugcgucagcaaaugucacacggacaagggaagucugucuacuacaaagccauuccaaaauaucuccaggguggcaaucggcgacugccccaaauacguuaagcagggcagccuuaaacuggccaccgggaugcggaacauuccugagaaggcuucgcgcggauuguuuggugccauagcaggcuucaucgaaaauggguggcagggacucauugauggcugguaugguuuucgacaccaaaacgcugaggggacuggcacagccgcggaccugaaaucuacccaggccgcaaucgaucagauaaauggaaaguuaaacagacugauugagaaaacgaaugaaaaguaccaucagaucgaaaaggaguucgagcaaguggaaggcaggauccaggaccucgagaaauaugucgaagauaccaagauugaccuuugguccuacaacgcugagcuguugguggcccuagaaaaccagcacacaaucgauguaacugacucagagaugaauaaacuguucgagcggguucgucgccagcucagagaaaacgcugaggauaaggggaauggauguuuugaaauuuuccauaaaugcgacaacaauuguauagagaguaucaggaacgguaccuaugaucacgacguguaccggaaugaagccauuaacaaucgauuucaaauccagggcgucaagcugacacagggguauaaggacaucauucuuuggaucagcuucuccauaucuugcuuucuguugguggcacuccuguuagccuucauucugugggcuugccagaacggaaauauccgcugucaaauuugcaucuga

SEQ ID NO: 138228 - RNA, 1683 nt, Artificial Sequence
  derived and/or modified CDS sequence (opt3) from hemagglutinin__InfluenzaA__AGQ80953
augaacacccagauccugguguucgcccucgucgcuauuauacccacaaaugcagacaagaucugccuuggccaccaugccguuagcaacgggacuaaagugaauacgcugaccgagagaggaguagaaguggucaacgcgacagagacuguggaaaggaccuccauuccucggaucuguucuaaggguaaacgcgcuguugauuugggccaaugcggguuacugggaacaauuaccggcccaccgcagugugaccaguuucuagaguucucagccgaucucaucauagaacgacgugaggguagugacgugugcuaccccgggaaguuugucaaugaggaagcacugagacagauccuuagggagagcggaggcauugauaaagaaacuaugggcuucacauauuccgggauccggaccaacggagccacgucugcuugucgcagaucggguagcucauuuuacgcagagaugaaguggcuguugaguaauacugacaacgccgcuuucccucaaaccacaaaguccuauaaaaauacuaggaaggauccagcccucauuaucuggggcauacaccauucugggagcaccacagagcagaccaaacuguacggauccggcaacaagcugauuacgguggguucaaguaauuaucagcagagcuuuguacccucuccuggggcgcggccacaaguuaacggacaguccggccgcaucgacuuccacuggcucauguuaaaucccaacgauacugugacauuuucauucaauggcgcauuuauugccccugaccgagcuagcuuccugagagggaaaaguaugggaauccagucugguguccagguggaugccaacugcgaaggcgacuguuaccauaacgggggaaccaucauuuccaaucuuccauuucaaaacauaaauagcagggcagugggcaagugcccgcgguaugucaagcaggagucguugcugcuagcuacugguaugaaaaacguucccgaaaucccuaaggggcguggccucuucggagccauugcgggcuucaucgagaaugggugggaaggacugauagaugguugguacggcuuucgccaccagaacgcccaaggggagggaacagcagcugacuacaaaucuacccaguccgccauugaccagaucacgggcaaacuuaauagacugaucgagaagaccaaccagcaauucgaauugauugauaaugaguuuacagaaguggagaggcagaucgguaacguaauuaauuggacucgggacucaaugaccgaaguguggaguuauaacgcugagcuccuggucgccauggagaaucagcacacaauagauuuagcagacagcgaaaugaacaagcuguacgagcgagugcgcagacagcucagggaaaaugccgaggaagaugggacuggcuguuucgagaucuuucauaaaugcgacgaugacuguauggcuuccauucggaacaacaccuaugaucacucuaaguaccgcgaggaagcgaugcaaaauagaauccagaucgacccaguuaaacuuagcucaggauauaaggaugugauucugugguucaguuuuggcgcauccugcuucauauugcuagccaucgcuauggggcuggucuuuauuugcgugaagaacggaaauaugagguguacaaucugcauuuga

SEQ ID NO: 138229 - RNA, 1683 nt, Artificial Sequence; identical to SEQ ID NO: 138228
  derived and/or modified CDS sequence (opt3) from hemagglutinin__InfluenzaA__AGQ80954

SEQ ID NO: 138230 - RNA, 1683 nt, Artificial Sequence; identical to SEQ ID NO: 138228
  derived and/or modified CDS sequence (opt3) from hemagglutinin__InfluenzaA__AGQ80955

SEQ ID NO: 138231 - RNA, 1683 nt, Artificial Sequence; identical to SEQ ID NO: 138228
  derived and/or modified CDS sequence (opt3) from hemagglutinin__InfluenzaA__AGQ80956

SEQ ID NO: 138232 - RNA, 1683 nt, Artificial Sequence; identical to SEQ ID NO: 138228
  derived and/or modified CDS sequence (opt3) from hemagglutinin__InfluenzaA__AGQ80957

SEQ ID NO: 138233 - RNA, 1683 nt, Artificial Sequence; identical to SEQ ID NO: 138228
  derived and/or modified CDS sequence (opt3) from hemagglutinin__InfluenzaA__AGQ80958

SEQ ID NO: 138234 - RNA, 1683 nt, Artificial Sequence
  derived and/or modified CDS sequence (opt3) from hemagglutinin__InfluenzaA__AGQ80959
augaacacccagauccugguguucgcccucauugcuauaauccccacaaaugcagacaagauuugccuuggccaccaugccgucagcaacgggacuaaaguuaauacgcugaccgagagaggaguggaaguagugaacgcgacagagacugucgaaaggaccaauaucccucggauuuguuccaaggguaaacgcacaguggauuugggccaaugcggguuacugggaaccaucacuggcccaccgcagugugaccaguuucuagaguucucugcugaucucauaaucgaacgacgugaggguucagacguuugcuaccccgggaaguuugugaacgaggaagcccugagacagauucuuagggagaguggaggcaucgauaaagaagcaaugggcuucacauauagcgggauucggaccaauggagccacguccgcuugucgcagaucugguucgucauuuuacgcagagaugaaguggcuguugagcaacacugacaaugccgcuuucccucaaaugaccaagaguuauaaaaacacaaggaaggauccagcccucaucauauggggcauucaccauuccgggucuacugcggagcagaccaaacuguacggaagcggcaauaagcuggucacaguggguuccucaaacuaucagcagaguuuuguacccagcccuggggcacggccacaaguuaauggacagucuggccgcaucgacuuccacuggcucauguuaaaccccaaugauaccgugacguuuuccuucaacggcgccuuuauugcuccugaccgagccucauuccugagagggaaaagcaugggaauccagagugguguccagguggaugcaaacugcgaaggcgacuguuaccaugggggaggcacuaucauuucuaaucuuccauuucaaaacauagauuccagggcuguggguaagugcccgcgguaugucaagcagaaaucguugcugcuagccacagggaugaagaauguucccgagagcccuaaaggccguggacucuucggcgcgaucgccggguucauugaaaacggaugggagggucugaucgacggcugguacggguuucgccaccagaaugcacaaggagaaggcaccgcugccgacuacaagucuacucaguccgcuauagaucagauuacagguaaacuuaacagacugaucgagaagaccaaucagcaauucgaguugaucgacaacgaauuuacggagguggaaaaacagauugggaauguaaucaacuggaccagggauucaauuacagagguguggaguuauaaugccgaacuccuggucgcaauggagaaccagcacacuauagacuuagccgauagcgagaugaauaagcuguacgaacgggugaagcgacagcuccgcgagaacgcugaagaggacggcaccggauguuucgaaaucuuucauaaaugcgaugacgauuguauggcguccauuagaaauaacacauaugaccacucuaaguacagggaggaggcaaugcaaaaccggauccagaucgauccaguuaaacuuagcucaggcuauaaggacgugauucugugguucaguuuuggggccuccugcuucauauugcuagcuaucgccaugggacuggucuuuauuugcgugaaaaaugguaacaugcgcuguacuaucugcauuuga

SEQ ID NO: 138235 - RNA, 1683 nt, Artificial Sequence
  derived and/or modified CDS sequence (opt3) from hemagglutinin__InfluenzaA__AGQ80961
augaacacccagauccugguguucgcccucgucgcuauuauacccacaaaugcagacaagaucugccuuggccaccaugccguuagcaacgggacuaaagugaauacgcugaccgagagaggaguagaaguggucaacgcgacagagacuguggaaaggaccaauguuccuaagauuuguuccaaagguaagcggacaguggauuugggccaaugcggguuacugggaaccaucacuggcccaccgcagugugaccaguuucuagaguucucugcugaucucauuaucgaacgccgagaggguucagacgucugcuaccccgggaaauuugugaacgaggaaacacugcgucagauacuuagagagaguggaggcaucgauaaggaaaccaugggcuucacguauagcgggauuaggacuaauggagccaccuccgcaugucggcgcucugguucgucauuuuacgccgagaugaaguggcuguugagcaacacagacaaugcugcauucccucaaaugacuaaaaguuauaagaacgccagaaaagauccagcucucaucauuuggggcauccaccauuccgggucuaccacagagcagaccaagcuguacggaagcggcaauaaacugauaacgguagguuccucaaacuaucagcagaguuuuguucccagcccuggggccaggccacaagugaauggacagucuggccggauugacuuccacuggcucauguuaaaccccaaugauacugucacauuuuccuucaacggcgcguuuaucgcaccugaccgcgccugcuuccugcgagggaagucaauggguauucagagcggaguccagguggaugcuaguugugaaggcgacugcuaccauucugggggaaccaucaucuccaaccuuccauuucaaaauauuaacagcagagccgugggcaaguguccgagguauguuaaacaggagucguugaugcuggcaacugguaugaagaaugugcccgaaauaccuaaagggcggggccuauucggagcuaucgccggcuucauugagaacgggugggaaggacucaucgaugguugguacggcuuucgucaccagaaugcgcaaggggagggaacagccgcagacuacaagucuacccaguccgcuauagaccagauuacgggcaaacugaaccgccuuaucgagaagaccaaucagcaauucgaacugaucgauaacgaguuuacagaaguagagaaacagauugguaaugugaucaacuggacuagagacucaaugaccgaagucuggaguuauaaugccgaguugcucguggcuauggagaaccagcacacaauugaucuggccgacagcgaaaugaauaaguuauacgagaggguuaagcggcagcugcgagaaaacgcagaggaagaugggacuggcugcuucgagauauuucauaaaugugacgaugacugcauggccuccauccgcaauaacaccuaugaucacucuaaguacagagaggaagcuaugcaaaacaggauuaaaaucgacccagugaagcucagcucaggauauaaagaugucauccuuugguucaguuuuggcgcguccugcuucauucuguuggcaauagccauggggcuaguguuuaucuguguaaagaauggaaacaugcggugcacaauuuguaucuga

SEQ ID NO: 138236 - RNA, 1683 nt, Artificial Sequence; identical to SEQ ID NO: 138235
  derived and/or modified CDS sequence (opt3) from hemagglutinin__InfluenzaA__AGQ80962

SEQ ID NO: 138237 - RNA, 1683 nt, Artificial Sequence
  derived and/or modified CDS sequence (opt3) from hemagglutinin__InfluenzaA__AGQ80964
augaacacccagauccugguguucgcccucauugcuauaauccccacaaaugcagacaagauuugccuuggccaccaugccgucagcaacgggacuaaaguuaauacgcugaccgagagaggaguggaaguagugaacgcgacagagacugucgaaaggaccaauaucccucggauuuguuccaaggguaaacgcacaguggauuugggccaaugcggguuacugggaaccaucacuggcccaccgcagugugaccaguuucuagaguucucugcugaucucauaaucgaacgacgugaggguucagacguuugcuaccccgggaaguuugugaacgaggaagcccugagacagauucuuagggagaguggaggcaucgauaaagaagcaaugggcuucacauauagcgggauucggaccaauggagccacguccgcuugucgcagaucugguucgucauuuuacgcagagaugaaguggcuguugagcaacacugacaaugccgcuuucccucaaaugaccaagaguuauaaaaacacaaggaaggauccagcccucaucauauggggcauucaccauuccgggucuacugcggagcagaccaaacuguacggaagcggcaauaagcuggucacaguggguuccucaaacuaucagcagaguuuuguacccagcccuggggcacggccacaaguuaauggacagucuggccgcaucgacuuccacuggcucauguuaaaccccaaugauaccgugacguuuuccuucaacggcgccuuuauugcuccugaccgagccucauuccugagagggaaaagcaugggaauccagagugguguccagguggaugcagacugcgaaggcgauuguuaccauucugggggaacuaucauuuccaaccuuccauuucaaaauauagacagcagggcugugggcaagugcccgcgguaugucaagcagcguucguugcugcuagccacagguaugaaaaacguucccgagaucccuaaggggcgcggccucuucggagcgauugccggcuucaucgaaaaugggugggagggacugauagacgguugguacggcuuuagacaccagaacgcacaaggggaaggaaccgcugccgauuacaaaucuacucaguccgcuauugaccagaucacaggcaaacuuaauaggcugaucgagaagaccaaccagcaauucgaguugauugauaaugaauuuacggagguggaaaagcagaucgguaacguaauuaauuggacccgggacucaauaacagagguguggaguuauaacgccgaacuccuggucgcaauggagaaucagcacacuaucgauuuagccgacagcgagaugaacaaacuguacgaacgagugaagcgccagcucagagagaaugcugaagaggaugggaccggcuguuucgaaauuuuucauaagugcgacgaugacuguauggcguccaucaggaacaauacauaugaucacucuaaauaccgggaggaggcaaugcaaaaccgcauccagauugacccaguuaaacuuagcucaggauauaaggacgugauacugugguucaguuuuggcgccuccugcuucaucuugcuagcuauugccauggggcuggucuuuaucugcgugaagaacggaaauaugagauguacuauuugcaucuga

SEQ ID NO: 138238 - RNA, 1683 nt, Artificial Sequence; identical to SEQ ID NO: 138228
  derived and/or modified CDS sequence (opt3) from hemagglutinin__InfluenzaA__AGQ80965

SEQ ID NO: 138239 - RNA, 1683 nt, Artificial Sequence; identical to SEQ ID NO: 138228
  derived and/or modified CDS sequence (opt3) from hemagglutinin__InfluenzaA__AGQ80966

SEQ ID NO: 138240 - RNA, 1683 nt, Artificial Sequence; identical to SEQ ID NO: 138228
  derived and/or modified CDS sequence (opt3) from hemagglutinin__InfluenzaA__AGQ80968

SEQ ID NO: 138241 - RNA, 1683 nt, Artificial Sequence
  derived and/or modified CDS sequence (opt3) from hemagglutinin__InfluenzaA__AGQ80970
augaacacccagauccugguguucgcccucgucgcuauuauacccacaaaugcagacaagaucugccuuggccaccaugccguuagcaacgggacuaaagugaauacgcugaccgagagaggaguagaaguggucaacgcgacagagacuguggaaaggaccuccauuccucggaucuguucuaaggguaaaaaggcuguugauuugggccaaugcggguuacugggaacaauuaccggcccaccgcagugugaccaguuucuagaguucucagccgaucucaucauagaacgccgagaggguagugacgugugcuaccccgggaaauuugucaaugaggaagcacugcgucagauccuuagagagagcggaggcauugauaaggaaacuaugggcuucacauauuccgggaucaggaccaacggagccacgucugcuugucggcgcucggguagcucauuuuacgcagagaugaaguggcuguugaguaauacugacaacgccgcuuucccucaaaccacaaaauccuauaagaauacuagaaaagauccagcccucauuaucuggggcauacaccauucugggagcaccacagagcagaccaagcuguacggauccggcaacaaacugauuacgguggguucaaguaauuaucagcagagcuuuguacccucuccuggggcgaggccacaaguuaacggacaguccggccggaucgacuuccacuggcucauguuaaaucccaacgauacugugacauuuucauucaauggcgcauuuauugccccugaccgcgcuagcuuccugcgagggaagaguaugggaauccagucugguguccagguggaugccaacugcgaaggcgacuguuaccauaacgggggaaccaucauuuccaaucuuccauuucaaaacauaaauagcagagcagugggcaagugcccgagguaugucaaacaggagucguugcugcuagcuacugguaugaagaacguucccgaaaucccuaaagggcggggccucuucggagccauugcgggcuucaucgagaaugggugggaaggacugauagaugguugguacggcuuucgucaccagaacgcccaaggggagggaacagcagcugacuacaagucuacccaguccgccauugaccagaucacgggcaaacuuaaucgccugaucgagaagaccaaccagcaauucgaauugauugauaaugaguuuacagaaguggagagacagaucgguaacguaauuaauuggacuagggacucaaugaccgaaguguggaguuauaacgcugagcuccuggucgccauggagaaucagcacacaauagauuuagcagacagcgaaaugaacaaacuguacgagcgggugcgacgccagcucagagaaaaugccgaggaagaugggacuggcuguuucgagaucuuucauaagugcgacgaugacuguauggcuuccauuaggaacaacaccuaugaucacucuaaguaccgggaggaagcgaugcaaaaucgcauccagaucgacccaguuaaacuuagcucaggauauaaggaugugauucugugguucaguuuuggcgcauccugcuucauauugcuagccaucgcuauggggcuggucuuuauuugcgugaaaaacggaaauaugagauguacaaucugcauuuga

SEQ ID NO: 138242 - RNA, 1683 nt, Artificial Sequence
  derived and/or modified CDS sequence (opt3) from hemagglutinin__InfluenzaA__AGQ80971
augaacacccagauccugguguucgcccucgucgcuauuauacccacaaaugcagacaagaucugccuuggccaccaugccguuagcaacgggacuaaagugaauacgcugaccgagagaggaguagaaguggucaacgcgacagagacuguggaaaggaccuccauuccucggaucuguucuaaggguaaaaagacaguugauuugggccaaugcggguuacugggaaccauuacuggcccaccgcagugugaccaguuucuagaguucucagcugaucucaucauagaacgccgagaggguagugacgugugcuaccccgggaaauuugucaaugaggaagcccugcgucagauccuuagagagagcggaggcauugauaaggaaacaaugggcuucaccuauuccgggaucaggacgaacggagcaacuucugccugucggcgcucggguagcucauuuuacgcugagaugaaguggcuguugaguaauaccgacaacgcagccuucccucaaacaacuaaauccuauaagaauaccagaaaagauccagcucucauuaucuggggcauacaccauucugggagcacaaccgagcagacgaagcuguacggauccggcaacaaacugauuacuguggguucaaguaauuaucagcagagcuuuguacccucuccuggggccaggccacaaguuaacggacaguccggccggaucgacuuccacuggcucauguuaaaucccaacgauacagugaccuuuucauucaauggcgcguuuauugcaccugaccgcgccagcuuccugcgagggaagaguaugggaauccagucugguguccagguggaugcuaacugcgaaggcgacuguuaccauaacgggggaacuaucauuuccaaucuuccauuucaaaacauaaauagcagagccgugggcaagugcccgagguaugucaaacaggagucguugcugcuagcaacagguaugaagaacguucccgaaaucccuaaagggcggggccucuucggagcuauugccggcuucaucgagaaugggugggaaggacugauagaugguugguacggcuuucgucaccagaacgcgcaaggggagggaaccgccgcagacuacaagucuacgcaguccgcuauugaccagaucaccggcaaacuuaaucgccugaucgagaagacaaaccagcaauucgaauugauugauaaugaguuuacugaaguggagagacagaucgguaacguaauuaauuggaccagggacucaaugacagaaguguggaguuauaacgccgagcuccuggucgcuauggagaaucagcacacuauagauuuagccgacagcgaaaugaacaaacuguacgagcgggugcgacgccagcucagagaaaaugcagaggaagaugggaccggcuguuucgagaucuuucauaagugcgacgaugacuguauggccuccauuaggaacaacacauaugaucacucuaaguaccgggaggaagcuaugcaaaaucgcauccagaucgacccaguuaaacuuagcucaggauauaaggaugugauucugugguucaguuuuggcgcguccugcuucauauugcuagcaaucgccauggggcuggucuuuauuugcgugaaaaacggaaauaugagauguaccaucugcauuuga

SEQ ID NO: 138243 - RNA, 1683 nt, Artificial Sequence
  derived and/or modified CDS sequence (opt3) from hemagglutinin__InfluenzaA__AGQ80974
augaacacccagauccugguguucgcccucgucgcuauuauacccacaaaugcagacaagaucugccuuggccaccaugccguuagcaacgggacuaaagugaauacgcugaccgagagaggaguagaaguggucaacgcgacagagacuguggaaaggaccuccauuccucggaucuguucuaaggguaaacgcgcuguugauuugggccaaugcggguuacugggaacaauuaccggcccaccgcagugugaccaguuucuagaguucucagccgaucucaucauagaacgacgugaggguagugacgugugcuaccccgggaaguuugucaaugaggaagcacugagacagauccuuagggagagcggaggcauugauaaagaaacuaugggcuucacauauuccgggauccggaccaacggagccacgucugcuugucgcagaucggguagcucauuuuacgcagagaugaaguggcuguugaguaauacugacaacgccgcuuucccucaaaccacaaaguccuauaaaaauacuaggaaggauccagcccucauuaucuggggcauacaccauucugggagcaccacagagcagaccaaacuguacggauccggcaacaagcugauuacgguggguucaaguaauuaucagcagagcuuuguacccucuccuggggcgcggccacaaguuaacggacaguccggccgcaucgacuuccacuggcucauguuaaaucccaacgauacugugacauuuucauucaauggcgcauuuauugccccugaccgagcuagcuuccugagagggaaaaguaugggaauccagucugguguccagguggaugccaacugcgaaggcgacuguuaccauaacgggggaaccaucauuuccaaucuuccauuucaaaacauaaauagcagggcagugggcaagugcccgcgguaugucaagcaggagucguugcugcuagcuacugguaugaaaaacguucccgaaaucccuaaggggcguggccucuucggagccauugcgggcuucaucgagaaugggugggaaggacugguggaugguugguacggcuuucgccaccagaacgcccaaggggagggaacagcagcugacuacaaaucuacccaguccgccauagaccagauuacgggcaaacuuaauagacugaucgagaagaccaaccagcaauucgaauugaucgauaaugaguuuacagaaguagagaggcagauugguaacgugaucaauuggacucgggacucaaugaccgaagucuggaguuauaacgcugagcuccugguggccauggagaaucagcacacaauugauuuagcagacagcgaaaugaacaagcuguacgagcgaguucgcagacagcucagggaaaaugccgaggaagaugggacuggcuguuucgagauauuucauaaaugcgacgaugacuguauggcuuccauccggaacaacaccuaugaucacucuaaguaccgcgaggaagcgaugcaaaauaggauucagaucgacccagugaaacuuagcucaggauauaaggaugucauccugugguucaguuuuggcgcauccugcuucauuuugcuagccauagcuauggggcugguguuuaucugcguaaagaacggaaauaugagauguacaauuugcaucuga

SEQ ID NO: 138244 - RNA, 1683 nt, Artificial Sequence
  derived and/or modified CDS sequence (opt3) from hemagglutinin__InfluenzaA__AGQ80977
augaacacccagauccuggcccucgcucuugcagccauuauacccacaaaugcggacaagaucugccugggccaccaugcugugagcaacgggacuaaagugaauacguugaccgagagaggaguugaagugguaaacgccacagagacuguggaaaggaccuccauuccucggaucuguucuaaggguaaacgcgcagucgauuuaggccaaugcgggcugcuaggaacaauuaccggcccaccgcagugugaccaguuccucgaguuuucagccgaucugaucauagaacgacgugaggguagugacgugugcuaccccgggaaguucguuaaugaggaagcucuuagacagauccugagggagagcggaggcauugauaaagaaacuaugggcuuuacauauuccgggauccggaccaacggagcaacgucugccugucgcagaucggguagcagcuucuacgcugagaugaagugguugcucaguaauacugacaacgccgcguuuccucaaaccacaaaguccuauaaaaauacuaggaaggauccagcacugauuaucuggggcgugcaccauucugggagcaccacagagcagaccaaacuguacggauccggcaacaagcucauaacggucgguucaaguaauuaucagcagagcuucgugcccucuccuggggcccggccacaaguaaacggacaguccggccgcauugacuuucacugguuaaugcugaaucccaacgauacuguuacauucucauuuaauggcgcuuucaucgccccugaccgagcaucauuucuuagagggaaaaguauggguauucagucuggagugcaggucgaugcuaacugcgaaggcgacuguuaccauaacgggggaaccaucaucuccaauuugccauuccaaaacauuaauagcagggccgugggcaagugcccgcgguaugugaagcaggagucgcugcuacucgcgacugguaugaaaaacguccccgaaauaccuaaggggcguggccuguuuggagccaucgcaggcuucauugagaaugggugggaaggacuuguugaugguugguacggcuuccgccaccagaacgcucaaggggagggaacagccgcugacuacaaaucuacccaguccgccaucgaccagauaacgggcaagcugaauagauugauugagaaaaccaaccagcaauuugaacucaucgauaaugaguucacagaaguggagaggcagaucgguaacguaauuaauuggacucgggacucaaugaccgaaguguggaguuauaacgcagagcuguuagucgccauggagaaucagcacacaaucgaucuggcugacagcgaaaugaacaagcucuacgagcgagugcgcagacagcuuagggaaaaugcggaggaagaugggacuggcuguuuugagauuuuccauaaaugcgacgaugacuguauggcauccauacggaacaacaccuaugaucacucuaaguaccgcgaggaagccaugcaaaauagaauccagauugacccaguuaagcugagcucaggauauaaagaugugaucuugugguuuaguuucggcgcuuccugcuuuauccuacuggccauugcaauggggcucgucuucauaugcgucaagagcggaaacaugagguguacaaucugcauuuga

SEQ ID NO: 138245 - RNA, 1683 nt, Artificial Sequence
  derived and/or modified CDS sequence (opt3) from hemagglutinin__InfluenzaA__AGQ80978
augaacacccagauccugguguucgcccucgucgcuauuauacccacaaaugcagacaagaucugccuuggccaccaugccguuagcaacgggacuaaagugaauacgcugaccgagagaggaguagaaguggucaacgcgacagagacuguggaaaggaccuccauuccucggaucuguucuaaggguaaacgcgcuguugauuugggccaaugcggguuacugggaacaauuaccggcccaccgcagugugaccaguuucuagaguucucagccgaucucaucauagaacgacgugaggguagugacgugugcuaccccgggaaguuugucaaugaggaagcacugagacagauccuuagggagagcggaggcauugauaaagaaacuaugggcuucacauauuccgggauccggaccaacggagccacgucugcuugucgcagaucggguagcucauuuuacgcagagaugaaguggcuguugaguaauacugacaacgccgcuuucccucaaaccacaaaguccuauaaaaauacuaggaaggauccagcccucauuaucuggggcauacaccauucugggagcauuaccgagcagacaaaacuguacggauccggcaacaagcugaucaccguggguucaaguaauuaucagcagagcuuuguacccucuccuggggcgcggccacaaguuaacggacaguccggccgcauugacuuccacuggcucauguuaaaucccaacgauacggugacuuuuucauucaauggcgcauuuaucgccccugaccgagcuagcuuccugagagggaaaaguaugggaauccagucugguguccagguggaugccaacugcgaaggcgacuguuaccauaacgggggaacaauuauauccaaucuuccauuucaaaacaucaauagcagggcagugggcaagugcccgcgguaugucaagcaggagucguugcugcuagcuaccgguaugaaaaacguucccgaaauuccuaaggggcguggccucuucggagccaucgcgggcuucauagagaaugggugggaaggacugguggaugguugguacggcuuucgccaccagaacgcccaaggggagggaacugcagcugacuacaaaucuacacaguccgccauugaccagaucaccggcaaacuuaauagacugaucgagaagacgaaccagcaauucgaauugauugauaaugaguuuaccgaaguagagaggcagaucgguaacgugauuaauuggacacgggacucaaugacugaagucuggaguuauaacgcugagcuccugguggccauggagaaucagcacaccauagauuuagcagacagcgaaaugaacaagcuguacgagcgaguucgcagacagcucagggaaaaugccgaggaagaugggacaggcuguuucgagaucuuucauaaaugcgacgaugacuguauggcuuccauucggaacaacacuuaugaucacucuaaguaccgcgaggaagcgaugcaaaauagaauccagaucgacccagugaaacuuagcucaggauauaaggaugucauucugugguucaguuuuggcgcauccugcuucauauugcuagccaucgcuauggggcugguguuuauuugcguaaagaacggaaauaugagguguaccaucugcauuuga

SEQ ID NO: 138246 - RNA, 1683 nt, Artificial Sequence
  derived and/or modified CDS sequence (opt3) from hemagglutinin__InfluenzaA__AGQ80979
augaacacccagauccugguguucgcccucgucgcuauuauacccacaaaugcagacaagaucugccuuggccaccaugccguuagcaacgggacuaaagugaauacgcugaccgagagaggaguagaaguggucaacgcgacagagacuguggaaaggaccuccauuccucggaucuguucuaaggguaaacgcgcuguugauuugggccaaugcggguuacugggaacaauuaccggcccaccgcagugugaccaguuucuagaguucucagccgaucucaucauagaacgacgugaggguagugacgugugcuaccccgggaaguuugucaaugaggaagcacugagacagauccuuagggagagcggaggcauugauaaagaaacuaugggcuucacauauuccgggauccggaccaacggagccacgucugcuugucgcagaucggguagcucauuuuacgcagagaugaaguggcuguugaguaauacugacaacgccgcuuucccucaaaccacaaaguccuauaaaaauacuaggaaggauccagcccucauuaucuggggcauacaccauucugggagcaccacagagcagaccaaacuguacggauccggcaacaagcugauuacgguggguucaaguaauuaucagcagagcuuuguacccucuccuggggcgcggccacaaguuaacggacaguccggccgcaucgacuuccacuggcucauguuaaaucccaacgauacugugacauuuucauucaauggcgcauuuauugccccugaccgagcuagcuuccugagagggaaaaguaucggaauccagucugguguccagguggaugccaacugcgaaggcgacuguuaccauaacgggggaaccauuauauccaaucuuccauuucaaaacaucaauagcagggcagugggcaagugcccgcgguaugucaagcaggagucguugcugcuagcuacugguaugaaaaacguucccgaaauuccuaaggggcguggccucuucggagccaucgcgggcuucauagagaaugggugggaaggacugauugaugguugguacggcuuucgccaccagaacgcccaaggggagggaacagcagcugacuacaaaucuacccaguccgccaucgaccagaucacgggcaaacuuaauagacugauugagaagaccaaccagcaauucgaauugaucgauaaugaguuuacagaaguggagaggcagauugguaacguaauaaauuggacucgggacucaaugaccgaaguguggaguuauaacgcugagcuccuggucgccauggagaaucagcacacaaucgauuuagcagacagcgaaaugaacaagcuguacgagcgagugcgcagacagcucagggaaaaugccgaggaagaugggacuggcuguuucgagauuuuucauaaaugcgacgaugacuguauggcuuccauccggaacaacaccuaugaucacucuaaguaccgcgaggaagcgaugcaaaauagaauccagauugacccaguuaaacuuagcucaggauauaaggaugugauacugugguucaguuuuggcgcauccugcuucaucuugcuagccauugcuauggggcuggucuuuaucugcgugaagaacggaaauaugagguguacaauuugcaucuga

SEQ ID NO: 138247 - RNA, 1683 nt, Artificial Sequence; identical to SEQ ID NO: 138243
  derived and/or modified CDS sequence (opt3) from hemagglutinin__InfluenzaA__AGQ80980

SEQ ID NO: 138248 - RNA, 1683 nt, Artificial Sequence; identical to SEQ ID NO: 138228
  derived and/or modified CDS sequence (opt3) from hemagglutinin__InfluenzaA__AGQ80981

SEQ ID NO: 138249 - RNA, 1683 nt, Artificial Sequence; identical to SEQ ID NO: 138228
  derived and/or modified CDS sequence (opt3) from hemagglutinin__InfluenzaA__AGQ80982

SEQ ID NO: 138250 - RNA, 1683 nt, Artificial Sequence; identical to SEQ ID NO: 138228
  derived and/or modified CDS sequence (opt3) from hemagglutinin__InfluenzaA__AGQ80983

SEQ ID NO: 138251 - RNA, 1683 nt, Artificial Sequence; identical to SEQ ID NO: 138228
  derived and/or modified CDS sequence (opt3) from hemagglutinin__InfluenzaA__AGQ80984

SEQ ID NO: 138252 - RNA, 1683 nt, Artificial Sequence; identical to SEQ ID NO: 138228
  derived and/or modified CDS sequence (opt3) from hemagglutinin__InfluenzaA__AGQ80985

SEQ ID NO: 138253 - RNA, 1683 nt, Artificial Sequence; identical to SEQ ID NO: 138228
  derived and/or modified CDS sequence (opt3) from hemagglutinin__InfluenzaA__AGQ80986

SEQ ID NO: 138254 - RNA, 1683 nt, Artificial Sequence; identical to SEQ ID NO: 138228
  derived and/or modified CDS sequence (opt3) from hemagglutinin__InfluenzaA__AGQ80987

SEQ ID NO: 138255 - RNA, 1683 nt, Artificial Sequence; identical to SEQ ID NO: 138228
  derived and/or modified CDS sequence (opt3) from hemagglutinin__InfluenzaA__AGQ80988

SEQ ID NO: 138256 - RNA, 1683 nt, Artificial Sequence
  derived and/or modified CDS sequence (opt3) from hemagglutinin__InfluenzaA__AGQ80990
augaacacccagauccugguguucgcccucgucgcuauuauacccacaaaugcagacaagaucugccuuggccaccaugccguuagcaacgggacuaaagugaauacgcugaccgagagaggaguagaaguggucaacgcgacagagacuguggaaaggaccuccauuccuaagaucuguucuaaagguaagcgggcuguugauuugggccaaugcggguuacugggaacaauuaccggcccaccgcagugugaccaguuucuagaguucucagccgaucucaucauagaacgccgagaggguagugacgugugcuaccccgggaaauuugucaaugaggaagcacugcgucagauccuuagagagagcggaggcauugauaaggaaacuaugggcuucacauauuccgggaucaggaccaacggagccacgucugcuugucggcgcucggguagcucauuuuacgcagagaugaaguggcuguugaguaauacugacaacgccgcuuucccucaaaccacaaaauccuauaagaauacuagaaaagauccagcccucauuaucuggggcauacaccauucugggagcaccacagagcagaccaagcuguacggauccggcaacaaacugauuacgguggguucaaguaauuaucagcagagcuuuguacccucuccuggggcgaggccacaaguuaacggacaguccggccggaucgacuuccacuggcucauguuaaaucccaacgauacugugacauuuucauucaauggcgcauuuauugccccugaccgcgcuagcuuccugcgagggaagaguaugggaauccagucugguguccagguggaugccaacugcgaaggcgacuguuaccauaacgggggaaccaucauuuccaaucuuccauuucaaaacauaaauagcagagcagugggcaagugcccgagguaugucaaacaggagucguugcugcuagcuacugguaugaagaacguucccgaaaucccuaaagggcggggccucuucggagccauugcgggcuucaucgagaaugggugggaaggacugauagaugguugguacggcuuucgucaccagaacgcccaaggggagggaacagcagcugacuacaagucuacccaguccgccauugaccagaucacgggcaaacuuaaucgccugaucgagaagaccaaccagcaauucgaauugauugauaaugaguuuacagaaguggagagacagaucgguaacguaauuaauuggacuagggacucaaugaccgaaguguggaguuauaacgcugagcuccuggucgccauggagaaucagcacacaauagauuuagcagacagcgaaaugaacaaacuguacgagcgggugcgacgccagcucagagaaaaugccgaggaagaugggacuggcuguuucgagaucuuucauaagugcgacgaugacuguauggcuuccauuaggaacaacaccuaugaucacucuaaguaccgggaggaagcgaugcaaaaucgcauccagaucgacccaguuaaacuuagcucaggauauaaggaugugauucugugguucaguuuuggcgcauccugcuucauauugcuagccaucgcuauggggcuggucuuuauuugcgugaaaaacggaaauaugagauguacaaucugcauuuga

SEQ ID NO: 138257 - RNA, 1683 nt, Artificial Sequence; identical to SEQ ID NO: 138242
  derived and/or modified CDS sequence (opt3) from hemagglutinin__InfluenzaA__AGQ80991

SEQ ID NO: 138258 - RNA, 1683 nt, Artificial Sequence
  derived and/or modified CDS sequence (opt3) from hemagglutinin__InfluenzaA__AGQ80992
augaacacccagauccugguguucgcccucgucgcuauuauacccacaaaugcagacaagaucugccuuggccaccaugccguuagcaacgggacuaaagugaauacgcugaccgagagaggaguagaaguggucaacgcgacagagacuguggaaaggaccaauguuccucggauuuguuccaaggguaaacgcacaguggauuugggccaaugcggguuacugggaaccaucacuggcccaccgcagugugaccaguuucuagaguucucugcugaucucauuaucgaacgacgugaggguucagacgucugcuaccccgggaaguuuaugaacgaggaagcccugagacagauacuuagggagaguggaggcaucgauaaagaaacaaugggcuucaccuauagcgggauucggacgaauggagcaacuuccgccugucgcagaucugguucgucauuuuacgcugagaugaaguggcuguugagcaacaccgacaaugcagccuucccucaaaugacaaagaguuauaaaaacacuaggaaggauccagcucucaucauuuggggcauccaccauuccgggucuaccacagagcagaccaaacuguacggaagcggcaauaagcugauaacgguggguuccucaaacuaucagcagaguuuuguacccagcccuggggcccggccacaaguuaauggacagucuggccgcauugacuuccacuggcucauguuaaaccccaaugauacugugacauuuuccuucaacggcgcguuuaucgcaccugaccgagccugcuuccugagagggaaaucaauggguauucagagcggaguccagguggaugcuaguugugaaggcgacugcuaccauucugggggaaccaucaucuccaaccuuccauuucaaaauauuaacagcagggccgugggcaaguguccgcgguaugucaagcaggagucguugaugcuggcaacugguaugaaaaauguucccgaaauaccuaaggggcguggccuauucggagcuaucgccggcuucauugagaacgggugggaaggacucaucgaugguugguacggcuuucgccaccagaaugcgcaaggggagggaacagccgcagacuacaaaucuacccaguccgcuauagaccagauuacgggcaagcugaacagacuuaucgagaaaaccaaucagcaauucgaacugaucgauaacgaguuuacagaaguggagaagcagauugguaauguaaucaacuggacuagggacucaaugaccgaaguguggaguuauaaugccgaguugcucgucgcuauggagaaccagcacacaauugaucuggccgacagcgaaaugaauaaauuauacgagcgggugaagcgacagcugcgcgaaaacgcagaggaagaugggacuggcugcuucgagauauuucauaagugugacgaugacugcauggccuccaucagaaauaacaccuaugaucacucuaaauacagggaggaagcuaugcaaaaccggauucagaucgacccaguuaagcucagcucaggauauaaagaugugauccuuugguucaguuuuggcgcguccugcuucauucuguuggcaauagccauggggcuagucuuuaucugugugaagaauggaaacaugcgcugcacaauuuguaucuga

SEQ ID NO: 138259 - RNA, 1683 nt, Artificial Sequence; identical to SEQ ID NO: 138228
  derived and/or modified CDS sequence (opt3) from hemagglutinin__InfluenzaA__AGQ80993

SEQ ID NO: 138260 - RNA, 1683 nt, Artificial Sequence; identical to SEQ ID NO: 138235
  derived and/or modified CDS sequence (opt3) from hemagglutinin__InfluenzaA__AGQ80994

SEQ ID NO: 138261 - RNA, 1683 nt, Artificial Sequence; identical to SEQ ID NO: 138237
  derived and/or modified CDS sequence (opt3) from hemagglutinin__InfluenzaA__AGQ80995

SEQ ID NO: 138262 - RNA, 1683 nt, Artificial Sequence; identical to SEQ ID NO: 138237
  derived and/or modified CDS sequence (opt3) from hemagglutinin__InfluenzaA__AGQ80996

SEQ ID NO: 138263 - RNA, 1683 nt, Artificial Sequence
  derived and/or modified CDS sequence (opt3) from hemagglutinin__InfluenzaA__AGQ80997
augaacacccagauccugguguucgcccucgucgcuauuauacccacaaaugcagacaagaucugccuuggccaccaugccguuagcaacgggacuaaagugaauacgcugaccgagagaggaguagaaguggucaacgcgacagagacuguggaaaggaccaauauuccucggaucuguuccaaggguaaacgcacaguugauuugggccaaugcggguuacugggaaccauuacuggcccaccgcagugugaccaguuucuagaguucucugcugaucucaucauagaacgacgugaggguucagacgugugcuaccccgggaaguuugucaacgaggaagcccugagacagauccuuagggagaguggaggcauugauaaagaaacaaugggcuucaccuauagcgggauccggacggacggagcaacuuccgccugucgcagaucugguucgucauuuuacgcugagaugaaguggcuguugagcaauaccgauaacgcagccuucccucaaaugacaaagaguuauaaaaauacuaggaaggacccagcucucauuaucuggggcauacaccauuccgggucuaccacagagcagaccaaacuguacggaagcggcaacaagcugauuacgguggguuccucaaauuaucagcagaguuuuguacccagcccuggggcccggccacaaguuaacggacagucuggccgcaucgauuuccacuggcucauguuaaaucccaacgacacugugacauuuuccuucaauggcgcguuuauugcaccugaucgagccucauuccugagagggaaaagcaugggaauccagagugguguccagguggacgcuaacugcgaaggcgauuguuaccauucugggggaaccaucauuuccaaccuuccauuucaaaauauaaacagcagggccgugggcaagugcccgcgguaugucaagcaggagucguugcugcuagcaacugguaugaaaaauguucccgaaaucccuaaggggcguggccucuucggagcuauugccggcuucaucgagaacgggugggaaggacugauagacgguugguacggcuuucgccaccaaaauucucagggggagggaacagcggccgacuacaaauccacccagucagcaauugaucagaucacgggcaaacuuaacagacugaucgagaagaccaaucagcaauucgaauugauugacaacgaguuuacagaaguggagaagcagaucgguaauguaauuaacuggacuagggauaguaugaccgaaguguggagcuauaaugcugagcuccuggucgccauggagaaccagcacacaauagacuuagcugauuccgaaaugaauaaacuguacgagcgggugaagcgacagcuccgcgaaaacgccgaggaagacgggacuggcuguuucgagaucuuucauaagugcgaugacgauuguauggcaucuauuagaaauaacaccuaugaccacagcaaauacagggaggaagccaugcaaaaccggauccagaucgauccaguuaaacuuucaaguggauauaaggacgugauucugugguucuccuuuggcgcuagcugcuucauauugcuagcgaucgcaauggggcuggucuuuauuugcgugaagaauggaaacaugcgcuguacaaucugcauuuga

SEQ ID NO: 138264 - RNA, 1683 nt, Artificial Sequence
  derived and/or modified CDS sequence (opt3) from hemagglutinin__InfluenzaA__AGQ81000
augaacacccagauccugguguucgcccucgucgcuauuauacccacaaaugcagacaagaucugccuuggccaccaugccguuagcaacgggacuaaagugaauacgcugaccgagagaggaguagaaguggucaacgcgacagagacuguggaaaggaccaauauuccucggaucuguuccaaggguaaacgcacaguugauuugggccaaugcggguuacugggaaccauuacuggcccaccgcagugugaccaguuucuagaguucucugcugaucucaucauagaacgacgugaggguucagacgugugcuaccccgggaaguuugucaacgaggaagcccugagacagauccuuagggagaguggaggcauuggcaaagaaacaaugggguucaccuauagcggaauccggacgaauggugcaacuuccgccugucgcagaucuggcucgucauuuuacgcugagaugaaguggcuguugagcaacaccgauaaugcagccuucccucaaaugacaaagaguuauaaaaacacuaggaaggacccagcucucauuaucugggggauacaccauuccggaucuaccacagagcagaccaaacuguacggcagcgguaauaagcugauuacggugggguccucaaacuaucagaaaaguuuuguacccagcccuggagcccggccacagguuaauggccaaucuggccgcaucgauuuccacuggcucauguuaaaccccaaugacacugugacauuuuccuucaacggggcguuuauugcaccugaucgagccucauuccugagaggaaagagcauggguauccagaguggcguccagguggacgcuaacugcgaaggggauuguuaccauaauggaggcaccaucauuucuaaccuuccauuucagaauauaaacuccagggccguggguaagugcccgcgguaugucaaacaagagagcuugcugcuagcaacugggaugaagaauguucccgaaaucccuaaaggccguggacucuucggcgcuauugccggguucaucgagaacggaugggaaggucugauagacggcugguacggguuucgccaccagaaugcgcagggagagggcacagccgcagauuacaagucgacccaaucugcuauugaccagaucacggguaaacuuaacagacugaucgagaagaccaaucagcaguucgaauugauugacaacgaguuuacagaaguggagaaacaaaucgggaauguaauuaacuggacuagggauuccaugaccgaaguguggucauauaaugccgagcuccuggucgcuauggagaaccagcacacaauagacuuagccgauagugaaaugaauaagcuguacgagcgggugaagcgacagcuccgcgaaaacgcagaggaagacggcacuggauguuucgagaucuuucauaaaugcgaugacgauuguauggccagcauuagaaacaauaccuaugaccacuccaaguacagggaggaagcuaugcagaaccggauccaaaucgauccaguuaaacuuucuagcggcuauaaggacgugauucugugguucucauuuggggcgaguugcuucauauugcuagcaaucgccaugggacuggucuuuauuugcgugaaaaaugguaacaugcgcuguacaaucugcauuuga

SEQ ID NO: 138265 - RNA, 1683 nt, Artificial Sequence
  derived and/or modified CDS sequence (opt3) from hemagglutinin__InfluenzaA__AGQ81001
augaacacccagauccugguguucgcccucgucgcuauuauacccacaaaugcagacaagaucugccuuggccaccaugccguuagcaacgggacuaaagugaauacgcugaccgagagaggaguagaaguggucaacgcgacagagacuguggaaaggaccaauauuccucggaucuguuccaaggguaaacgcacaguugauuugggccaaugcggguuacugggaaccauuacuggcccaccgcagugugaccaguuucuagaguucucugcugaucucaucauagaacgacgugaggguucagacgugugcuaccccgggaaguuugucaacgaggaagcccugagacagauccuuagggagaguggaggcauugauaaagaaacaaugggcuucaccuauagcgggauccggacgaauggagcaacuuccgccugucgcagaucugguucgucauuuuacgcugagaugaaguggcuguugagcaacaccgacaaugcagccuucccucaaaugacaaagaguuauaaaaacacuaggaaggauccagcucucauuaucuggggcauacaccauuccgggucuaccacagagcagaccaaacuguacggaagcggcaauaagcugauuacgguggguacuuccaacuaucagcagucauuuguacccaguccuggggcccggccacaaguuaauggacagagcggccgcaucgacuuccacuggcucauguuaaaccccaaugauacagugaccuuuucuuucaacggcgcguuuauugcaccugaccgagccuccuuccugagagggaaaucaaugggaauccagagcgguguccagguggaugcuaacugcgaaggcgacuguuaccauaaugggggaacuaucauuaguaaccuuccauuucaaaauauaaacucuagggccgugggcaagugcccgcgguaugucaagcaggaguccuugcugcuagcaacagguaugaaaaauguucccgaaaucccuaaggggcguggccucuucggagcuauugccggcuucaucgagaacgggugggaaggacugauagaugguugguacggcuuucgccaccagaaugcgcaaggggagggaaccgccgcagacuacaaaagcacgcagucggcuauugaccagaucaccggcaaacuuaacagacugaucgagaagacaaaucagcaauucgaauugauugauaacgaguuuacugaaaucgagaagcagauugguaaugugauaaacuggaccagggacucuaugacagaaguaugguccuauaaugccgagcuccugguggcuauggagaaccagcacacuaucgauuuagccgacucagaaaugaauaaacuguacgagcgggucaagcgacagcuccgcgaaaacgcagaggaagaugggaccggcuguuucgagauuuuucauaagugcgacgaugacuguauggccaguaucagaaacaauacauaugaucacagcaaauacagggaggaagcuaugcaaaaccggauccagauugacccagugaaacuuuccucuggauauaaggauguuauacugugguucagcuuuggcgcgucaugcuucaucuugcuagcaauugccauggggcugguguuuaucugcgucaagaauggaaacaugcgcuguaccauuugcaucuga

SEQ ID NO: 138266 - RNA, 1683 nt, Artificial Sequence; identical to SEQ ID NO: 138243
  derived and/or modified CDS sequence (opt3) from hemagglutinin__InfluenzaA__AGQ81002

SEQ ID NO: 138267 - RNA, 1683 nt, Artificial Sequence; identical to SEQ ID NO: 138243
  derived and/or modified CDS sequence (opt3) from hemagglutinin__InfluenzaA__AGQ81003

SEQ ID NO: 138268 - RNA, 1683 nt, Artificial Sequence; identical to SEQ ID NO: 138243
  derived and/or modified CDS sequence (opt3) from hemagglutinin__InfluenzaA__AGQ81004

SEQ ID NO: 138269 - RNA, 1683 nt, Artificial Sequence; identical to SEQ ID NO: 138243
  derived and/or modified CDS sequence (opt3) from hemagglutinin__InfluenzaA__AGQ81005

SEQ ID NO: 138270 - RNA, 1683 nt, Artificial Sequence; identical to SEQ ID NO: 138243
  derived and/or modified CDS sequence (opt3) from hemagglutinin__InfluenzaA__AGQ81006

SEQ ID NO: 138271 - RNA, 1683 nt, Artificial Sequence; identical to SEQ ID NO: 138243
  derived and/or modified CDS sequence (opt3) from hemagglutinin__InfluenzaA__AGQ81007

SEQ ID NO: 138272 - RNA, 1683 nt, Artificial Sequence; identical to SEQ ID NO: 138243
  derived and/or modified CDS sequence (opt3) from hemagglutinin__InfluenzaA__AGQ81008

SEQ ID NO: 138273 - RNA, 1683 nt, Artificial Sequence
  derived and/or modified CDS sequence (opt3) from hemagglutinin__InfluenzaA__AGQ81009
augaacacccagauccugguguucgcccucgucgcuauuauacccacaaaugcagacaagaucugccuuggccaccaugccguuagcaacgggacuaaagugaauacgcugaccgagagaggaguagaaguggucaacgcgacagagacuguggaaaggaccuccauuccucggaucuguucuaaggguaaacgcgcuguugauuugggccaaugcggguuacugggaacaauuaccggcccaccgcagugugaccaguuucuagaguucucagccgaucucaucauagaacgacaggaggguagugacgugugcuaccccgggaaguuugucaaugaggaagcacugcgucaaauccuuagagagagcggaggcauuaacaaagaaacuaugggcuucacauauuccgggaucaggaccaauggagccacgucugcuugucggcgcucggguagcagcuuuuacgcagagaugaaguggcuguugaguaacacugauaaugccgcuuucccucagaccacaaaguccuauaaaaacacuagaaaggacccagcccucauuaucuggggcauacaccauucugggagcaccacagagcagaccaaacuguacggauccggcaauaagcugauuacgguggguucaaguaacuaucagcaaucauuuguacccucuccuggggcgaggccacagguuaauggacaguccggccggaucgauuuccacuggcucauguuaaaccccaaugacacugugacauuuucauucaacggcgcauuuauugccccugaucgcgcuagcuuccugcgagggaaaaguaugggaauccagucugguguccaaguggacgccaacugcgaaggcgauuguuaccauaaugggggaaccaucauuuccaaccuuccauuucagaauauaaacagcagagcagugggcaagugcccgagguaugucaagcaggagucguugcugcuagcuacugguaugaaaaauguucccgaaaucccuaaggggcggggccucuucggagccauugcgggcuucaucgagaacgggugggaaggacugguggacgguugguacggcuuucgucaccaaaaugcccagggggagggaacagcagcugauuacaaaucuacccaguccgccauagaccagauuacgggcaaacuuaaccgccugaucgagaagaccaaucaacaguucgaauugaucgacaacgaguuuacagaaguagagagacagauugguaaugugaucaacuggacuagggauucaaugaccgaagucuggaguuauaaugcugagcuccugguggccauggagaaccagcacacaauugacuuagcagauagcgaaaugaauaagcuguacgagcggguucgacgccaacucagagaaaacgccgaggaagacgggacuggcuguuucgagauauuucauaaaugcgaugacgauuguauggcuuccaucaggaacaauaccuaugaccacucuaaguaccgggaggaagcgaugcagaaccgcauucagaucgauccagugaaacuuagcucaggauauaaggacgucauccugugguucaguuuuggcgcauccugcuucauuuugcuagccauagcuauggggcugguguuuaucugcguaaagaauggaaacaugagauguacaauuugcaucuga

SEQ ID NO: 138274 - RNA, 1683 nt, Artificial Sequence
  derived and/or modified CDS sequence (opt3) from hemagglutinin__InfluenzaA__AGQ81011
augaacacccagauccugguguucgcccucauugcuauaacacccacuaauagcgacaagaucugccuuggccaccaugcagucuccaacgggacgaaaguuaauacccugacagagagaggaguggaaguagugaacgccacugagaccgucgaaaggacaucuauuccucggaucuguucaaaggguaaacgcaccguggauuugggccaaugcggguuacugggaacuauuacaggcccaccgcagugugaccaguuucuagaguucagugcggaucucaucauagaacgacgugaggguagcgacguuugcuaccccgggaaguuugugaaugaggaagcucugagacagauccuuagggaguccggaggcauugauaaagaagccaugggcuucaccuauucugggauccggacgaacggagcaacuucggccugucgcagaucagagagcaguuuuuacgcugagaugaaguggcuguuguccaauaccgacaacgcagccuucccuccaaugacaaagucuuauaaaaauacuaggaaggcucccgcccucauuaucugggguauacaccauagcggcuccaccgcggaacaaacaaaacuguacgggucaggaaacaagcuggucaccgugcggaguagcaauuaucagcagucuuuuguaccuuccccaggcgcaggucccaaaguuaacgggcagucaggacgcauugauuuccacuggcucauguuaaauccuaacgacacggugacuuuuagcuucaauggcgccuuuaucgcuccagaucgagccaguuuccugagaggcaagucuauggggauucaauccggaguccagguggacgcaaacugcgagggugauuguuaccauagcggcgggacaaucaucucgaaccuuccguuucagaauauugacucuaggguggucggaaagugcccccgguauguuaaacagaaguccuugcugcuagcuaccggcaugaaaaacgugccugaaauaccaaagggucgugggcuuuucggcgccaucgcgggauucauugagaauggcugggaagggcugaucgauggaugguacgguuuucgccaccaaaacgcccagggcgaggggacugcagcugacuacaaaucaacacagagugccauaaaucaaaugaccggaaagcucaacagacugauugagaaaacgaaucagcaguucgaauugaucgacaacgaguuuaccgaaguagagaagcagaucggcaaugugauuaacuggacaagggauagcaucacugaagucugguccuauaaugcugagcuccugguggccauggagaaccaacacaccauugacuuagcagauucugaaaugaauaagcuguacgagcggguuaaacgacagcuccgcgaaaacgccgaggaagacgguacaggguguuucgagauauuucauaagugcgaugacgauuguauggcuagcaucagaaauaacacuuaugaccacucaaaauacagggaggaagcgaugcagaaccggauucagaucgaucccgugaaacuuaguuccggcuauaaggacgucauccugugguucagcuuuggagcaucuugcuugauucuacuggccauagcuaugggccucguguucaucugcguaaagaaugggaacaugcgcuguaccauuugcaucuga

SEQ ID NO: 138275 - RNA, 1683 nt, Artificial Sequence
  derived and/or modified CDS sequence (opt3) from hemagglutinin__InfluenzaA__AGQ81012
augaacacccagauccugguauucgcccucauugcuauaauccccacaaauagcgacaagauuugccuuggccaccaugcagucuccaacgggacuaaaguuaauacgcugaccgagagaggaguggaaguagugaacgccacagagacugucgaaaggaccucuaucccucggauuuguucaaaggguaaacgcacaguggauuugggccaaugcggguuacugggaaccaucacuggcccaccgcagugugaccaguuucuagaguucagugcggaucucauaaucgaacgacgugaggguagcgacguuugcuaccccgggaaguuugugaaugaggaagcucugagacagauucuuagggaguccggaggcaucaacaaagaagccaugggcuucacauauucugggauucggaccaauggagcaacgucggccugucgcagaucagguagcaguuuuuacgcugagaugaaguggcuguuguccaacacugauaaugcagccuucccuccaaugaccaagucuuauaaaaacacaaggaaggcucccgcccucaucauauggggcauucaccauagcggguccacugcggagcaaaccaaacuguacggaucaggcaauaagcuggucacagugcggaguagcaacuaucagcagucuuuuguaccuuccccaggugcagggccccagguuaauggacaaucaggccgcaucgacuuccacuggcucauguuaaacccuaaugauaccgugacguuuagcuucaacggcgccuuuauugcuccagaccgagccaguuuccugagagggaaaucuaugggaauccaguccgguguccagguggaugcaaacugcgaaggcgacuguuaccauagcgggggaacuaucauuucgaaucuuccguuucagaacauagauucuaggguggucggcaagugcccccgguauguuaagcaaaaauccuugcugcuagcuacagguaugaagaaugugccugagaucccaaaagggcguggccucuucggagccauugcgggcuucaucgaaaacgggugggagggacugauagacgguugguacggcuuucgccaccagaaugcccagggggaaggaaccgcagcugauuacaagucaacucaaagugccauuaaccagaugacaggcaaacuuaauagacugaucgagaagaccaaccagcaguucgaguugaucgacaaugaauuuacggagguagaaaaacaaauugguaacgugaucaauuggaccagggacagcauuacagaggucugguccuauaacgcugaacuccugguggccauggagaaucagcacacuauagauuuagcagacucugagaugaacaagcuguacgaacggguuaagcgacagcuccgcgagaaugccgaagaggaugggaccggcuguuucgaaaucuuucauaaaugcgacgaugacuguauggcuagcauuagaaacaacacauaugaucacucaaaguacagggaggaggcgaugcagaaucggauccaaaucgaccccgugaaacuuaguuccggauauaaggaugucauucugugguucagcuuuggcgcaucuugcuucauauugcuagccaucgcuauggggcugguguuuauuugcgugaaaaacggaaauaugcgcuguacuaucugcauuuga

SEQ ID NO: 138276 - RNA, 1683 nt, Artificial Sequence
  derived and/or modified CDS sequence (opt3) from hemagglutinin__InfluenzaA__AGQ81017
augaacacccagauccugguauucgcccucauugcuauaacacccacuaauagcgacaagaucugccuuggccaccaugcagucuccaacgggacgaaaguuaauacccugacagagagaggaguggaaguagugaacgccacugagaccgucgaaaggacaucuauuccucggaucuguucaaaggguaaacgcaccguggauuugggccaaugcggguuacugggaacuauuacaggcccaccgcagugugaccaguuucuagaguucagugcggaucucaucauagaacgacgugaggguagcgacguuugcuaccccgggaaguuugugaaugaggaagcucugagacagauccuuagggaguccggaggcauugauaaagaagccaugggcuucaccuauucugggauccggacgaacggagcaacuucggccugucgcagaucagguagcaguuuuuacgcugagaugaaguggcuguuguccaauaccgacaacgcagccuucccuccaaugacaaagucuuauaaaaauacuaggaaggcucccgcccucauuaucuggggcauacaccauagcggguccaccgcggagcaaacaaaacuguacggaucaggcaacaagcuggucaccgugcggaguagcaauuaucagcagucuuuuguaccuuccccaggugcagggccccagguuaacggacaaucaggccgcauugauuuccacuggcucauguuaaauccuaacgacacggugacuuuuagcuucaauggcgccuuuaucgcuccagaucgagccaguuuccugagagggaaaucuauggguauucaguccggaguccagguggacgcaaacugcgaaggcgauuguuaccauagcgggggaacaaucaucucgaaccuuccguuucagaauauugacucuaggguggucggcaagugcccccgguauguuaagcaaaaauccuugcugcuagcuaccgguaugaagaacgugccugagauaccaaaagggcguggccucuucggagccaucgcgggcuucauugaaaaugggugggagggacugaucgaugguugguacggcuuucgccaccagaacgcccagggggaaggaacugcagcugacuacaagucaacacaaagugccauaaaucagaugaccggcaaacuuaacagacugauugagaagacgaaucagcaguucgaguugaucgacaacgaauuuaccgagguagaaaaacaaaucgguaaugugauuaacuggacaagggauagcaucacugaggucugguccuauaaugcugaacuccugguggccauggagaaccagcacaccauugacuuagcagauucugagaugaauaagcuguacgaacggguuaagcgacagcuccgcgagaacgccgaagaggacgggacaggcuguuucgaaauauuucauaaaugcgaugacgauuguauggcuagcaucagaaauaacacuuaugaccacucaaaguacagggaggaggcgaugcagaaccggauucaaaucgaucccgugaaacuuaguuccggauauaaggacgucauccugugguucagcuuuggcgcaucuugcuucauuuugcuagccauagcuauggggcugguguuuaucugcgugaaaaauggaaacaugcgcuguaccauuugcaucuga

SEQ ID NO: 138277 - RNA, 1683 nt, Artificial Sequence
  derived and/or modified CDS sequence (opt3) from hemagglutinin__InfluenzaA__AGQ81018
augaacacccagauccugguguucgcccucauugcuauaauccccacaaauagcgacaagauuugccuuggccaccaugcagucuccaacgggacuaaaguuaauacgcugaccgagagaggaguggaaguagugaacgccacagagacugucgaaaggaccucuaucccucggauuuguucaaaggguaaacgcacaguggauuugggccaaugcggguuacugggaaccaucacuggcccaccgcagugugaccaguuucuagaguucagugcggaucucauaaucgaacgacgugaggguagcgacguuugcuaccccgggaaguuugugaaugaggaagcucugagacagauucuuagggaguccggaggcaucgucaaagaagccaugggcuucacauauucugggauucggaccaacggagcaacgucggccugucgcagaucagguagcaguuuuuacgcugagaugaaguggcuguuguccaauacugauaacgcagccuucccuccaaugaccaagucuuauaaaaauacaaggaaggcucccgccaucauaauuuggggcauccaccauagcggguccacugcggagcaaaccaaacucuacggaucaggcaacaagcuggugacaguacggaguagcaauuaucagcagucuuuuguuccuuccccaggugcagggccccaggugaacggacaaucaggccgcauugacuuccacuggcugaugcucaauccuaacgauaccgucacguuuagcuucaauggcgccuuuaucgcuccagaccgagccaguuucuuaagagggaaaucuaugggaauccaguccgguguccagguggaugcaaacugcgaaggcgacuguuaccauagcagggggacuauuauaucgaaccugccguuucagaauaucgauucucgggugguuggaaagugcccccguuaugugaagcaaaaaucccuuuugcuggcuacaggcaugaagaacguaccugagauuccaaaaggucgcgggcuauucggcgccaucgcgggauucauagaaaauggcugggaggggcucauugacggaugguacgguuuuagacaccagaacgcccagggcgaagggaccgcagcugauuacaagucaacucaaagugccaucaaucagaugacaggaaaacugaacaggcuuaucgagaagaccaaucagcaguucgagcugauugacaacgaauuuacggagguggaaaaacaaaucggcaaugucauuaacuggacccgggacagcauaacagaggugugguccuauaaugcugaauugcucguugccauggagaaccagcacacuaucgaucuggcagacucugagaugaauaaguuauacgaacgagugaagcgccagcugagagagaacgccgaagaggaugguaccggguguuucgaaauuuuucauaaaugcgacgaugacuguauggcuagcaucaggaauaacacauaugaucacucaaaguaccgggaggaggcgaugcagaaccgcauccaaauugaccccgucaaacucaguuccggcuauaaggaugugauacuuugguucagcuuuggagcaucuugcuucauccuguuggccauugcuaugggccuaguauuuaucugcguuaaaaaugggaacaugagauguacuauuugcaucuga

SEQ ID NO: 138278 - RNA, 1683 nt, Artificial Sequence; identical to SEQ ID NO: 138277
  derived and/or modified CDS sequence (opt3) from hemagglutinin__InfluenzaA__AGQ81019

SEQ ID NO: 138279 - RNA, 1683 nt, Artificial Sequence; identical to SEQ ID NO: 138276
  derived and/or modified CDS sequence (opt3) from hemagglutinin__InfluenzaA__AGQ81020

SEQ ID NO: 138280 - RNA, 1683 nt, Artificial Sequence; identical to SEQ ID NO: 138277
  derived and/or modified CDS sequence (opt3) from hemagglutinin__InfluenzaA__AGQ81021

SEQ ID NO: 138281 - RNA, 1683 nt, Artificial Sequence; identical to SEQ ID NO: 138276
  derived and/or modified CDS sequence (opt3) from hemagglutinin__InfluenzaA__AGQ81022

SEQ ID NO: 138282 - RNA, 1683 nt, Artificial Sequence; identical to SEQ ID NO: 138277
  derived and/or modified CDS sequence (opt3) from hemagglutinin__InfluenzaA__AGQ81023

SEQ ID NO: 138283 - RNA, 1683 nt, Artificial Sequence
  derived and/or modified CDS sequence (opt3) from hemagglutinin__InfluenzaA__AGQ81025
augaacacccagauccugguguucgcccucauugcuauaauccccacaaaugcagacaagauuugccuuggccaccaugccgucagcaacgggacuaaaguuaauacgcugaccgagagaggaguggaaguagugaacgcgacagagacugucgaaaggaccuccaucccucggauuuguucuaaggguaaacgcacaguggauuugggccaaugcggguuacugggaaccaucacuggcccaccgcagugugaccaguuucuagaguucucagcugaucucauaaucgaacgacgugaggguagugacguuugcuaccccgggaaguuugugaaugaggaagcccugagacagauucuuagggagagcggaggcaucgauaaagaagcaaugggcuucacauauuccgggauucggaccaacggagucacgucugccugucgcagaucggguagcucauuuuacgcugagaugaaguggcuguugaguaauacugacaacgcagccuucccuccaaugaccaaguccuauaaaaauacaaggaaggcucccgcccucaucauauggggcauucaccauucugggagcacugcggagcaaaccaaacuguacggauccggcaacaagcuggugacaguacggucaaguaauuaucagcagagcuuuguuccuucuccaggugcagggccccaggugaacggacaauccggccgcaucgauuuccacuggcucauguuaaauccuaacgacaccgucacguuuucauucaauggcgccuuuauugcuccagaucgagccagcuuccugagagggaaaaguaugggaauccagucugguguccagguggacgcaaacugcgaaggcgauuguuaccauuccgggggaacuaucauuagcaaccuuccguuucagaauauagacucgagggugguuggcaagugcccccgguaugugaagcaaaaaucuuugcugcuagcuacagguaugaagaacguaccugagaucccaaaagggcguggccucuucggagccauugcgggcuucaucgaaaaugggugggagggacugauagaugguugguacggcuuucgccaccagaacgcccagggggaaggaaccgcagcugacuacaaguccacucaaucagccauuaaucagaugacaggcaaacuuaacagacugaucgagaagaccaaucagcaguucgguuugaucgacaacgaguuuacggaaguggagaaacaaauugggaaugucaucaacuggaccagggauaguauuacagaaguguggagcuauaaugcugagcuccugguugccauggaaaaccagcacacuauagacuuagcagauuccgagaugaauaagcuguacgagcgggugaagcgacagcuccgcgaaaacgccgaggaagacggcaccggauguuucgagaucuuucauaaaugcgaugacgauuguauggcuucuauuagaaauaacacauaugaccacagcaaguacagggaagaggcgaugcagaaccggauccaaaucgaucccgucaaacuuucaaguggcuauaaggacgugauucugugguucuccuuuggggcaagcugcuucauauugcuagccaucgcuaugggacugguaguuauuugcgugaaaaaugguaacaugcgcuguacuaucugcauuuga

SEQ ID NO: 138284 - RNA, 1683 nt, Artificial Sequence
  derived and/or modified CDS sequence (opt3) from hemagglutinin__InfluenzaA__AGQ81026
augaacacccagauccugguauucgcccucauugcuauaauccccacaaaugcagacaagauuugccuuggccaccaugccgucagcaacgggacuaaaguuaauacgcugaccgagagaggaguggaaguagugaacgcgacagagacugucgaaaggaccuccaucccucggauuuguucuaaggguaaacgcacaguggauuugggccaaugcggguuacugggaaccaucacuggcccaccgcagugugaccaguuucuagaguucucagcugaucucauaaucgaacgacgugaggguagugacguuugcuaccccgggaaguuugugaaugaggaagcccugagacagauucuuagggagagcggaggcaucgauaaagaagcaaugggcuucacauauuccgggauucggaccaacggagccacgucugcuugucgcagaucggguagcagcuuuuacgcagagaugaaguggcuguugaguaauacugacaacgccgcuuucccuccaaccacaaaguccuauaaaaauacuaggaaggcccccgcgcucaucauauggggcauucaccauucugggagcaccgcagagcaaacaaaacuguacggauccggcaacaagcuggucaccgugcggucaaguaauuaucagcagagcuuuguaccuucuccaggugccgggccccagguuaacggacaauccggccgcaucgauuuccacuggcucauguuaaauccuaacgacacggugacuuuuucauucaauggcgcuuuuauugccccagaucgagcaucauuccugagagggaaaaguaugggaauccagucugguguccagguggacgcuaacugcgaaggcgauuguuaccauuccgggggaacaaucauuagcaaccuuccguuucagaauauagacucgaggguggucggcaagugcccccgguauguuaagcaaaaaucuuugcugcuagccaccgguaugaagaacgugccugagaucccaaaagggcguggccucuucggagcgauugccggcuucaucgaaaaugggugggagggacugauagaugguugguacggcuuucgccaccagaacgcacagggggaaggaacugcugccgacuacaaguccacacaaucagcuauuaaucagaugaccggcaaacuuaacagacugaucgagaagacgaaucagcaguucgaguugaucgacaacgaauuuaccgagguagaaaaacaaauugguaaugugaucaacuggacaagggauaguauuacugaggucuggagcuauaaugccgaacuccugguggcaauggagaaccagcacaccauagacuuagccgauuccgagaugaauaagcuguacgaacggguuaagcgacagcuccgcgagaacgcugaagaggacgggacaggcuguuucgaaaucuuucauaaaugcgaugacgauuguauggcgucuauuagaaauaacacuuaugaccacagcaaguacagggaggaggcaaugcagaaccggauccaaaucgaucccgugaaacuuucaaguggauauaaggacgucauucugugguucuccuuuggcgccagcugcuucauauugcuagcuaucgccauggggcugguguuuauuugcgugaaaaauggaaacaugcgcuguaccaucugcauuuga

SEQ ID NO: 138285 - RNA, 1683 nt, Artificial Sequence
  derived and/or modified CDS sequence (opt3) from hemagglutinin__InfluenzaA__AGQ81027
augaacacccagauccugguguucgcccucauugcuauaauccccacaaaugcagacaagauuugccuuggccaccaugccgucagcaacgggacuaaaguuaauacgcugaccgagagaggaguggaaguagugaacgcgacagagacugucgaaaggaccuccaucccucggauuuguucuaaggguaaacgcacaguggauuugggccaaugcggguuacugggaaccaucacuggcccaccgcagugugaccaguuucuagaguucucagcugaucucauaaucgaacgacgugaggguagugacguuugcuaccccgggaaguuugugaaugaggaagcccugagacagauucuuagggagagcggaggcaucgauaaagaagcaaugggcuucacauauuccgggauucggaccaacggagucacgucugccugucgcagaucggguagcucauuuuacgcugagaugaaguggcuguugaguaauacugacaacgcagccuucccuccaaugaccaaguccuauaaaaauacaaggaaggcucccgcccucaucauauggggcauucaccauucugggagcacugcggagcaaaccaaacuguacggauccggcaacaagcuggugacaguacggucaaguaauuaucagcagagcuuuguuccuucuccaggugcagggccccaggugaacggacaauccggccgcaucgauuuccacuggcucauguuaaauccuaacgacaccgucacguuuucauucaauggcgccuuuauugcuccagaucgagccagcuuccugagagggaaaaguaugggaauccagucugguguccagguggacgcaaacugcgaaggcgauuguuaccauuccgggggaacuaucauuagcaaccuuccguuucagaauauagacucgagggugguuggcaagugcccccgguaugugaagcaaaaaucuuugcugcuagcuacagguaugaagaacguaccugagaucccaaaagggcguggccucuucggagccauugcgggcuucaucgaaaaugggugggagggacugauagaugguugguacggcuuucgccaccagaacgcccagggggaaggaaccgcagcugacuacaaguccacucaaucagccauuaaucagaugacaggcaaacuuaacagacugaucgagaagaccaaucagcaguucgaguugaucgacaacgaauuuacggagguggaaaaacaaauugguaaugucaucaacuggaccagggauaguauuacagagguguggagcuauaaugcugaacuccugguugccauggagaaccagcacacuauagacuuagcagauuccgagaugaauaagcuguacgaacgggugaagcgacagcuccgcgagaacgccgaagaggacgggaccggcuguuucgaaaucuuucauaaaugcgaugacgauuguauggcuucuauuagaaauaacacauaugaccacagcaaguacagggaggaggcgaugcagaaccggauccaaaucgaucccgucaaacuuucaaguggauauaaggacgugauucugugguucuccuuuggcgcaagcugcuucauauugcuagccaucgcuauggggcugguauuuauuugcguuaaaaauggaaacaugcgcuguacuaucugcauuuga

SEQ ID NO: 138286 - RNA, 1683 nt, Artificial Sequence
  derived and/or modified CDS sequence (opt3) from hemagglutinin__InfluenzaA__AGQ81028
augaacacccagauccugguguucgcccucauugcuauaauccccacaaaugcagacaagauuugccuuggccaccaugccgucagcaacgggacuaaaguuaauacgcugaccgagagaggaguggaaguagugaacgcgacagagacugucgaaaggaccuccaucccucggauuuguucuaaggguaaacgcacaguggauuugggccaaugcggguuacugggaaccaucacuggcccaccgcagugugaccaguuucuagaguucucagcugaucucauaaucgaacgacgugaggguagugacguuugcuaccccgggaaguuugugaaugaggaagcccugagacagauucuuagggagagcggaggcaucgauaaagaagcaaugggcuucacauauuccgggauucggaccaacggagccacgucugcuugucgcagaucggguagcagcuuuuacgcagagaugaaguggcuguugaguaauacugacaacgccgcuuucccuccaaccacaaaguccuauaaaaauacuaggaaggcccccgcgcucaucauauggggcauucaccauucugggagcaccgcagagcaaacaaaacuguacggauccggcaacaagcuggucaccgugcggucaaguaauuaucagcagagcuuuguaccuucuccaggugccgggccccagguuaacggacaauccggccgcaucgauuuccacuggcucauguuaaauccuaacgacacggugacuuuuucauucaauggcgcuuuuauugccccagaucgagcaucauuccugagagggaaaaguaugggaauccagucugguguccagguggacgcuaacugcgaaggcgauuguuaccauuccgggggaacaaucauuagcaaccuuccguuucagaauauagacucgaggguggucggcaagugcccccgguauguuaagcaaaaaucuuugcugcuagccaccgguaugaagaacgugccugagaucccaaaagggcguggccucuucggagcgauugccggcuucaucgaaaaugggugggagggacugauagaugguugguacggcuuucgccaccagaacgcacagggggaaggaacugcugccgacuacaaguccacacaaucagcuauuaaucagaugaccggcaaacuuaacagacugaucgagaagacgaaucagcaguucgaguugaucgacaacgaauuuaccgagguagaaaaacaaauugguaaugugaucaacuggacaagggauaguauuacugagauguggagcuauaaugccgaacuccuggucgcaauggagaaccagcacaccauagacuuagccgauuccgagaugaauaagcuguacgaacgggugaagcgacagcuccgcgagaacgcugaagaggacgggacaggcuguuucgaaaucuuucauaaaugcgaugacgauuguauggcgucuauuagaaauaacacuuaugaccacagcaaguacagggaggaggcaaugcagaaccggauccaaaucgaucccguuaaacuuucaaguggauauaaggacgugauucugugguucuccuuuggcgccagcugcuucauauugcuagcuaucgccauggggcuggucuuuauuugcgugaaaaauggaaacaugcgcuguaccaucugcauuuga

SEQ ID NO: 138287 - RNA, 1683 nt, Artificial Sequence
  derived and/or modified CDS sequence (opt3) from hemagglutinin__InfluenzaA__AGQ81029
augaacacccagauccugguauucgcccucauugcuauaauccccacaaaugcagacaagauuugccuuggccaccaugccgucagcaacgggacuaaaguuaauacgcugaccgagagaggaguggaaguagugaacgcgacagagacugucgaaaggaccuccaucccucggauuuguucuaaggguaaacgcacaguggauuugggccaaugcggguuacugggaaccaucacuggcccaccgcagugugaccaguuucuagaguucucagcugaucucauaaucgaacgacgugaggguagugacguuugcuaccccgggaaguuugugaaugaggaagcccugagacagauucuuagggagagcggaggcaucgauaaagaagcaaugggcuucacauauuccgggauucggaccaacggagucacgucugccugucgcagaucggguagcucauuuuacgcugagaugaaguggcuguugaguaauacugacaacgcagccuucccuccaaugaccaaguccuauaaaaauacaaggaaggcucccgcccucaucauauggggcauucaccauucugggagcacugcggagcaaaccaaacuguacggauccggcaacaagcuggugacaguacggucaaguaauuaucagcagagcuuuaugccuucuccaggugcagggccccagguuaacggacaauccggccgcaucgauuuccacuggcucauguuaaauccuaacgacaccgugacguuuucauucaauggcgccuuuauugcuccagaucgagccagcuuccugagagggaaaaguaugggaauccagucugguguccagguggacgcaaacugcgaaggcgauuguuaccauuccgggggaacuaucauuagcaaccuuccguuucagaauauagacucgaggguggucggcaagugcccccgguauguuaagcaaaaaucuuugcugcuagcuacagguaugaagaacgugccugagaucccaaaagggcguggccucuucggagccauugcgggcuucaucgaaaaugggugggagggacugauagaugguugguacggcuuucgccaccagaacgcccagggggaaggaaccgcagcugacuacaaguccacucaaucagccauuaaucagaugacaggcaaacuuaacagacugaucgagaagaccaaucagcaguucgaguugaucgacaacgaauuuacggagguagaaaaacaaauugguaaugugaucaacuggaccagggauaguauuacagaggucuggagcuauaaugcugaacuccugguggccauggagaaccagcacacuauagacuuagcagauuccgagaugaauaagcuguacgaacggguuaagcgacagcuccgcgagaacgccgaagaggacgggaccggcuguuucgaaaucuuucauaaaugcgaugacgauuguauggcuucuauuagaaauaacacauaugaccacagcaaguacagggaggaggcgaugcagaaccggauccaaaucgaucccgugaaacuuucaaguggauauaaggacgucauucugugguucuccuuuggcgcaagcugcuucauauugcuagccaucgcuauggggcugguguuuauuugcgugaaaaauggaaacaugcgcuguacuaucugcauuuga

SEQ ID NO: 138288 - RNA, 1683 nt, Artificial Sequence
  derived and/or modified CDS sequence (opt3) from hemagglutinin__InfluenzaA__AGQ81031
augaacacccagauccugguguucgcccucauugcuauaauccccacaaaugcagacaagauuugccuuggccaccaugccgucagcaacgggacuaaaguuaauacgcugaccgagagaggaguggaaguagugaacgcgacagagacugucgaaaggaccuccaucccucggauuuguucuaaggguaaacgcacaguggauuugggccaaugcggguuacugggaaccaucacuggcccaccgcagugugaccaguuucuagaguucucagcugaucucauaaucgaacgacgugaggguagugacguuugcuaccccgggaaguuugugaaugaggaagcccugagacagauucuuagggagagcggaggcaucaacaaagaagcaaugggcuucacauauuccgggauucggaccaauggagccacgucugcuugucgcagaucggguagcagcuuuuacgcagagaugaaguggcuguugaguaacacugauaaugccgcuuucccuccaaugaccaaguccuauaaaaacacaaggaaggcccccgcgcucaucauauggggcauucaccauucugggagcacugcagagcaaaccaaacuguacggauccggcaauaagauggucacagugcggucaaguaacuaucagcagagcuuuguaccuucuccaggugccgggccccagguuaauggacaauccggccgcaucgacuuccacuggcugaugcucaacccuaaugauaccgugacguuuucauucaacggcgcuuuuauugccccagaccgagcaucauucuuaagagggaaaaguaugggaauccagucugguguccagguggaugcuaacugcgaaggcgacuguuaccauuccgggggaacuaucauuagcaaucugccguuucagaacauagauucgaggguggucggcaagugcccccgguauguuaagcaaaaaucucuuuugcuggccacagguaugaagaaugugccugagaucccaaaagggcguggccuauucggagcgauugccggcuucaucgaaaacgggugggagggacucauagacgguugguacggcuuucgccaccagaaugcacagggggaaggaaccgcugccgauuacaaguccacucaaucagcuauuaaccagaugacaggcaaacugaauagacuuaucgagaagaccaaccagcaguucgagcugaucgacaaugaauuuacggagguagaaaggcaaauugguaacgugaucaauuggacccgggacaguauuacagaggucuggagcuauaacgccgaauugcucguggcaauggagaaucagcacacuauagaucuggccgacuccgagaugaacaaauuauacgaacgaguuaagcgccagcugagagagaaugcugaagaggaugggaccggcuguuucgaaaucuuucauaagugcgacgaugacuguauggcgucuauuaggaacaacacauaugaucacagcaaauaccgggaggaggcaaugcagaaucgcauccaaaucgaccccgugaagcucucaaguggauauaaagaugucauucuuugguucuccuuuggcgccagcugcuucauacuguuggcuaucgccauggggcuaguguuuauuugcguaaagaacggaaauaugagauguacuaucugcauuuga

SEQ ID NO: 138289 - RNA, 1683 nt, Artificial Sequence; identical to SEQ ID NO: 138284
  derived and/or modified CDS sequence (opt3) from hemagglutinin__InfluenzaA__AGQ81032

SEQ ID NO: 138290 - RNA, 1683 nt, Artificial Sequence; identical to SEQ ID NO: 138285
  derived and/or modified CDS sequence (opt3) from hemagglutinin__InfluenzaA__AGQ81033

SEQ ID NO: 138291 - RNA, 1683 nt, Artificial Sequence; identical to SEQ ID NO: 138284
  derived and/or modified CDS sequence (opt3) from hemagglutinin__InfluenzaA__AGQ81034

SEQ ID NO: 138292 - RNA, 1683 nt, Artificial Sequence; identical to SEQ ID NO: 138285
  derived and/or modified CDS sequence (opt3) from hemagglutinin__InfluenzaA__AGQ81035

SEQ ID NO: 138293 - RNA, 1683 nt, Artificial Sequence; identical to SEQ ID NO: 138285
  derived and/or modified CDS sequence (opt3) from hemagglutinin__InfluenzaA__AGQ81036

SEQ ID NO: 138294 - RNA, 1683 nt, Artificial Sequence; identical to SEQ ID NO: 138285
  derived and/or modified CDS sequence (opt3) from hemagglutinin__InfluenzaA__AGQ81037

SEQ ID NO: 138295 - RNA, 1683 nt, Artificial Sequence; identical to SEQ ID NO: 138277
  derived and/or modified CDS sequence (opt3) from hemagglutinin__InfluenzaA__AGQ81038

SEQ ID NO: 138296 - RNA, 1683 nt, Artificial Sequence; identical to SEQ ID NO: 138277
  derived and/or modified CDS sequence (opt3) from hemagglutinin__InfluenzaA__AGQ81039

SEQ ID NO: 138297 - RNA, 1683 nt, Artificial Sequence
  derived and/or modified CDS sequence (opt3) from hemagglutinin__InfluenzaA__AGQ81040
augaacacccagauccugguguucgcccucauugcuauaauccccacaaaugcagacaagauuugccuuggccaccaugccgucagcaacgggacuaaaguuaauacgcugaccgagagaggaguggaaguagugaacgcgacagagacugucgaaaggaccaauaucccucggauuuguuccaaggguaaacgcacaguggauuugggccaaugcggguuacugggaaccaucacuggcccaccgcagugugaccaguuucuagaguucucugcugaucucauaaucgaacgacgugaggguucagacguuugcuaccccgggaaguuugugaacgaggaagcccugagacagauucuuagggagaguggaggcaucgauaaagaagcaaugggcuucacauauagcgggauucggaccaauggagccacguccgcuugucgcagaucugguucgucauuuuacgcagagaugaaguggcuguugagcaacacugacaaugccgcuuucccucaaaugaccaagaguuauaaaaacacaaggaaggauccagcccucaucauauggggcauucaccauuccgggucuacugcggagcagaccaaacuguacggaagcggcaauaagcuggucacaguggguuccucaaacuaucagcagaguuuuguacccagcccuggggcacggccacaaguuaauggacagucuggccgcaucgacuuccacuggcucauguuaaaccccaaugauaccgugacguuuuccuucaacggcgccuuuauugcuccugaccgagccucauuccugagagggaaaagcaugggaauccagagugguguccagaucgaugcaaacugcgaaggcgacuguuaccauucugggggaacuauuauauccaaucuuccauuucaaaacaucgauagcagggcugugggcaagugcccgcgguaugugaagcagaaaucguugcugcuagccacagguaugaagaauguccccgagauuccuaaagggcguggccucuucggagcgaucgccggcuucauagaaaacgggugggagggacugauugacgguugguacggcuuucgccaccagaaugcacaaggggaaggaaccgcugccgacuacaagucuacucaguccgcuaucgaucagaucacaggcaaacuuaacagacugauugagaagaccaaucagcaauucgaguugaucgacaacgaauuuacggagguugaaaaacagauugguaaugugauaaacuggaccagggauucaaucacagagguauggaguuauaaugccgaacuccugguggcaauggagaaccagcacacuauugacuuagccgauagcgagaugaauaagcuguacgaacgggucaagcgacagcuccgcgagaacgcugaagaggacgggaccggcuguuucgaaaucuuucauaaaugcgaugacgauuguauggcguccaucagaaauaacacauaugaccacucuaaguacagggaggaggcaaugcaaaaccggauucagauagauccagugaaacuuagcucaggauauaaggacguuauccugugguucaguuuuggcgccuccugcuucauuuugcuagcuaucgccauggggcugguguuuauuugcgucaaaaauggaaacaugcgcuguacuaucugcauauga

SEQ ID NO: 138298 - RNA, 1683 nt, Artificial Sequence
  derived and/or modified CDS sequence (opt3) from hemagglutinin__InfluenzaA__AGQ81041
augaacacccagauccugguguucgcccucauugcuauaauccccacaaaugcagacaagauuugccuuggccaccaugccgucagcaacgggacuaaaguuaauacgcugaccgagagaggaguggaaguagugaacgcgacagagacugucgaaaggaccaauaucccucggauuuguuccaaggguaaacgcacaguggauuugggccaaugcggguuacugggaaccaucacuggcccaccgcagugugaccaguuucuagaguucucugcugaucucauaaucgaacgacgugaggguucagacguuugcuaccccgggaaguuugugaacgaggaagcccugagacagauucuuagggagaguggaggcaucgauaaagaagcaaugggcuucacauauagcgggauucggaccaauggagccacguccgcuugucgcagaucugguucgucauuuuacgcagagaugaaguggcuguugagcaacacugacaaugccgcuuucccucaaaccacaaagaguuauaaaaacacuaggaaggauccagcccucaucauauggggcauucaccauuccgggucuaccgcggagcagacaaaacuguacggaagcggcaauaagcuggucaccguggguuccucaaacuaucagcagaguuuuguacccagcccuggggcacggccacaaguuaauggacagucuggccgcaucgacuuccacuggcucauguuaaaccccaaugauacggugacuuuuuccuucaacggcgccuuuauugcuccugaccgagccucauuccugagagggaaaagcaugggaauccagagugguguccagguggaugcaaacugcgaaggcgacuguuaccauucugggggaacaaucauuuccaaucuuccauuucaaaacauagauagcagggcugugggcaagugcccgcgguaugucaagcagaaaucguugcugcuagccaccgguaugaagaauguucccgagaucccuaaagggcguggccucuucggagcgauugccggcuucaucgaaaacgggugggagggacugauagacgguugguacggcuuucgccaccagaaugcacaaggggaaggaacugcugccgacuacaagucuacacaguccgcuauugaucagaucaccggcaaacuuaacagacugaucgagaagacgaaucagcaauucgaguugauugacaacgaauuuaccgagguggaaaaacagaucgguaauguaauuaacuggacaagggauucaauaacugagguguggaguuauaaugccgaacuccuggucgcaauggagaaccagcacaccaucgacuuagccgauagcgagaugaauaagcuguacgaacgggugaagcgacagcuccgcgagaacgcugaagaggacgggacaggcuguuucgaaauuuuucauaaaugcgaugacgauuguauggcguccaucagaaauaacacuuaugaccacucuaaguacagggaggaggcaaugcaaaaccggauccagauugauccaguuaaacuuagcucaggauauaaggacgugauacugugguucaguuuuggcgccuccugcuucaucuugcuagcuauugccauggggcuggucuuuaucugcgugaaaaauggaaacaugcgcuguaccauuugcaucuga

SEQ ID NO: 138299 - RNA, 1683 nt, Artificial Sequence
  derived and/or modified CDS sequence (opt3) from hemagglutinin__InfluenzaA__AGQ81042
augaacacccagauccugguguucgcccucauugcuauaauccccacaaaugcagacaagauuugccuuggccaccaugccgucagcaacgggacuaaaguuaauacgcugaccgagagaggaguggaaguagugaacgcgacagagacugucgaaaggaccaauaucccucggauuuguuccaaggguaaacgcacaguggauuugggccaaugcggguuacugggaaccaucacuggcccaccgcagugugaccaguuucuagaguucucugcugaucucauaaucgaacgacgugaggguucagacguuugcuaccccgggaaguuugugaacgaggaagcccugagacagauucuuagggagaguggaggcaucgauaaagaagcaaugggcuucacauauagcgggauucggaccaauggagccacguccgcuugucgcagaucugguucgucauuuuacgcagagaugaaguggcuguugagcaacacugacaaugccgcuuucccucaaaugaccaagaguuauaaaaacacaaggaaggauccagcccucaucauauggggcauucaccauuccgggucuacugcggagcagaccaaacuguacggaagcggcaauaagcuggucacaguggguuccucaaacuaucagcagaguuuuguacccagcccuggggcacggccacaaguuaauggacagucuggccgcaucgacuuccacuggcucauguuaaaccccaaugauaccgugacguuuuccuucaacggcgccuuuauugcuccugaccgagccucauuccugagagggaaaagcaugggaauccagagugguguccagguggaugcaaacugcgaaggcgacuguuaccauucugggggaacuaucauuuccaaucuuccauuucaaaacauagauagcagggcugugggcaagugcccgcgguaugucaagcagaaaucguugcugcuagccacagguaugaagaauguucccgagaucccuaaagggcguggccucuucggagcgauugccggcuucaucgaaaacgggugggagggacugauagacgguugguacggcuuucgccaccagaaugcacaaggggaaggaaccgcugccgacuacaagucuacucaguccgcuauugaucagaucacaggcaaacuuaacagacugaucgagaagaccaaucagcaauucgaguugauugacaacgaauuuacggagguggaaaaacagaucgguaauguaauuaacuggaccagggauucaauaacagagguguggaguuauaaugccgaacuccuggucgcaauggagaaccagcacacuaucgacuuagccgauagcgagaugaauaagcuguacgaacgggugaagcgacagcuccgcgagaacgcugaagaggacgggaccggcuguuucgaaauuuuucauaaaugcgaugacgauuguauggcguccaucagaaauaacacauaugaccacucuaaguacagggaggaggcaaugcaaaaccggauccagauugauccaguuaaacuuagcucaggauauaaggacgugauacugugguucaguuuuggcgccuccugcuucaucuugcuagcuauugccauggggcuggucuuuaucugcgugaaaaauggaaacaugcgcuguacuauuugcaucuga

SEQ ID NO: 138300 - RNA, 1683 nt, Artificial Sequence
  derived and/or modified CDS sequence (opt3) from hemagglutinin__InfluenzaA__AGQ81043
augaacacccagauccugguguucgcccucauugcuauaauccccacaaaugcagacaagauuugccuuggccaccaugccgucagcaacgggacuaaaguuaauacgcugaccgagagaggaguggaaguagugaacgcgacagagacugucgaaaggaccaauaucccucggauuuguuccaaggguaaacgcacaguggauuugggccaaugcggguuacugggaaccaucacuggcccaccgcagugugaccaguuucuagaguucucugcugaucucauaaucgaacgacgugaggguucagacguuugcuaccccgggaaguuugugaacgaggaagcccugagacagauucuuagggagaguggaggcaucgauaaagaagagaugggcuucacauauagcgggauucggaccaauggagcaacguccgccugucgcagaucugguucgucauuuuacgcugagaugaaguggcuguugagcaacacugacaaugcagccuucccucaaaugaccaagaguuauaaaaacacaaggaaguccccagcucucaucgucuggggcauacaccauucugugagcacugccgaacagaccaaacuguacggguccggaaauaagcugguaacaguuggcucaaguaacuaucagcagagcuuugugcccucuccuggugcgcggccacaagucaaugggcucuccggacgcauugauuuccacugguuaaugcugaaccccaaugacaccgugacguuuucauucaacggcgcauuuaucgccccugaucgagcuagcuuccuuagaggcaaaaguauggggauucagucuggagugcaggucgacgccaacugcgagggugauuguuaccauuccggcgggacuaucaucagcaauuugccauuucagaacauugacucgagggcaguuggaaagugcccgcgguaugugaagcaacguucucugcuacucgcuacaggcaugaaaaauguacccgaaauaccuaagggucgcgggcuguucggcgccaucgcgggauucauugagaacggcugggaagggcuuaucgauggaugguacgguuuuagacaccagaaugcccagggcgaggggaccgcagcugacuacaaauccacucaaucagccauagaccagauuacaggaaagcugaacagguugaucgagaaaaccaaucagcaguucgaacucaucgauaacgaguuuaaugaaguggagaagcaaauuggcaacgucaucaauuggacgcgggacaguauuaccgaaguguggagcuauaacgcugagcuguuaguugccauggagaaucagcacacaauagaucuggcagacuccgaaauggauaaacucuacgagcgagugaagcgccagcuuagagaaaacgccgaggaagacgguacuggguguuucgagaucuuucauaagugcgaugacgauuguauggcuucuauuaggaauaacaccuaugaccacagcaaauaccgggaggaagcgaugcagaaccgcauccaaaucgauccagucaagcugucaaguggcuauaaagacgugauuuugugguucuccuuuggagcaagcugcuucauacuacuggccaucguaaugggccucguuuuuauuugcgugaagaaugggaacaugagauguacaaucugcauuuga

SEQ ID NO: 138301 - RNA, 1683 nt, Artificial Sequence; identical to SEQ ID NO: 138036
  derived and/or modified CDS sequence (opt3) from hemagglutinin__InfluenzaA__AGQ81044

SEQ ID NO: 138302 - RNA, 1683 nt, Artificial Sequence; identical to SEQ ID NO: 138036
  derived and/or modified CDS sequence (opt3) from hemagglutinin__InfluenzaA__AGQ81045

SEQ ID NO: 138303 - RNA, 1683 nt, Artificial Sequence; identical to SEQ ID NO: 138036
  derived and/or modified CDS sequence (opt3) from hemagglutinin__InfluenzaA__AGQ81046

SEQ ID NO: 138304 - RNA, 1683 nt, Artificial Sequence; identical to SEQ ID NO: 138285
  derived and/or modified CDS sequence (opt3) from hemagglutinin__InfluenzaA__AGQ81047

SEQ ID NO: 138305 - RNA, 1683 nt, Artificial Sequence; identical to SEQ ID NO: 138284
  derived and/or modified CDS sequence (opt3) from hemagglutinin__InfluenzaA__AGQ81049

SEQ ID NO: 138306 - RNA, 1683 nt, Artificial Sequence; identical to SEQ ID NO: 138285
  derived and/or modified CDS sequence (opt3) from hemagglutinin__InfluenzaA__AGQ81050

SEQ ID NO: 138307 - RNA, 1683 nt, Artificial Sequence
  derived and/or modified CDS sequence (opt3) from hemagglutinin__InfluenzaA__AGQ81051
augaacacccagauccugguauucgcccucauugcuauaauccccacaaaugcagacaagauuugccuuggccaccaugccgucagcaacgggacuaaaguuaauacgcugaccgagagaggaguggaaguagugaacgcgacagagacugucgaaaggaccuccaucccucggauuuguucuaaggguaaacgcacaguggauuugggccaaugcggguuacugggaaccaucacuggcccaccgcagugugaccaguuucuagaguucucagcugaucucauaaucgaacgacgugaggguagugacguuugcuaccccgggaaguuugugaaugaggaagcccugagacagauucuuagggagagcggaggcaucaacaaagaagcaaugggcuucacauauuccgggauucggaccaauggagccacgucugcuugucgcagaucggguagcagcuuuuacgcagagaugaaguggcuguugaguaacacugauaaugccgcuuucccuccaaugaccaaguccuauaaaaacacaaggaaggcccccgcgcucaucauauggggcauucaccauucugggagcacugcagagcaaaccaaacuguacggauccggcaauaagcuggucacagugcggucaaguaacuaucagcagagcuuuguaccuucuccaggugccgggccccagguuaauggacaauccggccgcaucgacuuccacuggcucauguuaaacccuaaugauaccgugacguuuucauucaacggcgcuuuuauugccccagaccgagcaucauuccugagagggaaaaguaugggaauccagucugguguccagguggaugcuaacugcgaaggcgacuguuaccauuccgggggaacuaucauuagcaaucuuccguuucagaacauagauucgaggguggucggcaagugcccccgguauguuaagcaaaaaucuuugcugcuagccacagguaugaagaaugugccugagaucccaaaagggcguggccucuucggagcgauugccggcuucaucgaaaacgggugggagggacugauagacgguugguacggcuuucgccaccagaaugcacagggggaaggaaccgcugccgauuacaaguccacucaaucagcuauuaaccagaugacaggcaaacuuaauagacugaucgagaagaccaaccagcaguucgaguugaucgacaaugaauuuacggagguagaaaaacaaauugguaacgugaucaauuggaccagggacaguauuacagaggucuggagcuauaacgccgaacuccugguggcaauggagaaucagcacacuauagauuuagccgacuccgagaugaacaagcuguacgaacggguuaagcgacagcuccgcgagaaugcugaagaggaugggaccggcuguuucgaaaucuuucauaaaugcgacgaugacuguauggcgucuauuagaaacaacacauaugaucacagcaaguacagggaggaggcaaugcagaaucggauccaaaucgaccccgugaaacuuucaaguggauauaaggaugucauucugugguucuccuuuggcgccagcugcuucauauugcuagcuaucgccauggggcugguguuuauuugcgugaaaaacggaaauaugcgcuguacuaucugcauuuga

SEQ ID NO: 138308 - RNA, 1683 nt, Artificial Sequence; identical to SEQ ID NO: 138285
  derived and/or modified CDS sequence (opt3) from hemagglutinin__InfluenzaA__AGQ81052

SEQ ID NO: 138309 - RNA, 1683 nt, Artificial Sequence
  derived and/or modified CDS sequence (opt3) from hemagglutinin__InfluenzaA__AGQ81053
augaacacccagauccugguguucgcccucauugcuauaauccccacaaaugcagacaagauuugccuuggccaccaugccgucagcaacgggacuaaaguuaauacgcugaccgagagaggaguggaaguagugaacgcgacagagacugucgaaaggaccuccaucccucggauuuguucuaaggguaaacgcacaguggauuugggccaaugcggguuacugggaaccaucacuggcccaccgcagugugaccaguuucuagaguucucagcugaucucauaaucgaacgacgugaggguagugacguuugcuaccccgggaaguuugugaaugaggaagcccugagacagauucuuagggagagcggaggcaucaacaaagaagcaaugggcuucacauauuccgggauucggaccaauggagccacgucugcuugucgcagaucggguagcagcuuuuacgcagagaugaaguggcuguugaguaacacugauaaugccgcuuucccuccaaugaccaaguccuauaaaaacacaaggaaggcccccgcgcucaucauauggggcauucaccauucugggagcacugcagagcaaaccaaacuguacggauccggcaauaagauggucacagugcggucaaguaacuaucagcagagcuuuguaccuucuccaggugccgggccccagguuaauggacaauccggccgcaucgacuuccacuggcugaugcucaacccuaaugauaccgugacguuuucauucaacggcgcuuuuauugccccagaccgagcaucauucuuaagagggaaaaguaugggaauccagucugguguccagguggaugcuaacugcgaaggcgacuguuaccauuccgggggaacuaucauuagcaaucugccguuucagaacauagauucgaggguggucggcaagugcccccgguauguuaagcaaaaaucucuuuugcuggccacagguaugaagaaugugccugagaucccaaaagggcguggccuauucggagcgauugccggcuucaucgaaaacgggugggagggacucauagacgguugguacggcuuucgccaccagaaugcacagggggaaggaaccgcugccgauuacaaguccacucaaucagcuauuaaccagaugacaggcaaacugaauagacuuaucgagaagaccaaccagcaguucgagcugaucgacaaugaauuuacggagguagaaaaacaaauugguaacgugaucaauuggaccagggacaguauuacagaggucuggagcuauaacgccgaauugcucguggcaauggagaaucagcacacuauagaucuggccgacuccgagaugaacaaguuauacgaacggguuaagcgacagcugcgcgagaaugcugaagaggaugggaccggcuguuucgaaaucuuucauaaaugcgacgaugacuguauggcgucuauuagaaacaacacauaugaucacagcaaguacaggaaagaggcaaugcagaaucggauccaaaucgaccccgugaagcucucaaguggauauaaagaugucauucuuugguucuccuuuggcgccagcugcuucauacuguuggcuaucgccauggggcuaguguuuauuugcguaaagaacggaaauaugcgcuguacuaucugcauuuga

SEQ ID NO: 138310 - RNA, 1683 nt, Artificial Sequence; identical to SEQ ID NO: 138285
  derived and/or modified CDS sequence (opt3) from hemagglutinin__InfluenzaA__AGQ81055

SEQ ID NO: 138311 - RNA, 1683 nt, Artificial Sequence; identical to SEQ ID NO: 138285
  derived and/or modified CDS sequence (opt3) from hemagglutinin__InfluenzaA__AGQ81056

SEQ ID NO: 138312 - RNA, 1683 nt, Artificial Sequence; identical to SEQ ID NO: 138285
  derived and/or modified CDS sequence (opt3) from hemagglutinin__InfluenzaA__AGQ81057

SEQ ID NO: 138313 - RNA, 1683 nt, Artificial Sequence; identical to SEQ ID NO: 138285
  derived and/or modified CDS sequence (opt3) from hemagglutinin__InfluenzaA__AGQ81058

SEQ ID NO: 138314 - RNA, 1683 nt, Artificial Sequence; identical to SEQ ID NO: 138036
  derived and/or modified CDS sequence (opt3) from hemagglutinin__InfluenzaA__AGQ81059

SEQ ID NO: 138315 - RNA, 1683 nt, Artificial Sequence; identical to SEQ ID NO: 138036
  derived and/or modified CDS sequence (opt3) from hemagglutinin__InfluenzaA__AGQ81060

SEQ ID NO: 138316 - RNA, 1683 nt, Artificial Sequence; identical to SEQ ID NO: 138036
  derived and/or modified CDS sequence (opt3) from hemagglutinin__InfluenzaA__AGQ81061

SEQ ID NO: 138317 - RNA, 1683 nt, Artificial Sequence
  derived and/or modified CDS sequence (opt3) from hemagglutinin__InfluenzaA__AGQ81081
auggagguggucagccugaucaccauucuccuuguuauaacaggcuccaacgccgacaagaucugcauuggguaccagucuacuaauucaacggaaaccguggauacacugacugagaacaauguacccgugacccacgcuaaagaauuguuacauacagagcacaacggaaugcugugugcaaccaaucuagguagaccucucauccuggacacuugcacaauugaaggccuuaucuaugggaacccaaguugugauauacuguugggaggcagggaguggagcuacaucgucgagcggccguccgccgugaauggucucugcuaucccgggaacguugaaaaucuggaggaacugcgcucucucuucucgucagcgagcaguuaccaacguauucagaucuuuccugacaccauuuggaacguguccuauucuggaacgagcaaggcuuguuccgauucauucuaccgaaguaugagaugguuaacucagaaaaauaacgccuauccaguccaggacgcacaauacaccaauaacaggggccggaauauccuguuuauguggggcauaaaccaucccccuacagauacugcccagaccaaccuuuacacacgcaccgacacgacuacaagcguggcuaccgaggauauuaauagaacuuucaagccauugaucgggcccaggccucugguaaacggacuacagggucggauugacuauuacugggcaguucuccgcccaggccagacacugcgaaucagaucuaaugggaaccuuaucgccccgugguauggacacauucuguccggcgagucacaugguaggauauugaaaaccgaucucaauagcgggaacugcgugguccaaugucagacggaacggggaggccugaauaccacauuacccuuucacaacgugaguaaguacgcuuucggcaauugcccuaaguaugugggggucaaaucucugaagcucgccguuggacuucguaacgugccagcgcgcuccagcagaggucuguuuggcgcaaucgccggguucauugagggaggcuggucggguuugguagcugggugguacggcuuucagcacucuaaugaccagggaacuggcauggccgcagauagggacuccacccaaaaagcuaucgacaagauaacaucaaaagugaacaauauugucgauaagaugaacaagcaguaugaaaucaucgaccaugaguucagugaaauugagacucggcuaaauaugaucaacaacaaaauugaugaccagauacaagauaucugggccuacaaugcggagcugcucgugcugcuugaaaaccagaagacccuggacgagcacgaugccaauguuaacaauuuguacaacaaagugaagcgagcacucgggagcaaugcugucgaagacggaaaagguuguuuugagcuguaucauaagugcgauaaccaguguauggaaacaauucgcaauggcaccuacaacagaaggaaauauaaggaggagucccgguuagaacgccagaagaucgagggggugaaacuggaaucugagggaacuuacaagauccuaacgauuuauagcacaguagccucaagucucguuauagcuaugggcuucgccgcauuucuguucugggccauguccaaugguagcugcagaugcaacaucuguauuuga

SEQ ID NO: 138318 - RNA, 1683 nt, Artificial Sequence
  derived and/or modified CDS sequence (opt3) from hemagglutinin__InfluenzaA__AGQ81086
auggagguggucagccugaucaccauucuccuuguuauaacaggcuccaacgccgacaagaucugcauuggguaccagucuacuaauucaacggaaaccguggauacacugacugagaacaauguacccgugacccacgcuaaagaauuguuacauacagagcacaacggaaugcugugugcaaccaaucuagguagaccucucauccuggacacuugcacaauugaaggccuuaucuaugggaacccaaguugugaucuguugcucggaggcagggaguggagcuacauagucgagcggccguccgccgugaauggucugugcuaucccgggaacguugaaaaucuggaggaacuccgcucuuuauucucgucagcgagcaguuaccaacgaauccagauuuuuccugacaccaucuggaacguguccuauucuggaacgagcaaggcuuguuccgauucauucuaccguaguaugagauggcugacucagaaaaauaacgccuauccaguccaggacgcacaauacaccaauaacaggggccggaauauucuuuuuauguggggcaucaaccaucccccuacagauacugcccagaccaacuuguacacacgcaccgacacgacuacaagcguggcuaccgaggauauaaauagaacuuucaagccacugauugggcccaggccucuaguaaacggacuccagggucggaucgacuauuacugggcaguucugcgcccaggccagacacuucgaauuagaucuaaugggaaccugaucgccccgugguauggacacaucuuguccggcgagucacaugguaggauucucaaaaccgaucugaauagcgggaacugcgugguccaaugucagacggaacggggaggcuuaaauaccacacugcccuuucacaacgugaguaaguacgcuuucggcaauugcccuaaguaugugggggucaaaucucucaaacuugccguuggacugcguaacgugccagcgcgcuccagcagagguuuguuuggcgcaauagccggguucaucgagggaggcuggucgggucuaguagcugggugguacggcuuucagcacucuaaugaccagggaacuggcauggccgcagauagggacuccacccaaaaggcuauugacaagaucacaucaaaagugaacaauauagucgauaagaugaacaagcaguaugaaauuaucgaccaugaguucagugaaaucgagacucggcugaauaugauuaacaacaaaaucgaugaccagauucaagauauaugggccuacaaugcggagcuccuggugcuucuggaaaaccagaagaccuuggacgagcacgaugccaauguuaacaaucucuacaacaaagugaagcgagcacuggggagcaaugcugucgaagacggaaaagguuguuuugaguuauaucauaagugcgauaaccaguguauggaaacaauccgcaauggcaccuacaacagaaggaaauauaaggaggagucccggcuggaacgccagaagauugagggggugaaacuagaaucugagggaacuuacaagauccucacgaucuauagcacaguagccucaagucugguuauugcuaugggcuucgccgcauuucuuuucugggccauguccaaugguagcugcagaugcaacauauguaucuga

SEQ ID NO: 138319 - RNA, 1683 nt, Artificial Sequence
  derived and/or modified CDS sequence (opt3) from hemagglutinin__InfluenzaA__AGQ81087
auggagaccgugagccugaucacaaugcuccuugucgccacuguuauuaacgcugacaagauaugcaucggcuaccaguccaccaauucuacggaaacaguggauacucugaccgagaacaauguacccgugacacacgcaaaagaauuguuacauaccgagcacaacgggaugcugugugccacuaaucuaggacauccucucauucuggacacaugcaccaucgaaggucuuauuuauggcaacccaucaugugaucuguugcucgggggaagagaguggaguuacaucgucgagaggccgagcgcggugaauggccugugcuaucccgguaacguugaaaaucuggaggaacuccgguccuuauucucuucggcuucaagcuaccaacgcauacagaucuuuccugacacgauuuggaacgugaguuauuccgggacuucuaaggccuguagcgauuccuucuaccgaucaaugcguuggcugacccagaaaaauaacgcauauccaauccaggacgcccaauacacaaauaacagagagaagaauauucuuuuuauguggggaaucaaccaucccccuacugauaccgcucagacaaacuuguacaccaggacggacacuacaaccagugucgcaacugaggaaauaaaucggacauucaaaccacugauuggcccccgcccucuagugaacggccuccaggggagaaucgauuauuacuggagcguacugaagccaggacagacccuuaggauucggucuaaugguaaccugaucgccccgugguauggccacaucuuguccggggagucacacggacgcguucucaagacggaccugaaacgaggcagcugcaccgugcaaugucagacagaaaaggguggguuaaauacuacccugcccuuucagaacgucaguaaauacgcuuucggaaauugcucuaaguaugugggcgugaaaucccucaagcuagccgucggccugagaaacguuccuagcaggucgucucggggguuguuuggagcgauugcagguuucauagagggcgggugguccggacuuguggccggcugguacgguuuucagcacucaaaugaucaagggguaggcauggcugccgaccgugauaguacacagaaggcaaucgacaaaaugacuagcaaggugaacaauauugucgacaaaaugaacaagcaguaugaaaucauaaaucaugaguucuccgagauugaaacccgccugaacaugaucaauaacaaaaucgaugaccaaauucaggauaucugggcuuacaacgccgagcuccuggugcuucuggaaaaucagaagacauuggacgagcacgaugcgaacguuaauaaccucuacaauaaagugaagagagcccugggaucuaacgcagucgaagacggcaagggguguuuugaguuauaucauaaaugcgaugaccaguguauggagaccauuaggaauggaacuuacaaccggcgacgcuaucaagaagagagcaagcuggaaagacagaaaauagagggugugaagcuagaaucagagggcacguacaaaauccucacaauuuauaguaccguagcuuccagccugguuaucgccaugggguucgcugccuuucuuuucugggcaaugucuaauggaucauguaggugcaacaucugcauuuga

SEQ ID NO: 138320 - RNA, 1683 nt, Artificial Sequence
  derived and/or modified CDS sequence (opt3) from hemagglutinin__InfluenzaA__AGQ81092
auggagguggucagccugaucaccauucuccuuguuauaacaggcuccaacgccgacaagaucugcauuggguaccagucuacuaauucaacggaaaccguggauacacugacugagaacaauguacccgugacccacgcuaaagaauuguuacauacagagcacaacggaaugcugugugcaaccaaucuagguagaccucucauccuggacacuugcacaauugaaggccuuaucuaugggaacccaaguugugaucuguugcucggaggcagggaguggagcuacauagucgagcggccguccgccgugaauggucugugcuaucccgggaacguugaaaaucuggaggaacuccgcucuuuauucucgucagcgagcaguuaccaacgaauccagauuuuuccugacaccaucuggaacguguccuauacgggaacuucuaaggcuuguagcgauuccuucuaccguucaaugagauggcugacccagaaaaauaacgccuauccaguccaggacgcacaauacacaaauaacaggggccggaauauucuuuuuauguggggcaucaaccaucccccuacugauaccacacagaccaacuuguacacgcgcacugacacaaccacuucuguggccacagaggauauaaauagaaccuucaagccacugauugggcccaggccucuaguaaacggacuccagggucggaucgacuauuacugggcuguucugcgcccaggccagacgcuucgaauuagaagcaaugggaaccugaucgcaccgugguauggacacaucuugucuggcgagucccaugguaggauucucaaaaccgaucugaagucagggaauugcgugguccaaugucagacagaacggggaggcuuaaacacuacccugcccuuucacaaugugagcaaguacgccuucggcaacugcccuaaauaugugggggucaagagucucaaacuugcuguuggacugcguaaugugccagcccgcaguuccagagguuuguuuggcgcgauagcaggguucaucgagggaggcuggagcggucuaguagccgggugguacggcuuucagcacucgaacgaccagggaacaggcauggcugccgauagggacucuacucaaaaggcaauugacaaaaucaccuccaaggugaauaacauagucgauaagaugaauaaacaguaugaaauuaucgaccaugaguucucagaaaucgagacacggcugaacaugauuaauaacaagaucgaugaccagauucaagauauaugggcuuacaacgccgagcuccuggugcuucuggaaaaucagaaaaccuuggacgagcacgaugcgaacguuaauaaccucuacaauaaggugaaacgagcccuggggaguaacgcagucgaagacggaaaggguuguuuugaguuauaucauaaaugcgauaaucaguguauggaaacuauccgcaacggcacguacaauagaaggaaguauaaggaggagagccggcuggaacgccagaaaauugagggggugaagcuagaauccgagggaacauacaaaauccucaccaucuauucuacuguagcuagcucacugguuauugccaugggcuucgcugccuuucuuuucugggcaaugaguaacgguuccugcagaugcaauauauguaucuga

SEQ ID NO: 138321 - RNA, 1683 nt, Artificial Sequence
  derived and/or modified CDS sequence (opt3) from hemagglutinin__InfluenzaA__AGQ81095
auggagguggucagccugaucaccauucuccuuguuauaacaguguccaacgccgacaagaucugcauuggcuaccagucuacuaauucaacggaaaccguaaacacacugacugaggauaaugugcccgucacccacgcuaaagaauuguuacauacagagcacaacgggaugcugugugcaaccaaucuaggaagaccucucauccuggacacuugcacaauugaaggucuuaucuauggcaacccaaguugugaucuguugcucgggggaagggaguggagcuacauaguggagcggccguccgccguuaauggccugugcuaucccgguaacguggaaaaucuggaggaacuccgcucuuuauucucgucagcgagcaguuaccaacgaauccagauuuuuccugacaccaucuggaacgucuccuauucugggacgagcaaggcuuguuccgauucauucuaccguaguaugagauggcugacucagaaaaauaacgccuauccagugcaggacgcacaauacaccaauaacaggggacggaauauucuuuuuauguggggcaucaaccaucccccuacagauacugcccagaccaacuuguacacacgcaccgacacgacuacaagcguagcuaccgaggauauaaauagaacuuucaagccacugauuggccccaggccucuaguuaacgggcuccagggacggaucgacuauuacugggcagugcugaaaccaggucagacacuucgcauucgaucuaauggcaaccugaucgccccgugguaugggcacaucuuguccggagagucacauggcaggauucucaagaccgaucugaauagcgguaacugcgucgugcaaugucagagugaaagagggggauuaaauacgacccugcccuuucacaacgugucuaaguacgcuuucggcaauugcccuaaauaugucggcguuaagucccucaaacuugccguggggcugcggaacguaccagcgcguagcucgcgcggauuguuuggugcaauagccggcuucaucgaagggggauggucuggccuaguggcugguugguacggguuucagcacuccaaugaccagggcacaggaauggccgcagauagagacucaacucaaaaggcuauugacaaaaucaccaguaaggucaacaauauaguggauaagaugaacaaacaguaugagauuaucgaccaugaguucagcgaaaucgagacaaggcugaauaugauuaacaacaagaucgaugaccagauucaagauauaugggccuacaaugcggagcuccugguucuucuggaaaaccagaaaacuuuggacgagcacgaugccaaugugaacaaucucuacaacaaggucaaacgggcacugggcuccaaugcuguggaagacgggaagggauguuuugaguuauaucauaaaugcgauaaccaguguauggaaaccauccgaaaugguacauacgaccgcagaaaguauaaggaggagucuaggcuggaacggcagaaaauugagggcguaaagcuagaaagcgaggggaccuacaaaauccucacuaucuauucaacgguugccaguucccuggugauugcuaugggauucgccgcauuucuuuucugggccaugagcaacggcucuugccgcagaaauauaugcaucuga

SEQ ID NO: 138322 - RNA, 1683 nt, Artificial Sequence
  derived and/or modified CDS sequence (opt3) from hemagglutinin__InfluenzaA__AGQ81099
auggagaccgugagccugaucacaauucuccuuauagucacuguuuccaacgccgacaagaucugcauuggcuaccagucuacuaauucaaccgaaacaguggauacucugaccgagaacaauguacccgugacacacgcuaaagaauuguuacauaccgagcacaacgggaugcugugugcaacuaaucuaggacauccucucauccuggacacaugcaccauugaaggucuuaucuauggcaacccaaguugugaucuguugcucgggggaagagaguggagcuacauagucgagaggccguccgccgugaauggccugugcuaucccgguaacguugaaaaucuggaggaacuccggucuuuauucucgucagcgaacagcuaccaacgcauccagauuuuuccugacacgaucuggaaugugaguuauuccgggacuucuaaggcuuguagcgauuccuucuaccgaucaaugcguuggcugacccagaaaaacaaugccuauccaacacaggacgcacaauacacuaacaauagagagaagaacauucuuuuuauguggggaaucaaccaucccccuaccgauacagcccagaccaauuuguacacgaggacugacacaaccacgagugucgcuacagaggaaauaaaccggaccuucaaaccacugauuggcccccgcccucuagugaauggccuccaggggagaaucgauuauuacuggagcguacugaagccaggacagacgcuuaggauucggucuaacgguaaucugaucgcaccgugguauggccacaucuuguccggggagucacacggacgcauucucaagaccgaccugaaacgaggcagcugcacaguucaaugucagacugaaaaggguggguuaaacaccacacugcccuuucagaaugugaguaaauacgccuucggaaacugcucuaaguaugucggcgugaaaucccucaagcuagcugugggccugagaaaugucccuagcaggucgucucggggguuguuuggagccauagcggguuucaucgagggcgggugguccggacuuguugcaggcugguacgguuuucagcacucaaacgaucaaggggugggcauggccgcugaccgugauaguacucagaaggccauugacaaaguaaccagcaaggugaauaacaucgucgacaaaaugaauaagcaguaugaaauaauugaucaugaguucuccgagguggaaacacgccugaacaugaucaauaacaaaaucgacgaucaaauucaggacaucugggcauacaacgcugagcuccugguucuucuggaaaaucagaagaccuuggaugagcacgacgccaacgugaauaaccucuacaauaaagucaagagagcgcugggaucuaacgccguggaagauggcaagggguguuuugaguuauaucauaaaugcgacgaucaguguauggagacuauuaggaauggaacguacaaccggcgaaaguaucaagaagagagcaaacuggaacgccagaagauagaggguguaaaacuagaaucagagggcacauacaagauccucaccauuuauaguacuguugcauccagccuggugaucgcuaugggguucgccgcuuuucuuuucugggccaugucuaauggaucaugcagaaggaacaucugcauuuga

SEQ ID NO: 138323 - RNA, 1683 nt, Artificial Sequence
  derived and/or modified CDS sequence (opt3) from hemagglutinin__InfluenzaA__AGQ81100
auggagaccgugagccugaucacaaugcuccuugucgccacuguuauuaacgcugacaagauaugcaucggcuaccaguccaccaauucuacggaaacaguggauacucugaccgagaacaauguacccgugacacacgcaaaagaauuguuacauaccgagcacaacgggaugcugugugccacuaaucuaggacauccucucauucuggacacaugcaccaucgaaggucuuauuuauggcaacccaucaugugaucuguugcucgggggaagagaguggaguuacaucgucgagaggccgagcgcggugaauggccugugcuaucccgguaacguugaaaaucuggaggaacuccgguccuuauucucuucggcuucaagcuaccaacgcauacagaucuuuccugacacgauuuggaacgugaguuauuccgggacuucuaaggccuguagcgauuccuucuaccgaucaaugcguuggcugacccagaaaaauaacgcauauccaauccaggacgcccaauacacaaauaacagagagaagaauauucuuuuuauguggggaaucaaccaucccccuacugauaccgcucagacaaacuuguacaccaggacggacacuacaaccagugucgcaacugaggaaauaaaucggacauucaaaccacugauuggcccccgcccucuagugaacggccuccaggggagaaucgauuauuacuggagcguacugaagccaggacagacccuuaggauucggucuaaugguaaccugaucgccccgugguauggccacaucuuguccggggagucacacggacgcauucucaagacggaccugaaacgaggcagcugcaccguucaaugucagacagaaaaggguggguuaaauacuacccugcccuuucagaacgugaguaaauacgcuuucggaaauugcucuaaguaugucggcgugaaaucccucaagcuagccgugggccugagaaacgucccuagcaggucgucucggggguuguuuggagcgauagcagguuucaucgagggcgggugguccggacuuguugccggcugguacgguuuucagcacucaaaugaucaaggggugggcauggcugccgaccgugauaguacacagaaggcaauugacaaaaucacuagcaagguaaacaauauaguggacaaaaugaacaagcaguaugaaauuaucgaucaugaguucuccgaggucgaaacccgccugaauaugaucaacaauaaaauugacgaucaaauccaggacauuugggcuuacaacgccgagcuccuggugcuucuggaaaaccagaagacauuggaugagcacgacgcgaauguuaacaaucucuacaacaaagugaagagagcccugggaucuaaugcagucgaagauggcaagggguguuuugaguuauaucauaaaugcgacgaucaguguauggagaccauaaggaacggaacuuacaaucggcgacgcuaucaagaagagagcaagcuggaaagacagaaaaucgagggugugaagcuagaaucagagggcacguacaaaauucucacaaucuauaguaccguagcuuccagccugguuaucgccaugggguucgcugccuuucuuuucugggcaaugucuaacggaucaugcaggcggaauauuugcauauga

SEQ ID NO: 138324 - RNA, 1683 nt, Artificial Sequence
  derived and/or modified CDS sequence (opt3) from hemagglutinin__InfluenzaA__AGQ81123
auggagguggucagccugaucaccauucuccuuguuauaacaguguccaacgccgacaagaucugcauuggcuaccagucuacuaauucaacggaaaccguaaacacacugacugaggauaaugugcccgucacccacgcuaaagaauuguuacauacagagcacaacgggaugcugugugcaaccaaucuaggaagaccucucauccuggacacuugcacaauugaaggucuuaucuauggcaacccaaguugugaucuguugcucgggggaagggaguggagcuacauaguggagcggccguccgccguuaauggccugugcuaucccgguaacguggaaaaucuggaggaacuccgcucuuuauucucgucagcgagcaguuaccaacgaauccagauuuuuccugacaccaucuggaacgucuccuauucugggacgagcaaggcuuguuccgauucauucuaccguaguaugagauggcugacucagaaaaauaacgccuauccagugcaggacgcacaauacaccaauaacaagggaaggaauauucuuuuuauguggggcaucaaccaucccccuacagauacugcccagaccaacuuguacacacggaccgacacgacuacaagcguagcuaccgaggauauaaaucgcacuuucaaaccacugauuggccccagaccucuaguuaacgggcuccagggaaggaucgacuauuacugggcagugcugaagccaggucagacacuucggauucgcucuaauggcaaccugaucgccccgugguaugggcacaucuugcucggagagucccauggccgaauacugaagaccgauuuaaauucaggugacugcgucgugcaaugucagagcgaaagagggggacugaacacgacccuccccuuucacaaugugaguaaauacgcuuucggcaacugcccuaaguaugucggcguuaaaucucuuaagcuggccgugggguugaggaauguaccagcgcgguccacacguggacuauuuggugcaauugccggcuucaucgaagggggauggagcggccugguggcugguugguacggguuucagcacucgaacgaucagggcacuggaauggccgcagaccgcgacucuacccaaaaagcuauugauaagaucacauccaaggucaauaacauaguggacaaaaugaauaagcaguaugagauuaucgaucaugaguucucagaaaucgagacuagacucaacaugauuaauaacaaaaucgacgaucagauucaagacauaugggccuacaacgcggagcugcuuguucuguuggaaaaucagaagacccucgaugagcacgacgccaacgugaauaaccuguacaauaaagucaagagggcauuaggcaguaacgcuguggaagaugggaaaggauguuuugagcuguaucauaagugcgacaaucaguguauggaaacaauccggaacgguaccuacgaucgacgcaaguauaaagaggagagcagacuagaaaggcagaagauugagggcguaaaacucgaauccgaggggacuuacaagauccugacgaucuauucuacaguugccagcucacuugugauugcuaugggauucgccgcauuuuuguucugggccaugaguaauggcuccugccggugcaacauauguaucuga

SEQ ID NO: 138325 - RNA, 1683 nt, Artificial Sequence
  derived and/or modified CDS sequence (opt3) from hemagglutinin__InfluenzaA__AGQ81124
auggagguggccacccugaucacaauucuccuugucauaacuggcagcaacgcugacaagaucugcauuggguaccaauccaccaauucuacggaaacaguugauacucugaccgagaacaaugugcccguaacacacgcaaaagaauuguuacauaccgagcacaacggaaugcugugugccacuaaucuagguagaccucucauccuggacacaugcaccauugaaggccuuaucuaugggaacccaucaugugaucugccguuggagggaagggaguggaguuacauaguggaacggcccagcgcggucaauggcgugugcuauccugguaacguugagaaucucgaagaacugcgcucccuguucucuucggcuucaagcuaccaacgaauccagauuuuuccagacaguaucuggaacguguccuauucugggacgagcaaggccuguuccgauucauucuaccguaauaugagauggcucacucagaaagacaacaauuaucccguccaggaugcacaauacaccaacaauaggggaaagaacauuuuauuuauguggggcaucaaccauccuccaacagacacugcccagaccaaucuguacacacggaccgauacgacuacaaguguggcuaccgaggacauaaaccgcacuuucaaaccccuuauuggcccuagaccauugguaaaugggcugcagggaaggaucgauuauuacugggcaguucuaaagccgggucagacacuccgggugcgcagcaacggcaaucugauugcccccugguaugggcacauccuucugggagaaucucauggccgaaucuugaagaccgaccucaaauccgguaacugcgucgugcaaugucagacggagagagggggacugaauaccacauuaccuuuucacaacgugucaaaguacgcuuucggcaauugcccaaaauauauuggcgucaagagccugaaacucgccguugggcuuaggaacgugcccgcgcggaguucucguggacuguuuggugcaauagccggcuucaucgaagggggaugguccggcuugguagcugguugguacggguuucagcacagcaaugaucagggcacuggaauggccgcagaccgcgacucgacccaaaaggcuauugauaagaucacaucuaaagugaacaauauagucgacaagaugaacaaacaguaugagauuaucgaucaugaguucuccgagaucgagacuagacuaaauaugauuaacgacaagaucgaugaccagauucaagauauaugggccuacaacgcggaacugcucgugcugcuugagaaucagaaaacccuggacgaacacgaugccaacguuaauaacuuguacaauaaggugaaaagggcacucggcucaaacgcugucgaggacgggaagggauguuuugaucuguaucauaagugcgacaaucaguguauggaaacaauccggaacgguaccuacaaucgacgcaaauaucagaaggagaguagauuagagaggcagaaaauugaaggcgugaagcuggagagcgaagggacuuacaaaauccuaacgaucuauuccacaguagccucuagccucguuauugcuaugggauucgccgcauuucuguucugggccaugucaaacggcaguugccggugcaauauauguaucuga

SEQ ID NO: 138326 - RNA, 1683 nt, Artificial Sequence
  derived and/or modified CDS sequence (opt3) from hemagglutinin__InfluenzaA__AGQ81125
auggagguggccacccugaucacaauucuccuugucauaacuggcagcaacgcugacaagaucugcauuggguaccaguccaccaauucuacggaaacaguugauacucugaccgagaacaaugugcccguaacacacgcaaaagaauuguuacauaccgagcacaacggaaugcugugugccacuaaucuagguagaccucucauccuggacacaugcaccauugaaggccuuaucuaugggaacccaucaugugaucugccguuggagggaagggaguggaguuacauaguggaacggcccagcgcggucaauggcgugugcuauccugguaacguugagaaucucgaggagcugcgcucccuguucucuucggcuucaagcuaccaacgaauccagauuuuuccagacaguaucuggaacguguccuauucugggacgagcaaggccuguuccgauucauucuaccguaguaugagauggcucacucagaaagacaauaacuaucccguccaggaugcacaauacaccaauaacaggggaaagaauauuuuauuuauguggggcaucaaccauccuccaacagacacugcccagaccaaccuguacacacggaccgauacgacuacaagcguggcuaccgaggacauaaaucgcacuuucaaaccccuuauuggcccuagaccauugguaaacgggcugcagggaaggaucgauuauuacugggcaguucuaaagccgggucagacacuccgggugcgcucuaauggcaaccugauugcccccugguaugggcacauccuucugggagucucccauggccgaaucuugaagaccgaccucaaaucagguaauugcguggugcaaugucagacggaaagagggggacugaacaccacauuaccuuuucacaaugucagcaaguacgcuuucggcaacugcccaaaauauauuggcguuaagagucugaaacucgccguggggcuuaggaauguacccgcgcggucuucccguggacuguuuggugcaauagccggcuucaucgaagggggauggagcggcuugguggcugguugguacggguuucagcacucgaacgaucagggcacuggaauggccgcagaccgcgacucuacccaaaaggcuauugauaagaucacauccaaagucaauaacauaguggacaagaugaauaaacaguaugaaauuaucgaucaugaguucucagaaaucgagacuagacuaaacaugauuaaugacaagaucgaugaccagauucaagauauaugggccuacaacgcggagcugcucguucugcuugaaaaccagaaaacccuggacgagcacgaugccaaugugaacaauuuguacaacaaggucaaaagggcacucggcaguaaugcuguggaagacgggaagggauguuuugaucuguaucauaagugcgacaaccaguguauggagacaauccggaaugguaccuacaaccgacgcaaauaucaggaagagagcagauuagagaggcaaaagauugaaggcguaaaacuggaguccgaagggacuuacaagauccuaacgaucuauucuacaguugccagcucacucgugauugcuaugggauucgccgcauuucuguucugggccaugaguaauggcuccugccggugcaacauauguaucuga

SEQ ID NO: 138327 - RNA, 1683 nt, Artificial Sequence
  derived and/or modified CDS sequence (opt3) from hemagglutinin__InfluenzaA__AGQ81126
auggagaccaucagccugaugacaauucuccuuauaacuacggccuccaacgcugacaagaucugcauuggccaccagucuaccaauucaacagaaacuguggauacccugacagagaccaacguccccguuacucaugcaaaagaauuguuacaaacagagcacaaugggaugcugugugccaccaaccuaggacauccucucauccuggacacgugcacuauugaaggucuuaucuacggcaauccaaguugugaucuguugcucgaggggagagaguggagcuauauaguggaaaggccguccgcgguaaacggaaccugcuaccccggcaauguggagaaccuggaagaacugcggacacucuucucuucggcuucaagcuaucagcgcauccagauuuuuccugacacuaucuggaaugucaccuacacagguaccagucgauccuguucugggagcuucuaucguuccaugagaugguuaacgcagaagucaggauuuuacccagugcaagaugccaaauauacuaacaauaggggcaagaacauucuguucguuuggggcauccaccauccccacacauacaccgaccagacuacacuuuacauacggaaugauaccacgaccagugugacaacugaggaauugaaccgcauuuuuaaaccugucaucgugccaagacugcuaguaaaugggcagcagggaaggauugacuauuacuggagcguucucaagcccggucaaacccugcgggugcgcucuaacggcaaccuuaucgcaccuugguaugggcacguccuguccggaggcucacauggucgaaucuugaagacagaucucaaagggggaaauugcguggugcagugucagacugagaagggcggcuucaacagcacccugccauuucacaauauuaguaaauacgccuucgggacaugcccgaaguaugucaaaguuaacucuuuaaagcuggcuauaggacucagaaaugugcccgcaagguccaaccggggucuuuuuggcgccaucgcuggguucauugaaggaggcuggccuggucugguagccgggugguacggcuuucagcauagcaaugaccaaggagugggcauggcggcagaucgugacucgacccagaaggccgucgauaaaaucacuucuaaggugaacaauauaguugacaaaaugaacaagcaguaugagauuaucgaccacgaguucuccgagguggagacgcgcuugaauaugaucaacaauaaaauugaugaccaaauccaggauauuugggcuuacaacgccgaacuacugguccuccuggagaaucagaagacacuugacgaacacgaugcaaacgugaacaaucuguacaacaaaguaaagagagcuuuggggucaaaugccauggaggacggaaaggguuguuuugaacucuaucauaaaugcgaugaccaguguauggagaccauaaggaacggcacuuacaaucggcgaaaguaucgcgaggaaaguagacuggagcaacagaggaucgaagggguuaaauuagagagcgaaggaaccuacaagauucugacaaucuauuccaccguggcgucuagccuaguccucgccaugggcuucgcagcuuuccuguuuugggccaugucaaacgguaguugccggugcaauaucuguauuuga

SEQ ID NO: 138328 - RNA, 1683 nt, Artificial Sequence
  derived and/or modified CDS sequence (opt3) from hemagglutinin__InfluenzaA__AGQ81127
auggagguggccacccugaucacaauucuccuucugauaacuggcagcaacgcugacaagaucugcauuggguaccaguccaccaauucuacggaaacagucgauacuuugaccgagaacaauguucccgugacacacgcaaaagaauuacugcauaccgagcacaacggaaugcuaugugccacuaaucucgguagaccucugauccuugacacaugcaccauugaaggccugaucuaugggaacccaucaugugauuugccgcucgagggaagggaguggaguuacauaguagaacggcccagcgcggugaauggcgucugcuauccugguaacguggagaaucuggaagaacugcgcucccucuucucuucggcuucaagcuaccaacgaauccagauuuuuccagacaguaucuggaacguuuccuauucugggacgagcaaggccuguuccgauucauucuaccguaguaugagaugguuaacucagaaaaauaacaauuaucccgugcaggacgcacaauacaccaacaauaggggaaagaacauucuguuuauguggggcaucaaccauccuccaacagauacugcccagaccaaucuuuacacacggaccgacacgacuacaagcgucgcuaccgaggauauaaaccgcacuuucaaacccuugauuggcccuagaccacuggugaaugggcuacagggaaggaucgacuauuacugggcaguacucaagccgggucagacacugcggguucgcucuaacggcaaucuuauugcccccugguaugggcacauccuguugggagaaucccauggccgaauccucaagaccgaucugaaaucagguaacugcgugguccaaugucagacggagagagggggauuaaauaccacacugccuuuucacaacgugagcaaguacgcuuucggcaauugcccaaaauauauuggcgugaagagucucaaacuugccgucgggcugaggaacguucccgcgcggucuucccguggauuguuuggugcaauagccggcuucaucgaagggggauggagcggccuaguggcugguugguacggguuucagcacucgaaugaccagggcacuggaauggccgcagaucgcgacucuacccaaaaggcuauugacaagaucacauccaaaguaaacaauauaguggauaagaugaacaaacaguaugagauuaucgaccaugaguucucagagaucgagacuagacugaauaugauuaacgauaagaucgacgaucagauucaagacauaugggccuacaacgcggaacuccugguccuucuggagaaucagaaaaccuuggaugaacacgacgccaacgugaauaaccucuacaauaagguuaaaagggcacugggcaguaacgcuguggaggaugggaagggauguuuugacuuauaucauaagugcgauaaucaguguauggaaacaauccggaacgguaccuacaaucgacgcaaauaucaggaggagagcagacuggaaaggcaaaagauugagggcgucaaacuagaauccgaggggacuuacaagauccucacgaucuauucuacaguggccagcucacugguaauugcuaugggauucgccgcauuucuuuucugggccaugaguaacggcuccugccggugcaauauauguaucuga

SEQ ID NO: 138329 - RNA, 1683 nt, Artificial Sequence
  derived and/or modified CDS sequence (opt3) from hemagglutinin__InfluenzaA__AGQ81128
auggaggccgcuaccaucauuacaauacugcucgugaucacuggcagcaacgcagacaagauuugcaucggguaccaguccaccaauucuacggaaacagucgauacucuuaccgagaacaauguucccgugacacacgccaaagaacuguugcauaccgagcacaacggaauguuaugugcgacuaaucuggguagaccucuaauucucgacacaugcaccaucgaaggccugauauaugggaacccaucaugugaucuuccgcuggagggaagggaguggaguuacaucguagaacggcccagcgcugugaauggcgucugcuauccugguaacguggagaauuuggaggaacuccgcucccuguucucuucggccucaagcuaccaacguauucagaucuuuccagacaguauuuggaacguuuccuauucugggacgagcaaggcauguuccgauucauucuaccgaaguaugagauggcugacucagaaaaauaacaauuaucccgugcaggacgcccaauacaccaacaauaggggaaagaacauccucuuuauguggggcauaaaccauccuccaacagauacugcucagaccaauuuauacacacggaccgacacgacuacaagcgucgcaaccgaggauauuaaccgcacuuucaaaccccugaucggcccuagaccacuugugaauggguugcagggaaggauugacuauuacugggccguacugaagccgggucagacacuacggguucgcucuaacggcaaucucaucgcucccugguaugggcacauccugcuuggagaaucccauggccgaauacugaagaccgauuugaaaucagguaacugcgugguccaaugucagacggagagagggggacucaauaccacacugccuuuucacaacgugagcaaguacgccuucggcaauugcccaaaauauauuggcgugaagaguuuaaaacuggcggucgggcucaggaacguucccgcacggucuucccguggacuuuuuggugccaucgcuggcuucauugaagggggauggagcggccugguggccgguugguacggguuucagcacucgaaugaccagggcacuggaauggcagcugaucgcgacucuacccaaaaggccaucgacaagauaacauccaaaguaaacaauauuguggauaagaugaacaaacaguaugacaucaucgaucaugaguucucagaaauugagacuagauugaauaugaucaacgacaagauugaugaccagauacaagauaucugggcguacaacgccgagcuacugguccuccuggaaaaucagaaaacccuugacgagcacgaugcaaacgugaauaaccuguacaauaagguuaaaagggcuuugggcaguaacgccguggaagacgggaagggauguuuugaucucuaucauaagugcgacaaucaguguauggagacaauucggaacgguaccuacaaucgacgcaaauaucaggaagagagcagacuggagaggcaaaagaucgaaggcgucaaauuagaguccgaagggacuuacaagauccugacgauuuauucuacaguggcuagcagucuaguaguugccaugggauucgcagccuuucucuucugggcuaugucaaacggcuccugccggugcaauauauguaucuga

SEQ ID NO: 138330 - RNA, 1683 nt, Artificial Sequence
  derived and/or modified CDS sequence (opt3) from hemagglutinin__InfluenzaA__AGQ81130
auggagaccgugagccugaucacaauucuccuugucguuacuauaggcaacgccgacaagaucugcauuggguaccaguccaccaauucuacggaaacaguggauacucugaccgagaacaauguacccgugacacacgcuaaagaauuguuacauaccgagcacaacggaaugcugugugcaacuucacuaggucauccucucauccuggacacaugcaccauugaaggccuuaucuaugggaauccaaguugugaucuguugcucggaggcagagaguggagcuacauagucgagaggccguccgccgugaacggucugugcuaucccgggaauguugaaaaccuggaggaacuccggucuuuauucucgucagcgcgcagcuaccaacgaauccagauuuuuccugacacgaucuggaaugugaguuauuccggaacuucuaaggcuuguagcgauuccuucuaccguucaaugagauggcugacccagaaaaacaaugccuauccaauucaggacgcacaauacacaaacaaucaggagaagaacauccuuuuuauguggggcauaaaucaucccccuacugauaccguccagacaaacuuguacaccaggacggacacuacaaccaguguggccacugaggaaauuaaccggacauucaaaccacugaucggcccccgcccucuaguaaaugggcuccagggaagaauugauuauuacuggagcguucugaagccaggucaaacccuuaggauccggucuaacggcaaucugaucgcuccgugguaugggcacauuuuguccggagagucacacggccgcauacucaagacggaccugaaacgagguagcugcaccgugcagugucagacagaaaaagggggauuaaacacuacccugcccuuucagaaugucaguaaguacgcauucggcaacugcucuaaguauaucggcaugaaaucccucaaacuugccguggggcugagaaaugugccuagcaggucgucucggggauuguuuggugcuauugccggcuucaucgaagggggaugguccggccuagucgcggguugguacggguuucaacacucaaacgaucagggcguuggaauggcagccgaccgugauaguacacagaaggcuauagacaagauuacuagcaaggugaauaacaucguagacaaaaugaauaagcaauaugagaucauugaucaugaguucuccgagguggaaacccgccugaacaugaucaauaacaaaauugacgaucagauacaggacaucugggccuacaaugcagagcuccugguccuucuggaaaaccagaagacauuggaugagcacgacgcuaacgugaauaaccucuacaauaaaguuaagagagcccugggcuuuaacgcgguggaagaugggaagggauguuucgaguuauaucauaaaugcgacgaucaauguauggagaccauuaggaaugguacuuacaaccggcgaaaguaucaggaagagucuaaacuggaacgccagaagaucgagggcgucaaacuagaaagcgaggggacguacaagauccucacaauuuauucaaccguggccaguucccugguaauagcaaugggauuugcugccuuccuuuucugggcuaugagcaauggcucuugcagaugcaacaucuguauuuga

SEQ ID NO: 138331 - RNA, 1683 nt, Artificial Sequence
  derived and/or modified CDS sequence (opt3) from hemagglutinin__InfluenzaA__AGQ81132
auggagaccaucagccugaugacaauucuccuuauaacuacggccuccaacgcugacaagaucugcauuggccaccagucuaccaauucaacagaaacuguggauacccugacagagaccaacguccccguuacucaugcaaaagaauuguuacaaacagagcacaaugggaugcugugugccaccaaccuaggacauccucucauccuggacacgugcacuauugaaggucuuaucuacggcaauccaaguugugaucuguugcucgaggggagagaguggagcuauauaguggaaaggccguccgcgguaaacggaaccugcuaccccggcaauguggagaaccuggaagaacugcggacacucuucucuucggcuucaagcuaucagcgcauccagauuuuuccugacacuaucuggaaugucaccuacacagguaccagucgauccuguucugggagcuucuaucguuccaugagaugguuaacgcagaagucaggauuuuacccagugcaagaugccaaauauacuaacaauaggggcaagaacauucuguucguuuggggcauccaccauccccacacauacaccgaccagacuacacuuuacauacggaaugauaccacgaccagugugacaacugaggaauugaaccgcauuuuuaaaccugucaucgugccaagacugcuaguaaaugggcagcagggaaggauugacuauuacuggagcguucucaagcccggucaaacccugcgggugcgcucuaacggcaaccuuaucgcaccuugguaugggcacguccuguccggaggcucacauggucgaaucuugaagacagaucucaaagggggaaauugcguggugcagugucagacugagaagggcggcuucaacagcacccugccauuucacaauauuaguaaauacgccuucgggacaugcccgaaguaugucaaaguuaacucuuuaaagcuggcuauaggacucagaaaugugcccgcaagguccaaccggggucuuuuuggcgccaucgcuggguucauugaaggaggcuggccuggucugguagccgggugguacggcuuucagcauagcaaugaccaaggagugggcauggcggcagaucgugacucgacccagaaggccgucgauaaaaucacuucuaaggugaacaauauaguugacaaaaugaaccgccaguaugagauuaucgaccacgaguucuccgagguggagacgagauugaauaugaucaacaauaagauugaugaccaaauccaggauauuugggcuuacaacgccgaacuacugguccuccuggagaaucagaaaacacuugacgaacacgaugcaaacgugaacaaucuguacaacaagguaaaaagggcuuuggggucaaaugccauggaggacggaaaggguuguuuugaacucuaucauaagugcgaugaccaguguauggagaccauacggaacggcacuuacaaucgacgcaaauauagagaggaaaguaggcuggagcaacagcggaucgaagggguuaaguuagagagcgaaggaaccuacaaaauucugacaaucuauuccaccguggcgucuagccuaguccucgccaugggcuucgcagcuuuccuguuuugggccaugucaaacgguaguugccgcugcaauaucuguauuuga

SEQ ID NO: 138332 - RNA, 1683 nt, Artificial Sequence
  derived and/or modified CDS sequence (opt3) from hemagglutinin__InfluenzaA__AGQ81133
auggagaccaucagccugaugacaauucuccuuauaacuacggccuccaacgcugacaagaucugcauuggccaccagucuaccaauucaacagaaacuguggauacccugacagagaccaacguccccguuacucaugcaaaagaauuguuacaaacagagcacaaugggaugcugugugccaccaaccuaggacauccucucauccuggacacgugcacuauugaaggucuuaucuacggcaauccaaguugugaucuguugcucgaggggagagaguggagcuauauaguggaaaggccguccgcgguaaacggaaccugcuaccccggcaauguggagaaccuggaagaacugcggacacucuucucuucggcuucaagcuaucagcgcauccagauuuuuccugacacuaucuggaaugucaccuacacagguaccagucgauccuguucugggagcuucuaucguuccaugagaugguuaacgcagaagucaggauuuuacccagugcaagaugccaaauauacuaacaauaggggcaagaacauucuguucguuuggggcauccaccauccccacacauacaccgaccagacuacacuuuacauacggaaugauaccacgaccagugugacaacugaggaauugaaccgcauuuuuaaaccugucaucgugccaagacugcuaguaaaugggcagcagggaaggauugacuauuacuggagcguucucaagcccggucaaacccugcgggugcgcucuaacggcaaccuuaucgcaccuugguaugggcacauccuguccggaggcucacauggucgaauuuugaagacagaucucaaaagcgggaauugcgucgugcagugucagacugagaagggaggcuucaacaguacccugccauuucacaauauaucuaaauacgccuucggcacaugcccgaaguaugugaaagucaacuccuuaaagcuggcuaucgggcucagaaauguucccgcaaggagcaaccggggacuuuuuggugccauugcuggcuucaucgaagggggauggccuggccugguggccgguugguacggguuucagcauucgaaugaccaaggcguaggaauggcggcagaucgugacucuacccagaaggccguggauaaaauaacuuccaaggucaacaauauuguggacaaaaugaacaagcaguaugagaucaucgaccacgaguucucagagguugagacgcgcuugaauaugauuaacaauaaaaucgaugaccaaauucaggauauaugggcuuacaacgccgaacuacuggugcuccuggagaaucagaagacacuugacgaacacgaugcaaacgucaacaaucuguacaacaaagugaagagagcuuugggcaguaaugccauggaggacgggaagggauguuuugaacucuaucauaaaugcgaugaccaguguauggagaccaucaggaacgguacuuacaaucggcgaaaguaucgcgaggaaagcagacuggagcaacagaggauugaaggcguaaaauuagaguccgaagggaccuacaagauccugacaaucuauucuaccguugcgagcagucuagugcucgccaugggauucgcagcuuuccuguuuugggccaugucaaacggcuccugccggugcaauauuuguauauga

SEQ ID NO: 138333 - RNA, 1683 nt, Artificial Sequence
  derived and/or modified CDS sequence (opt3) from hemagglutinin__InfluenzaA__AGQ81134
auggagaccaucagccugaugacaauucuccuuauaacuacggccuccaacgcugacaagaucugcauuggccaccagucuaccaauucaacagaaacuguggauacccugacagagaccaacguccccguuacucaugcaaaagaauuguuacaaacagagcacaaugggaugcugugugccaccaaccuaggacauccucucauccuggacacgugcacuauugaaggucuuaucuacggcaauccaaguugugaucuguugcucgaggggagagaguggagcuauauaguggaaaggccguccgcggcuaacggaaccugcuaccccggcaauguagagaacccugaagaacugcggacacuguucucuucggccucaagcuaucagcgcauccagauuuuuccagacacuaucuggaaugugaccuacacagguaccagucgauccuguucugggagcuucuaucguuccaugagauggcucacgcagaagucaggauuuuaccccguccaagaugcaaaauauacuaacaauaggggcaagaacauuuuauucguguggggcauccaccauccucacacauacaccgaccagacuacacuguacauacggaaugauaccacgaccaguguuacaacugaggaacuuaaccgcauuuuuaaaccagugaucguccccagauugcuggugaaugggcagcagggaaggauugacuauuacuggagcguacuaaagccuggucaaacccuccggguucgcucuaacggcaaccugaucgccccaugguaugggcacgugcuuuccggaggcucacauggucgaauccugaagacagauuugaaaagcgggaauugcgucgugcagugucagacugagaagggaggcuucaacaguacccucccguuucacaauauuucuaaauacgcuuucggcacaugccccaaguaugugaaagucaacucccugaaguuagcaauagggcugagaaauguuccugccaggagcaaccggggacucuuuggugcuaucgccggcuucauugaagggggauggccaggccuuguggcggguugguacggguuucagcauucgaaugaccaaggcguaggaauggcagccgaucgugacucuacccagaaggcuguggauaaaaucacuuccaaggucaacaauauaguggacaaaaugaacaagcaguaugagauuaucgaccacgaguucucagagguugagacgcgccugaauaugaucaacaauaaaauugaugaccaaauccaggauauuugggccuacaacgcagaauugcuagugcugcucgagaaucagaagacacuggacgaacacgaugcuaacgucaacaaucuuuacaacaaagugaagagagcccugggcaguaaugcgauggaggacgggaagggauguuuugaauuguaucauaaaugcgaugaccaguguauggagaccauaaggaacgguacuuacaaucggcgaaaguaucgcgaggaaagcagacucgagcaacagaggaucgaaggcguaaaacuggaguccgaagggaccuacaagauuuuaacaaucuauucuaccguugccagcucacuggugcuagcaaugggauucgcugccuuccucuuuugggcuaugaguaacggcuccugccggugcaauaucuguauuuga

SEQ ID NO: 138334 - RNA, 1683 nt, Artificial Sequence
  derived and/or modified CDS sequence (opt3) from hemagglutinin__InfluenzaA__AGQ81135
auggagguggccaccaucauuacaauacugcucgucaucacuggcagcaacgcugacaagauuugcaucggguaccaguccaccaauucuacggaaacaguugauacucuuaccgagaacaaugugcccguaacacacgcaaaagaacuguugcauaccgagcacaacggaauguuaugugccacuaaucuggguagaccucuaauucucgacacaugcaccaucgaaggccugauauaugggaacccaucaugugaucuuccgcuggagggaagggaguggaguuacaucguggaacggcccagcgcggucaauggcgugugcuauccugguaacguugagaauuuggaagaacuccgcucccuguucucuucggcuucaagcuaccaacguauucagaucuuuccagacaguauuuggaacguguccuauucugggacgagcaaggccuguuccgauucauucuaccgaaguaugagauggcugacucagaaaaauaacaauuaucccguccaggacgcacaauacaccaacaauaggggaaagaacauccucuuuauguggggcauaaaccauccuccaacagauaaugcccagacuaacuuauacacccggacagacaccacgacuagcguggcuacagaggauauuaaucgcaccuucaaaccccugaucggcccuagaccacuuguaaacggguugcagggaaggauugacuauuacugggcaguucugaagccgggucagacucuacgggugcgcucuaauggcaaccucaucgcccccugguaugggcacauccugcuuggagaaucccauggccgaauacugaagacagauuugaaaucagguaauugcgucgugcaaugucagaccgagagagggggacucaacacgacccugccuuuucacaaugugagcaaguacaguuucggcaacugcccaaaauauauuggcgucaagucuuuaaaacuggcuguugggcucaggaaugugcccgcccgguccagccguggacuuuuuggugcgaucgcaggcuucauugaagggggauggucgggccugguagccgguugguacggguuucagcacucuaacgaccagggcacaggaauggcugccgaucgcgacuccacucaaaaggcaaucgacaagauaaccucaaaagugaauaacauugucgauaagaugaauaaacaguaugagaucaucgaccaugaguucaacgagauugagacaagauugaacaugaucaauaacaagauugaugaccagauacaagauaucugggcuuacaaugccgaacuacuggugcuccuggagaaccagaaaacucuugacgaacacgaugcgaauguuaacaaucuguacaacaaggugaaaagggccuugggcaguaaugcagucgaggacgggaagggauguuuugaucucuaucauaagugcgacaaccaguguauggaaaccauucggaaugguacauacaaccgacgcaaauaucaggaggagagcagacuggaaaggcaaaagaucgagggcgugaaauuagaauccgaggggaccuacaagauccugacuauuuauucuacgguagcuagcagucuaguuauagccaugggauucgcugccuuucucuucugggcaaugucaaauggcuccugccggugcaacaucuguauuuga

SEQ ID NO: 138335 - RNA, 1683 nt, Artificial Sequence
  derived and/or modified CDS sequence (opt3) from hemagglutinin__InfluenzaA__AGQ81136
auggagaccaucagccugaugacaauucuccuuauaacuacggccuccaacgcugacaagaucugcauuggccaccagucuaccaauucaacagaaacuguggauacccugacagagaccaacguccccguuacucaugcaaaagaauuguuacaaacagagcacaaugggaugcugugugccaccaaccuaggacauccucucauccuggacacgugcacuauugaaggucuuaucuacggcaauccaaguugugaucuguugcucgaggggagagaguggagcuauauaguggaaaggccguccgcgguaaacggaaccugcuaccccggcaauguggagaaccuggaagaacugcggacacucuucucuucggcuucaagcuaucagcgcauccagauuuuuccugacacuaucuggaaugucaccuacacagguaccagucgauccuguucugggagcuucuaucguuccaugagaugguuaacgcagaagucaggauuuuacccagugcaagaugccaaauauacuaacaauaggggcaagaacauucuguucguuuggggcauccaccauccccacacauacaccgaccagacuacacuuuacauacggaaugauaccacgaccagugugacaacugaggaauugaaccgcauuuuuaaaccugucaucgugccaagacugcuaguaaaugggcagcagggaaggauugacuauuacuggagcguucucaagcccggucaaacccugcgggugcgcucuaacggcaaccuuaucgcaccuugguaugggcacguccuguccggaggcucacauggucgaaucuugaagacagaucucaaagggggaaauugcguggugcagugucagacugagaagggcggcuucaacagcacccugccauuucacaauauuaguaaauacgccuucgggacaugcccgaaguaugucaaaguuaacucuuuaaagcuggcuauaggacucagaaaugugcccgcaagguccaaccggggucuuuuuggcgccaucgcuggguucauugaaggaggcuggccuggucugguagccgggugguacggcuuucagcauagcaaugaccaaggagugggcauggcggcagaucgugacucgacccagaaggccgucgauaaaaucacuucuaaggugaacaauauaguugacaaaaugaaccgccaguaugagauuaucgaccacgaguucuccgagguggagacgagauugaauaugaucaacaauaagauugaugaccaaauccaggauauuuggacauacaacgcugaacuacugguccuccuggagaaucagaaaacccuugacgaacacgaugccaacgugaacaaucuguacaacaagguaaaaagggcauuggggucaaaugcuauggaggacggaaaggguuguuuugaacucuaucauaagugcgaugaccaguguauggagacuauacggaacggcaccuacaaucgacgcaaauauagagaggaaaguaggcuggagcaacagcggaucgaagggguuaaguuagagagcgaaggaacauacaaaauucugaccaucuauuccacuguggccucuagccuaguccucgcgaugggcuucgccgcauuccuguuuugggcuaugucaaacgguaguugccgcugcaauaucuguauuuga

SEQ ID NO: 138336 - RNA, 1683 nt, Artificial Sequence; identical to SEQ ID NO: 138331
  derived and/or modified CDS sequence (opt3) from hemagglutinin__InfluenzaA__AGQ81137

SEQ ID NO: 138337 - RNA, 1683 nt, Artificial Sequence
  derived and/or modified CDS sequence (opt3) from hemagglutinin__InfluenzaA__AGQ81138
auggaggccgcuaccaucauuacaauacugcucgcaaucacuggcagcaacgccgacaagauuugcaucggguaccaauccaccaauucuacggaaacaguggauacucuuaccgagaacaauguccccguuacacacgcgaaagaacuguugcauaccgagcacaacggaauguuaugugcuacuaaucuggguagaccucuaauucucgacacaugcaccaucgaaggccugauauaugggaacccaucaugugaucuuccgcuggagggaagggaguggaguuacaucguggaacggcccagcgccguaaauggcgugugcuauccuggucaugucgagaacuuggaagaacuccgcucccuguucucuucggcaucaagcuaccaacgagugcagauuuuuccagacaguaucuggaauguuuccuauucugggacgagcaaggccuguuccgauucauucuaccguaguaugagauggcugacucagaaaaacaauaacuaucccgugcaggacgcucaauacaccaauaacaagggcaaaaauauucucuuuauguggggaaucaaccacccuccaacagauacugcacagaccaacuuauacacaaggaccgacacgacuacaagcgucgccaccgaggauauaaaucggacuuucaagccccugauuggcccucgcccacuugugaacggguugcagggaagaaucgacuauuacugggcuguacugaagccgggucagacacuaaggguucggucuaauggcaaccucauugcccccugguaugggcauauccugcuuggagaaucccacggccgcauccugaaaaccgauuugaagucagguaauugcgugguccaaugucagacggagcgagggggacucaacaccacacugccuuuucacaaugugagcaaauacgcguucggcaacugcccaaaguauauuggcgugaaaaguuuaaagcuggcagucgggcucagaaauguucaugccaggucuucccggggacuuuuuggugcuauagccggcuucaucgaagggggauggagcggccugguggcagguugguacggguuucagcacucgaacgaccagggcacuggaauggcugccgaucgugacucuacccaaaaggcgauugacaaaaucacauccaagguaaauaacauaguggauaaaaugaauaagcaguaugagauuaucgaccaugaguucucagagaucgagacucgcuugaacaugauuaaugauaaaaucgacgaucagauucaagacauaugggccuacaacgcagaacuacugguccuccuggagaaccagaagacccuugaugaacacgacgcuaaugugaacaaucuguacaacaaaguuaagagagccuugggcaguaaugcuguggaggaugggaagggauguuuugaccucuaucacaaaugcgauaaccaguguauggaaacaaucaggaaugguaccuacaaccggcgaaaguaucaggaggagagccgccuggaaagacagaaaauugagggcgucaaguuagaauccgaggggacuuacaaaauccugacgaucuauucuacaguggccagcagucuaguaauugcaaugggauucgccgcuuuucucuucugggcgaugucaaauggcuccuguaggugcaacauaugcaucuga

SEQ ID NO: 138338 - RNA, 1683 nt, Artificial Sequence
  derived and/or modified CDS sequence (opt3) from hemagglutinin__InfluenzaA__AGQ81139
auggagguggccaccaucauuacaauacugcucgucaucacuggcgggaacgcugacaagauuugcaucggauaccagagcaccaauuccacggaaacaguugauacucuuaccgagaacaaugugcccguaacacacgcaaaagaacuguugcauaccgagcacaacgguauguuaugugccacuaaucugggcagaccucuaauucucgacacaugcaccaucgaagggcugauauauggaaacccaucuugugaucuuccgcuggagggcagggaguggucauacaucguggaacggaguagcgcggucaauggugugugcuaucccgggaacguugagaauuuggaagaacuccgcucccuguucucuucggcuucaagcuaccaacguauucagaucuuuccugacaguauuuggaacguguccuauucuggaacgagcaaggccuguuccgauucauucuaccgaaguaugagauggcugacucagaaaaauaacaauuauccaguccaggacgcacaauacaccaacaauaggggcaagaacauccucuuuauguggggcauaaaccaucccccuacagauaaugcccagacuaacuuauacacccggacagacaccacgacuagcguggcuacagaggauauuaaucgcaccuucaaaccacugaucgggcccagaccucuuguaaacggauugcaggguaggauugacuauuacugggcaguucugaagccaggccagacucuacgggugcgcucuaaugggaaccucaucgccccgugguauggacacauccugcuuggcgaaucccauggucgaauacugaagacagauuugaaaucagggaauugcgucgugcaaugucagaccgagagaggaggccucaacacgacccugcccuuucacaaugugagcaaguacaguuucggcaacugcccuaaauauauuggggucaagucuuuaaaacuggcuguuggacucaggaaugugccagcccgguccagccguggucuuuuuggcgcgaucgcaggguucauugaaggaggcuggucgggucugguagccgggugguacggcuuucagcacucuaacgaccagggaacaggcauggcugccgaucgcgacuccacucaaaaggcaaucgacaagauaaccucaaaagugaauaacauugucgauaagaugaauaaacaguaugagaucaucgaccaugaguucagugagauugagacaagauugaacaugaucaacaauaagauugaugaccagauacaagauaucugggcuuacaacgccgaacuacuggugcuccuggagaaucagaaaacucuugacgaacacgaugcgaacguuaauaaccuguacaauaaggugaaaagggccuuggggagcaacgcagucgaggacggaaaggguuguuuugaucucuaucauaagugcgacaaucaguguauggaaaccauucggaacggcacauacaaucgacgcaaauaucaggaggaguccagacuggaaaggcaaaagaucgagggggugaaauuagaaucugagggaaccuacaagauccugacuauuuauagcacgguagcuucaagucuaguuauagccaugggcuucgcugccuuucucuucugggcaauguccaacgguagcugccggugcaauaucuguauuuga

SEQ ID NO: 138339 - RNA, 1683 nt, Artificial Sequence
  derived and/or modified CDS sequence (opt3) from hemagglutinin__InfluenzaA__AGQ81141
auggaggccgcuaccaucauuacaauacugcucgugaucacuggcagcaacgcagacaagauuugcaucggguaccaguccaccaauucuacggaaacagucgauacucuuaccgagaacaauguucccgugacacacgccaaagaacuguugcauaccgagcacaacggaauguuaugugcgacugaccuggguagaccucuaauucucgauacaugcaccaucgaaggccugauauaugggaauccaucaugugaccuuccgcuggagggaagggaguggaguuacaucguagaacggcccagcgcugugaacggcgucugcuauccugguaauguggagaacuuggaggaacuccgcucccuguucucuucggccucaagcuaccaacguauucagaucuuuccagauaguauuuggaauguuuccuauucugggacgagcaaggcauguuccgacucauucuaccgaaguaugagauggcugacucagaaaaacaauaacuaucccgugcaggaugcccaauacaccaauaacaggggaaagaauauccucuuuauguggggcauaaaccauccuccaacagacacugcucagaccaacuuauacacacggaccgauacgacuacaagcgucgcaaccgaggacauuaaucgcacuuucaaaccccugaucggcccuagaccacuugugaacggguugcagggaaggauugauuauuacugggccguacugaagccgggucagacacuacggguucgcucuaauggcaaccucaucgcucccugguaugggcacauccugcuuggagaaucccauggccgaauacugaagaccgacuugaaaucagguaauugcgugguccaaugucagacggagagagggggacucaacaccacacugccuuuucacaaugugagcaaguacgccuucggcaacugcccaaaauauauuggcgugaagaguuuaaaacuggcggucgggcucaggaauguucccgcacggucucgucgcggacuuuuuggugccaucgcuggcuucauugaagggggauggacuggccugguggccgguugguacggguuucagcacuccaacgaucagggcaccggaauggcagcugacagagacagcacacaaaaggccaucgauaagauaacuucgaaaguaaauaacauuguggacaagaugaauaaacaguaugauaucaucgaccaugaguucucugaaauugagaccagguugaacaugaucaaugauaagauugacgaucagauacaagacaucugggcguacaacgccgagcuacugguccuccuggaaaaccagaaaacacuugaugagcacgacgcaaaugugaacaaucuguacaacaagguuaaaggcgcuuugggguccaaugccguggaagauggaaaggguuguuuugaccucuaucauaagugcgacaaccaguguauggagaccauucggaauggcacuuacaaccgacgcaaauaucaggaagagucaagacuggagaggcaaaagaucgaaggggucaaauuagagagugaaggaacguacaagauccugacaauuuauagcaccguggcuuccucucuaguaauagccaugggcuucgcagccuuucucuucugggcuaugagcaaugguucaugccggugcaacaucuguauuuga

SEQ ID NO: 138340 - RNA, 1683 nt, Artificial Sequence
  derived and/or modified CDS sequence (opt3) from hemagglutinin__InfluenzaA__AGQ81143
auggagguggccaccaucauuacaauacugcucgucaucacuggcagcaacgcugacaagauuugcaucggguaccaguccaccaauucuacggaaacaguugauacucuuaccgagaacaaugugcccguaacacacgcaaaagaacuguugcauaccgagcacaacggaauguuaugugccacuaaucuggguagaccucuaauucucgacacaugcaccaucgaaggccugauauaugggaacccaucaugugaucuuccgcuggagggaagggaguggaguuacaucguggaacggcccagcgcggucaauggcgugugcuauccugguaacguugagaauuuggaagaacuccgcucccuguucucuucggcuucaagcuaccaacguauucagaucuuuccagacaguauuuggaacguguccuauucugggacgagcaaggccuguuccgauucauucuaccgaaguaugagauggcugacucagaaaaauaacaauuaucccguccaggacgcacaauacaccaacaauaggggaaagaacauccucuuuauguggggcauaaaccauccuccaacagauaaugcccagacuaacuuauacacccggacagacaccacgacuagcguggcuacagaggauauuaaucgcaccuucaaaccccugaucggcccuagaccacuuguaaacggguugcagggaaggauugacuauuacugggcaguucugaagccgggucagacucuacgggugcgcucuaauggcaaccucaucgcccccugguaugggcacauccugcuuggagaaucccauggccgaauacugaagacagauuugaaaucagguaauugcgucgugcaaugucagaccgagagagggggacucaacacgacccugccuuuucacaaugugagcaaguacaguuucggcaacugcccaaaauauauuggcgucaagucuuuaaaacuggcuguugggcucaggaaugugcccgcccgguccagccguggacuuuuuggugcgaucgcaggcuucauugaagggggauggucgggccugguagccgguugguacggguuucagcacucuaacgaccagggcacaggaauggcugccgaucgcgacuccacucaaaaggcaaucgacaagauaaccucaaaagugaauaacauugucgauaagaugaauaaacaguaugagaucaucgaccaugaguucagugagauugagacaagauugaacaugaucaacaauaagauugaugaccagauacaagauaucugggcuuacaacgccgaacuacuggugcuccuggagaaucagaaaacucuugacgaacacgaugcgaacguuaauaaccuguacaauaaggugaaaagggccuugggcagcaacgcagucgaggacgggaagggauguuuugaucucuaucauaagugcgacaaucaguguauggaaaccauucggaacgguacauacaaucgacgcaaauaucaggaggaguccagacuggaaaggcaaaagaucgagggcgugaaauuagaaucugaggggaccuacaagauccugacuauuuauagcacgguagcuucaagucuaguuauagccaugggauucgcugccuuucucuucugggcaauguccaacggcagcugccggugcaauaucuguauuuga

SEQ ID NO: 138341 - RNA, 1683 nt, Artificial Sequence
  derived and/or modified CDS sequence (opt3) from hemagglutinin__InfluenzaA__AGQ81144
auggaggccgcuaccaucauuacaauacugcucguggucacuggcagcaacgcagacaagaucugcauuggguaccaguccaccaauucuacggaaacaguugauacucuuaccgagaacaaugugcccguaacacacgccaaagaacuguugcauaccgagcacaacggaauguuaugugcgacuaaucuggguagaccucuaauccucgacacaugcaccauugaaggccugaucuaugggaacccaucaugugaucuuccgcuggagggaagggaguggaguuacauaguggaacggcccagcgcugucaauggcgugugcuauccugguaacguugagaauuuggaagaacuccgcucccuguucucuucggccucaagcuaccaacgaauccagauuuuuccagacaguaucuggaacguguccuaugggggaacgucuaaggcauguagcgauuccuucuaccguucaaugagauggcugacucagaaaaauaacaauuaucccguccaggacgcccaauacaccaacaauaggggcaagaacauucucuuuauguggggcaucaaccauccuccaacagauacugcucagaccaauuuauacacacggaccgacacgacuacaaguguggcaaccgaggauauaaaccgcacuuucaaaccccugauugggccuagaccacuuguaaauggauugcaggguaggaucgacuauuacugggccguucugaagccgggccagacacuacgggugcgcagcaacgggaaucucauugcucccugguauggacacauccugcuuggcgaaucucauggucgaauccugaagaccgauuugaaauccgggaacugcgucgugcaaugucagacggagagaggaggccucaauaccacacugccuuuucacaacgugucaaaguacgccuucggcaauugcccaaaauauauuggggucaagagcuuaaaacuggcgguuggacucaggaacaugcccgcacggaguucucguggucuuuuuggcgccauagcuggguucaucgaaggaggcugguccggucugguggccgggugguacggcuuucagcacagcaaugaccagggaacuggcauggcagcugaucgcgacucgacccaaaaggccauugacaagaucacaucuaaaguaaacaauauaguggauaagaugaacaaacaguaugagauuaucgaccaugaguucuccgagaucgagacuagauugaauaugauuaacgauaagaucgacgaucagauucaagacauaugggcguacaacgccgaacuacugguccuccuggagaaucagaaaacccuugaugaacacgacgcaaacgugaauaaccuguacaauaagguuaaaagggcuuuggggucaaacgccguggaggauggaaaggguuguuuugaccucuaucauaagugcgauaaucaguguauggaaacaauccggaacggcaccuacaaucgacgcaaauaucaggaggagaguagacuggaaaggcaaaagauugagggggucaaauuagaaagcgagggaacuuacaagauccugacgaucuauuccacaguggcuucuagccuaguaauugccaugggcuucgcagccuuucucuucugggcuaugucaaacgguaguugccggugcaauauauguaucuga

SEQ ID NO: 138342 - RNA, 1683 nt, Artificial Sequence
  derived and/or modified CDS sequence (opt3) from hemagglutinin__InfluenzaA__AGQ81146
auggaggccgcuaccaucauuacaauacugcucgugaucacuggcagcaacgcagacaagauuugcaucggguaccaguccaccaauucuacggaaacagucgauacucuuaccgagaacaauguucccgugacacacgccaaagaacuguugcauaccgagcacaacggaauguuaugugcgacuaaucuggguagaccucuaauucucgacacaugcaccaucgaaggccugauauaugggaacccaucaugugaucuuccgcuggagggaaaggaguggaguuacaucguagaaaggcccagcgcugugaauggcaugugcuauccugguaacgucgagaauuuggaggagcuccggucccuguucucuucggccucaagcuaccaacgcauucagaucuuuccagacaguauuuggaacguguccuauucugggacgagcaaagcauguuccgauucauucuaccgaaguaugcguuggcugacucagaagaauaacaauuaucccguucaggacgcccaauacaccaacaauagaggcaaaaacauccucuuuauguggggaauaaaccauccuccaacagauacugcucagaccaauuuauacacaaggaccgacacgaagacuagcguggcaacagaggaaauuaaccggaccuucaagccccugaucggcccucgcccacuugucaauggguugcagggaagaauugauuauuacugggccgugcugaaaccgggucagacucuaaggguacggucuaacggcaaucucaucgcucccugguaugggcacauccugcuuggagagucccauggccgcauucugaagacagacuugaaaucagguaacugcguugugcaaugucagaccgaacgagggggacucaauacgacccugccuuuucacaacgucagcaaguacgccuucggcaauugcccaaaauauauaggcgugaagaguuuaaagcuggcgguggggcucagaaacguccccgcaaggucuucccggggacuuuuuggugccaucgcuggcuucauugaagggggauggagcggccugguugccgguugguacggguuucagcacucgaaugaucagggcacaggaauggcagcugaccgugauucuacucaaaaagccaucgacaagauaaccuccaaagugaacaauauuguagacaagaugaacaaacaguaugaaaucaucgaucaugaguucucagagauugaaacacgcuugaauaugaucaacgacaagauugaugaccagauacaagauaucugggcguacaacgccgagcuacuggugcuccuggaaaaucagaaaacucuugacgagcacgauaguaacgucaauaaccuguacaauaaggugaagagagcauugggcagcaacgcuguugaagacgggaaaggauguuuugaucucuaucauaagugcgacaaucaguguauggagaccauuaggaacgguacauacaaucggcgaaaauaucaggaggaaucccgccuggagagacaaaagaucgaaggcgugaaauuagagucugaagggaccuacaagauccugacuauuuauagcacggucgccucaagucuagugauagcuaugggauucgccgcauuucucuucugggccauguccaacggcagcuguaggugcaauaucugcauuuga

SEQ ID NO: 138343 - RNA, 1683 nt, Artificial Sequence
  derived and/or modified CDS sequence (opt3) from hemagglutinin__InfluenzaA__AGQ81147
auggaggccgcuaccaucauuacaauacugcucgugaucacuggcagcaacgcagacaagauuugcaucggguaccaguccaccaauucuacggaaacagucgauacucuuaccgagaacaauguucccgugacacacgccaaagaacuguugcauaccgagcacaacggaauguuaugugcgacuaaucuggguagaccucuaauucucgacacaugcaccaucgaaggccugauauaugggaacccaucaugugaucuuccgcuggagggaaaggaguggaguuacaucguagaaaggcccagcgcugugaauggcaugugcuauccugguaacgucgagaauuuggaggagcuccggucccuguucucuucggccucaagcuaccaacgcauucagaucuuuccagacaguauuuggaacguguccuauucugggacgagcaaagcauguuccgauucauucuaccgaaguaugcguuggcugacucagaagaauaacaauuaucccguucaggacgcccaauacaccaacaauagaggcaaaaacauccucuuuauguggggaauaaaccauccuccaacagauacugugcagaccaauuuauacacaaggaccgacacgaagacuagcgucgcuacagaggaaauuaaccggaccuucaagccccugaucggcccucgcccacuugugaauggguugcagggaagaauugauuauuacugggcaguacugaaaccgggucagacucuaaggguucggucuaacggcaaucucaucgcccccugguaugggcacauccugcuuggagagucccauggccgcauucugaagacagacuugaaaucagguaacugcgugguccaaugucagaccgaacgagggggacucaauacgacccugccuuuucacaacgugagcaaguacgcuuucggcaauugcccaaaauauauaggcgugaagaguuuaaagcuggccgucgggcucagaaacguucccgcgaggucuucccggggacuuuuuggugcaaucgccggcuucauugaagggggauggagcggccugguggcugguugguacggguuucagcacucgaaugaucagggcacaggaauggccgcagaccgugauucuacucaaaaagcuaucgacaagauaaccuccaaaguaaacaauauuguggacaagaugaacaaacaguaugaaaucaucgaucaugaguucucagagauugaaacacgcuugaauaugaucaacgacaagauugaugaccagauacaagauaucugggccuacaacgcggagcuacugguccuccuggaaaaucagaaaacucuugacgagcacgaugccaacgugaauaaccuguacaauaagguuaagagagcauugggcaguaacgcuguggaagacgggaaaggauguuuugaucucuaucauaagugcgacaaucaguguauggagaccauuaggaacgguacauacaaucggcgaaaauaucaggaggaaagccgccuggagagacaaaagaucgaaggcgucaaauuagaguccgaagggaccuacaagauccugacuauuuauucuacgguggccagcagucuaguaauagcuaugggauucgccgcauuucucuucugggccaugucaaacggcuccuguaggugcaauaucugcauuuga

SEQ ID NO: 138344 - RNA, 1683 nt, Artificial Sequence
  derived and/or modified CDS sequence (opt3) from hemagglutinin__InfluenzaA__AGQ81148
auggaggccgcuaccaucauuacaauacugcucgugaucacuggcagcaacgcagacaagauuugcaucggguaccaguccaccaauucuacggaaacagucgauacucuuaccgagaacaauguucccgugacacacgccaaagaacuguugcauaccgagcacaacggaauguuaugugcgacuaaucuggguagaccucuaauucucgacacaugcaccaucgaaggccugauauaugggaacccaucaugugaucuuccgcuggagggaaaggaguggaguuacaucguagaaaggcccagcgcugugaauggcaugugcuauccugguaacgucgagaauuuggaggagcuccggucccuguucucuucggccucaagcuaccaacgcauucagaucuuuccagacaguauuuggaacguguccuauucugggacgagcaaagcauguuccgauucauucuaccgaaguaugcguuggcugacucagaagaauaacaauuaucccguucaggacgcccaauacaccaacaauagaggcaaaaacauccucuuuauguggggaauaaaccauccuccaacagauacugcucagaccaauuuauacacaaggaccgacacgaagacuagcguggcaacagaggaaauuaaccggaccuucaagccccugaucggcccucgcccacuugucaauggguugcagggaagaauugauuauuacugggccgugcugaaaccgggucagacucuaaggguacggucuaacggcaaucucaucgcucccugguaugggcacauccugcuuggagagucccauggccgcauucugaagacagacuugaaaucagguaacugcguugugcaaugucagaccgaacgagggggacucaauacgacccugccuuuucacaacgucagcaaguacgccuucggcaauugcccaaaauauauaggcgugaagaguuuaaagcuggcgguggggcucagaaacguccccgcaaggucuucccggggacuuuuuggugccaucgcuggcuucauugaagggggauggagcggccugguugccgguugguacggguuucagcacucgaaugaucagggcacaggaauggcagcugaccgugauucuacucaaaaagccaucgacaagauaaccuccaaagugaacaauauuguagacaagaugaacaaacaguaugaaaucaucgaucaugaguucucagagauugaaacacgcuugaauaugaucaacgacaagauugaugaccagauacaagauaucugggcguacaacgccgagcuacuggugcuccuggaaaaucagaaaacucuugacgagcacgaugcaaacgucaauaaccuguacaauaaggugaagagagcuuugggcaguaacgccguugaagacgggaaaggauguuuugaucucuaucauaagugcgacaaucaguguauggagaccauuaggaacgguacauacaaucggcgaaaauaucaggaggaaagccgccuggagagacaaaagaucgaaggcgugaaauuagaguccgaagggaccuacaagauccugacuauuuauucuacggucgcuagcagucuagugauagccaugggauucgcagccuuucucuucugggcuaugucaaacggcuccuguaggugcaauaucugcauuuga

SEQ ID NO: 138345 - RNA, 1683 nt, Artificial Sequence
  derived and/or modified CDS sequence (opt3) from hemagglutinin__InfluenzaA__AGQ81149
auggaggccgcuaccaucauuacaauacugcucgugaucacuggcagcaacgcagacaagauuugcaucggguaccaguccaccaauucuacggaaacagucgauacucuuaccgagaacaauguucccgugacacacgccaaagaacuguugcauaccggacacaacgguauguuaugugcgacuaaucugggcagaccucuaauucucgacacaugcaccaucgaggggcugauauauggaaacccaucaugugaucuuccgcuggaaggcagggaguggaguuacaucguagagcggcccagcgcuauuaauggugugugcuauccugggaacgucgaaaauuuggaggaacuccgcucccuguucucuucggccucaagcuaccaacgaauccagauuuuuccagacaguaucuggaacguguccuauucuggaacgagcaaggcauguuccgauucauucuaccguaguaugagauggcugacucagaaaaauaacaauuaucccguucaggacgcccaauacaccaacaauaggggcaagaacauacucuuuauguggggcauuaaccauccuccaacagauacugcucagaccaauuuauacacacggaccgacacgacuacaagcguggcaaccgaggauaucaaccgcacuuucaaaccccugauugggccuagaccacuugucaauggauugcaggguaggaucgacuauuacugggccgugcugaagccgggccagacacuacggguacgcucuaacgggaaucucaucgcucccugguauggacacauucugcuuggcgagucccauggucgaauacugaagaccgauuugaaaucagggaacugcguugugcaaugucagacggaaagaggaggccucaauaccacacugccuuuucacaacgucagcaaguacgccuucggcaauugcccaaaauauaucggggugaagaguuuaaaacuggcggugggacucaggaacguccccgcacggucuucccguggucuuuuuggcgccauugcuggguucaucgagggaggcuggagcggucugguugccgggugguacggcuuucagcacucgaaugaccagggaacuggcauggcagcugaucgcgacucuacccaaaaggccauagacaagauuacauccaaagugaacaauaucguagauaagaugaacaaacaguaugaaaucauugaccaugaguucucagaaaucgagacuagauugaauaugauuaacgauaagauagacgaucagauccaagacauuugggcguacaacgccgagcuacuggugcuccuggaaaaucagaaaacccuugaugagcacgacgcaaacgucaauaaccuguacaauaaggugaaaagggcuuuggggaguaacgccguugaagauggaaaggguuguuuugaccucuaucauaagugcgauaaucaguguauggagacaauccggaacggcaccuacaaucgacgcaaauaucaggaagagagcagacuggagaggcaaaagaucgaaggggugaaauuagaguccgaaggaacuuacaagauucugacgauauauucuacagucgcuagcagucuagugaucgccaugggcuucgcagccuuucucuucugggcuaugucaaacgguuccugccggugcaauauuuguaucuga

SEQ ID NO: 138346 - RNA, 1683 nt, Artificial Sequence
  derived and/or modified CDS sequence (opt3) from hemagglutinin__InfluenzaA__AGQ81150
auggaggccgcuaccaucauuacaauacugcucgugaucacuggcagcaacgcagacaagauuugcaucggguaccaauccaccaauucuacggaaacagucgauacucuuaccgagaacaauguucccgugacacacgccaaagaacuguugcauaccgagcacaacggaauguuaugugcgacugaccuggguagaccucuaauucucgauacaugcaccaucgaaggccugauauaugggaauccaucaugugaccuuccgcuggagggaagggaguggaguuacaucguagaacggcccagcgcugugaacggcgucugcuauccugguaauguggagaacuuggaggaacuccgcucccuguucucuucggccucaagcuaccaacguauucagaucuuuccagauaguauuuggaauguuuccuauucugggacgagcaaggcauguuccgacucauucuaccgaaguaugagauggcugacucagaaaaacaauaacuaucccgugcaggaugcccaauacaccaaugacaggggaaacaauauccucuuuauguggggcauaaaccauccuccaacagauacuguccagaccaacuuauacacacggaccgacacgacuacaagcguggcuaccgaggauauuaaucgcacuuucaagccccugaucggcccuagaccacuuguaaacggguugcagggaaggauugacuauuacugggcaguucugaaaccgggucagacacuacgggugcgcucuaauggcaaccucaucgcccccugguaugggcacauccugcuuggagaaucccauggccgaauacugaagaccgauuugaagucagguaauugcgucgugcaaugucagacggagagagggggacucaacaccacacugccuuuucacaaugugagcaaauacgcuuucggcaacugcccaaaguauauuggcgucaaaaguuuaaagcuggccguugggcucaggaaugugcccgcgcggucuucccguggacuuuuuggugcaaucgccggcuucauugaagggggauggagcggccugguagcugguugguacggguuucagcacucgaacgaccagggcacuggaauggccgcagaccgcgauucuacccaaaaagcuaucgacaagauaacauccaaggugaauaacauugucgauaaaaugaauaagcaguaugacaucaucgaucaugaguucucagaaauugagacuagauugaacaugaucaaugacaaaauugaugaccagauacaagauaucugggccuacaacgcggagcuacuggugcuccuggaaaaccagaagacccuugacgagcacgaugccaauguuaacaaucuguacaacaaagugaagagggcauugggcaguaaugcugucgaagacgggaaaggauguuuugaccucuaucauaagugcgauaaccaguguauggagacaauucggaaugguaccuacaaccgacgcaaguaucaggaagagagcagacuggagaggcagaaaaucgaaggcgugaaguuagaguccgaagggacuuacaaaauccugacgauuuauucuacaguagccagcagucuaguuauagcuaugggauucgccgcauuucucuucugggccaugucaaauggcuccugccggugcaacaucuguauuuga

SEQ ID NO: 138347 - RNA, 1683 nt, Artificial Sequence
  derived and/or modified CDS sequence (opt3) from hemagglutinin__InfluenzaA__AGQ81152
auggaggccgcuaccaucauuacaauacugcucgugaucacuggcagcaacgcagacaagauuugcaucggguaccaauccaccaauucuacggaaacagucgauacucuuaccgagaacaauguucccgugacacacgccaaagaacuguugcauaccgagcacaacggaauguuaugugcgacuaaucuggguagaccucuaauucucgacacaugcaccaucgaaggccugauauaugggaacccaucaugugaucuuccgcuggagggaagggacuggaguuacaucguagagcggcccagcgcugugaauggcgucugcuauccugguaacguggaaaauuuggaggaacuccgcucccuguucucuucggccucaagcuaccaaaagauucagaucuuuccagauaguauuuggaacguuuccuauucugggacgagcaaagcauguuccgacucauucuaccgaaguaugcguuggcugacucagaagaauaacaauuaucccgugcaggaugcccaauacaccaacaauagagggaaaaacauccucuuuauguggggcauaaaccauccuccaacagacacuguccagaccaauuuauacacaaggaccgauacgacuacaagcguggcuaccgaggacauuaaccggacuuucaagccccugaucggcccucgcccacuuguaaauggguugcagggaagaauugauuauuacugggcaguucugaagccgggucagacacuaagggugcggucuaacggcaaucucaucgcccccugguaugggcacauccugcuuggagagucccauggccgcauucugaaaaccgacuugaagucagguaacugcgucgugcaaugucagacggaacgagggggacucaauaccacacugccuuuucacaacgugagcaaauacgcuuucggcaauugcccaaaguauauaggcgucaaaaguuuaaagcuggccguugggcucagaaacgugcccgcgaggucuucccggggacuuuuuggugcaaucgccggcuucauugagggaggauggagcggccugguagcugguugguacggguuucagcacucgaaugaucagggcacuggaauggccgcagaccgugacucuacccaaaaggcuaucgauaaaauaacauccaaggugaacaauauugucgacaaaaugaacaagcaguaugaaaucaucgaucaugaguucucagaaauugagacucgcuugaauaugaucaacgacaaaauugaugaccagauacaagauaucugggccuacaacgcggagcuacuggugcuccuggaaaaucagaagacccuugacgagcacgaugccaacguuaauaaccuguacaauaaagugaagagagcauugggcaguaacgcugucgaagacgggaagggauguuuugaucucuaucauaaaugcgacaaucaguguauggagacaauuaggaacgguaccuacaaucggcgaaaguaucaggaagagagccgccuggagagacagaaaaucgaaggcgugaaguuagaguccgaagggacuuacaaaauccugacgauuuauucuacaguagccagcagucuaguuauagcuaugggauucgccgcauuucucuucugggccaugucaaacggcuccuguaggugcaauaucugcauuuga

SEQ ID NO: 138348 - RNA, 1683 nt, Artificial Sequence
  derived and/or modified CDS sequence (opt3) from hemagglutinin__InfluenzaA__AGQ81153
auggaggccgcuaccaucauuacaauacugcucgugaucacuggcagcaacgcagacaagauuugcaucggguaccaguccacgaauagcaccgaaacagucgauacucuuaccgagaacaauguucccgugacacacgccaaagaacuguugcauaccgagcacaacggaauguuaugugcgacuaaucuggguagaccucuaauucucgacacaugcaccaucgaaggccugauauaugggaacccaucaugugaucuuccgcuggagggaagggacuggaguuacaucguagagcggcccagcgcugugaauggcgucugcuauccugguaacguggaaaauuuggaggaacuccgcucccuguucucuucggccucaagcuaccaaaagauucagaucuuuccagauaguauuuggaacguuuccuaugggggaaucucuaaagcauguagcaauuccuucuaccgaucaaugcguuggcugacgcagaagaacaauaacuaucccgugcaggacgcccaauacacuaauaacagaggcaaaaacauacucuuuauguggggcauuaaucauccuccaaccaacacaacucagaccgauuuauacacaaggaccgacacgacuacaagugucgcuaccgaggauauccaccggacuuucaagccccugauugggccucgcccacuugugaauggauugcaggguagaaucgacuauuacugggcaguacugaagccgggccagacacuaaggguucggagcaacgggaaucucaucgcccccugguauggacauauucugcuuggcaaaucucacggucgcauacugaagaccgauuugaaauccgggaacugcgugguccaaugucagacggagcgaggaggccucaauaccacacugccuuuucacaacgugucaaaguacgcuuucggcaauugcccaaaauauaucggggugaagucuuuaaagcuggccgucggacucagaaacguucccgcgaggaguucucggggucuuuuuggcgcaauugccggguucaucgaaggaggcugguccggucugguggcugggugguacggcuuucagcauagcaaugaccagggaacuggcauggccgcagaucgugacucgacccaaaaagcuauagacaagauuacaucuaaaguaaacaauaucguggauaagaugaacaaacaguaugagaucauugaccacgaguucuccgaaaucgaaacucgcuugaauaugauuaacgauaagauagacgaucagauccaagacauuugggccuacaacgcggagcuacugguccuccuggagaaucagaaaacccuugaugaacaugacgccaacgugaauaaccuguacaauaagguuaagagagcauuggggucaaacgcuguggaggauggaaaagguuguuuugaccucuaucacaagugcgauaaucaguguauggaaacaaucaggaacggcaccuacaaucggcgaaaauaucaggaggaaagucgccuggagagacaaaagaucgagggggucaaauuagaaagcgagggaacuuacaagauucugacgauauauuccacaguggccucuagccuaguaaucgcuaugggcuucgccgcauuucucuucugggccaugucaaacgguaguuguaggugcaauauuugcaucuga

SEQ ID NO: 138349 - RNA, 1683 nt, Artificial Sequence
  derived and/or modified CDS sequence (opt3) from hemagglutinin__InfluenzaA__AGQ81155
auggaggccgcuaccaucauuacaauacugcucgugaucacuggcagcaacgcagacaagauuugcaucggguaccaguccacgaauagcaccgaaacagucgauacucuuaccgagaacaauguucccgugacacacgccaaagaacuguugcauaccgagcacaacggaauguuaugugcgacuaaucuggguagaccucuaauucucgacacaugcaccaucgaaggccugauauaugggaacccaucaugugaucuuccgcuggagggaagggacuggaguuacaucguagagcggcccagcgcugugaauggcgucugcuauccugguaacguggaaaauuuggaggaacuccgcucccuguucucuucggccucaagcuaccaaaagauucagaucuuuccagauaguauuuggaacguuuccuauaaugggacgucuaaagcauguagcgacuccuucuaccgaucaaugcguuggcugacucagaagaacaauaacuaucccgugcaggaugcccaauacaccaauaacagagggaaaaacauccucuuuauguggggcauaaaucauccuccaacagacacuacccagacaaacuuauacaccaggacggauacuacaaccagugucgcuacugaggacauuaaucggacauucaagccccugaucggcccucgcccacuugugaacggguugcagggaagaauugauuauuacugggcaguacugaagccgggucagacccuaaggguucggagcaauggcaaccucaucgcccccugguaugggcacauccugcuuggagagucucauggccgcauucugaaaacggacuugaaguccgguaauugcgugguccaaugucagaccgaacgagggggacucaacacaacucugccuuuucacaaugugucaaaauacgcuuucggcgauugcccaaaguauauaggcgugaaaucuuuaaagcuggccgucgggcucagaaacguucccgcgaggaguucucggggacuuuuuggugcaaucgccggcuucauugagggaggaugguccggccugguggcugguugguacggguuucagcacagcaaugaccagggcaccggaauggccgcagaccgugauucgacacaaaaggcuaucgacaaaauaacuucuaagguaaacaauauuguggauaaaaugaacaagcaguaugaaaucaucgaccaugaguucuccgaaauugagacccgcuugaauaugaucaacgauaaaauugacgaucagauacaagacaucugggccuacaacgcggagcuacugguccuccuggaaaaucagaagacacuugaugagcacgacgccaacgugaauaaccuguacaauaaaguuaagagagcauugggcucaaacgcuguggaagaugggaagggauguuuugaccucuaucauaaaugcgacaaucaguguauggagaccauuaggaacgguacuuacaaucggcgaaaguaucaggaagagagucgccuggagagacaagaaaucgagggcgucaaauuagaaagcgaggggacguacaagauccugacaauuuauuccaccguggccucuagccuaguaauagcuaugggauucgccgcauuucucuucugggccaugucaaacggcaguuguaggugcaauaucugcauuuga

SEQ ID NO: 138350 - RNA, 1683 nt, Artificial Sequence
  derived and/or modified CDS sequence (opt3) from hemagglutinin__InfluenzaA__AGQ81156
auggaggccgcuaccaucauuacaauacugcucgugaucacuggcagcaacgcagacaagauuugcaucggguaccaauccacgaauagcaccgaaacagucgauacucuuaccgagaacaauguucccgugacacacgccaaagaacuguugcauaccgagcacaacggaauguuaugugcgacuaaucuggguagaccucuaauucucgacacaugcaccaucgaaggccugauauaugggaacccaucaugugaucuuccgcuggagggaagggacuggaguuacaucguagagcggcccagcgcugugaauggcgucugcuauccugguaacguggaaaauuuggaggaacuccgcucccuguucucuucggccucaagcuaccaaaagauucagaucuuuccagauaguauuuggaacguuuccuaugggggaaucucuaaagcauguagcaauuccuucuaccgaucaaugcguuggcugacgcagaagaacaauaacuaucccgugcaggacgcccaauacacuaauaacagaggcaaaaacauacucuuuauguggggcauuaaucauccuccaaccaacacaacucagaccgauuuauacacaaggaccgacacgacuacaagugucgcuaccgaggauauccaccggacuuucaagccccugauugggccucgcccacuugugaauggauugcaggguagaaucgacuauuacugggcaguacugaagccgggccagacacuaaggguucggagcaacgggaaucucaucgcccccugguauggacauauucugcuuggcgagucucacggucgcauacugaaaaccgauuugaaguccgggaacugcgugguccaaugucagacggaacgaggaggccucaauaccacacugccuuuucacaacgugucaaaauacgcuuucggcaauugcccaaaguauaucggggugaaaucuuuaaagcuggccgucggacucagaaacguucccgcgaggaguucucggggucuuuuuggcgcaauugccggguucaucgagggaggcugguccggucugguggcugggugguacggcuuucagcauagcaaugaccagggaacuggcauggccgcagaucgugacucgacccaaaaggcuauagacaaaauuacaucuaagguaaacaauaucguggauaaaaugaacaagcaguaugaaaucauugaccacgaguucuccgaaaucgagacucgcuugaauaugauuaacgauaaaauagacgaucagauccaagacauuugggccuacaacgcggagcuacugguccuccuggaaaaucagaagacccuugaugagcaugacgccaacgugaauaaccuguacaauaaaguuaagagagcauuggggucaaacgcuguggaagauggaaaggguuguuuugaccucuaucacaaaugcgauaaucaguguauggagacaaucaggaacggcaccuacaaucggcgaaaguaucaggaagagagucgccuggagagacagaaaaucgaaggggucaaguuagagagcgaaggaacuuacaaaauucugacgauauauuccacaguggccucuagccuaguaaucgcuaugggcuucgccgcauuucucuucugggccaugucaaacgguaguuguaggugcaauauuugcaucuga

SEQ ID NO: 138351 - RNA, 1683 nt, Artificial Sequence
  derived and/or modified CDS sequence (opt3) from hemagglutinin__InfluenzaA__AGQ81157
auggaggccgcuaccaucauuacaauacugcucgugaucacuggcaacaaugcagacaagauuugcaucggguaccaaagcacgaacuccaccgaaacagucgauacucuuaccgagaauaacguucccgugacacacgccaaagaacuguugcauaccgagcacaauggaauguuaugugcgacuaaccuggguagaccucuaauucucgacacaugcaccaucgaaggccugauauaugggaauccaucuugugaucuuccgcuggagggaagggacuggucauacaucguagagcggcccagugcugugaacggcgucugcuauccugguaauguggaaaacuuggaggaacuccgcagccuguucuccucugccucgucauaccaaaagauucagaucuuuccagauagcauuuggaauguuaguuauaacgggacguccaaagcauguucugacagcuucuaccgauccaugcguuggcugacucagaagaauaacaauuaucccgugcaggaugcccaauacaccaacaacagagggaaaaauauccucuuuauguggggcauaaaccauccuccaacagacacuacccagacaaauuuauacaccaggacggauacuacaaccucagucgcuacugaggacauuaaccggacauucaagccccugaucggcccucgcccacuugugaauggguugcagggaagaauugauuauuacugggcaguacugaagccgggucagacccuaaggguucggaguaacggcaaucucaucgcccccugguaugggcacauccugcuuggagagagccauggccgcauucugaaaacggacuugaagucugguaacugcgugguccaaugucagaccgaacgagggggacucaauacaacucugccuuuucacaacguguccaaauacgcuuucggcgauugcccaaaguauauaggcgugaaaucauuaaagcuggccgucgggcucagaaauguucccgcgaggagcagucggggacuuuuuggugcaaucgccggcuucauugagggaggauggucuggccugguggcugguugguacggguuucagcacuccaacgaccagggcaccggaauggccgcagaccgugauagcacacaaaaggcuaucgacaaaauaacuucgaagguaaauaacauuguggauaaaaugaauaagcaguaugaaaucaucgaccaugaguucucugaaauugagacccgcuugaacaugaucaacgauaaaauugacgaucagauacaagacaucugggccuacaaugcggagcuacugguccuccuggaaaaccagaagacacuugaugagcacgacgccaaugugaacaaucuguacaacaaaguuaagagagcauugggcuccaaugcuguggaagaugggaagggauguuuugaccucuaucauaaaugcgacaaccaguguauggagaccauuaggaaugguacuuacaaccggcgaaaguaucaggaagagucacgccuggagagacagaaaaucgaaggcgucaaguuagagagugaagggacguacaaaauccugacaauuuauagcaccguggccuccucucuaguaauagcuaugggauucgccgcauuucucuucugggccaugagcaauggcucauguaggugcaacaucugcauuuga

SEQ ID NO: 138352 - RNA, 1683 nt, Artificial Sequence
  derived and/or modified CDS sequence (opt3) from hemagglutinin__InfluenzaA__AGQ81158
auggagguggucaccaucauuacaauacugcucguuaucacuagaagcaacgccgacaagauuugcaucggcuaccaauccaccaauucuacggaaacaguggauacucuuaccgagaacaauguacccgugacacacgcuaaagaacuguugcauaccgagcacaacgggauguuaugugcaacuaaucugggaaggccucuaauucucgacacaugcaccaucgaaggucugauauauggcaacccaucaugugaucuuccgcuggaggggcgggaguggaguuacaucgucgaacgccccagcgccgugaauggaguuugcuauccuggcaacguggagaauuuggaagaacuccgaucccuguucucuucggcgucaagcuaccaacguauucagaucuuuccagacaguauuuggaacgucuccuauucugguacgagcaaggcuuguuccgauucauucuacagaaguaugagguggcugacucagaaaaauaacaauuaucccgugcaggacgcccaauacaccaacaaucgggggaagaacauccucuuuauguggggaauaaaccauccuccaacagauacugcacagaccaauuuauacacacgcaccgacacgacuacaagcguagccaccgaggauauuaacagaacuuucaaaccccugaucggcccuaggccacuuguuaauggcuugcaggggcggauugacuauuacugggcugugcugaagccgggacagacacuacgcguccgaucuaacgguaaucucaucgcacccugguauggccacauccugcuuggggaaucccauggaaggauucugaagaccgauuugaaaucaggcagcugcguggugcaaugucagacggagagaggugggcucaacaccacacugccuuuucacaaugucaguaaguacgccuucggaaacugcccaaaauauauaggcguuaagucuuuaaaacuggcugugggccuccggaauguacccgcccguuccagccgcgggcuuuuuggagcgaucgcagguuucauugaaggcggguggucgggacugguggccggcugguacgguuuucagcacucuaacgaccaggggacuggcauggcugccgauagagacuccacccaaaaggcaaucgacaagauaacaucaaaagucaauaacauuguggauaagaugaauaaacaguaugagaucaucaaccaugaguucagugagauugagacuagguugaauaugaucaacgacaagauugaugaccagauacaagauaucugggcuuacaacgccgaacuacugguucuccuggagaaucagaaaacccuugacgaacacgaugcgaacgugaauaaccuguacaauaaggucaaacgggccuugggaagcaacgcaguggaggacggcaagggguguuuugaucucuaucauaagugcgacaaucaguguauggaaacaauucgaaacggaaccuacaaucgcagaauguaucaggaggaguccaggcuggaacggcagaaaaucgaggguguaaaguuagaaucugagggcacuuacaaaauccugacgauuuauagcacaguugcuucaagucuagugauagccaugggguucgcugccuuucucuucugggcaauguccaacggaagcugccgcugcaauaucuguauuuga

SEQ ID NO: 138353 - RNA, 1683 nt, Artificial Sequence
  derived and/or modified CDS sequence (opt3) from hemagglutinin__InfluenzaA__AGQ81159
auggaggccgcuaccaucauuacaauacugcucgugaucacuggcagcaacgcagacaagauuugcaucggguaccaguccaccaauucuacggaaacagucgauacucuuaccgagaacaauguucccgugacacacgccaaagaacuguugcauaccgagcacaacggaauguuaugugcgacuaaucuggguagaccucuaauucucgacacaugcaccaucgaaggccugauauaugggaacccaucaugugaucuuccgcuggagggaagggacuggaguuacaucguagagcggcccagcgcugugaauggcgucugcuauccugguaacguggaaaauuuggaggaacuccgcucccuguucucuucggccucaagcuaccaaaagauucagaucuuuccagauaguauuuggaacguuuccuaugacgggaucucuaaagcauguagcaauuccuucuaccgaucaaugcguuggcugacgaagaaaaacaauaguuaucccgugcaggaugcccaguacacuaacaauauaggaaagaacauucucuuuauguggggcaucaaccauccuccaaccaauacaacucaaaccgacuuauacacaagaaccgauacgacuacaagcgucgcuaccgaggacauucacaggacuuucaagccccugaucggcccucggccaccggugaacgggcuuuugggacgcaucgauuauuacugggcaguacugaaacccggucagacacuaagaguuaggucuaauggcaaccucauugccccuugguaugggcauauacugcuuggagagucccacggccggauccugaagaccgacuugaaaucagguaauugcgugguccagugucagacggaacgcgggggacucaacaccacacugccauuucacaaugugagcaaguacgcuuucggcaacugccccaaauauauuggcgugaagaguuuaaagcuggccgucgggcuccgaaauguuccugcgagaucuuccaggggacuuuuuggugcaaucgccggcuucauagaagggggauggagcggccugguggcugguugguacggguuucaacauucgaacgaucagggcacuggaauggccgcagaccgggacucuacccagaaagcuauugauaagaucacauccaaaguaaauaacaucguggacaagaugaauaaacaguaugagauuaucgaucacgaguucucagaaauugagacucguuugaacaugauaaaugacaagaucgaugaccaaauucaggauaucugggccuacaacgcggagcuacugguccuccuggaaaaccagaaaacccuugacgagcaugaugccaaugugaacaaucuguacaacaagguuaagcgcgcauugggcaguaaugcuguggaagacgggaaaggauguuuugaucucuaucacaagugcgacaaccaauguauggagacaaucagaaaugguaccuacaacaggcggaaauaucaggaagagagccgacuggagcgccagaagauugaaggcgucaaauuagaguccgaagggacuuacaagauacugacgaucuauucuacaguggccagcagucuaguaauugcuaugggauucgccgcauuucucuucugggccaugucaaauggcuccugcagaugcaacaucuguauuuga

SEQ ID NO: 138354 - RNA, 1683 nt, Artificial Sequence
  derived and/or modified CDS sequence (opt3) from hemagglutinin__InfluenzaA__AGQ81161
auggagaccgugagccugaucacaauucuccuugucgccacuguuuccaacgcugacaagauaugcaucggcuaccagucuacuaauucaaccgaaacaguggauacucugaccgagaacaauguacccgugacacacgcaaaagaauuguuacauaccgagcacaacgggaugcugugugccacgagucuaggacaaccucucauucuggacacaugcaccaucgaaggucuuauuuauggcaauccaagcugugauccgcuguuggaggggagagagugguccuacaucgucgaaaggcccucugcggugaacggacucugcuauccuggcaauguugagaaccuggaggagcugcggucacucuucucgagcgcucgcaguuaccagcgaauacagaucuuuccagacacgauuuggaauguguccuaugaugguacuucuaaggccuguagcggguccuucuaccguaacaugagaugguuaacccagaaaaauucagacuaucccauccaagaugcacaguacacaaacaaucagggaaagaacauucuguuuauguggggcaucaaucauccuccaacugacaccacacagagggaucuuuacacccggacggacacuacaaccagugucgccacugaggaaauaaaccgcauuuucaaacccuugaucggcccuagaccacuggugaacgggcuaaugggaaggauugauuauuacuggagcguacucaagccgggucaaacacugcggaucaagucugacggcaaucuuaucgcucccugguaugggcacauucuguccggagagucacauggccgcauauugaaaaccgaucucaagaaagguagcugcacgguucagugucagaccgaaaaagggggacugaacacaacuuuaccuuuucagaaugugaguaaguacgcauucggcaacugcucuaaguauaucggcauuaagucccugaaacucgccgucgggcuucgaaaugugccaagcagaucgucuaggggacuguuuggugcuaucgccggcuucauagaagggggaugguccggcuugguggcggguugguacggguuucaacacucaaacgaccagggcgucggaauggcagccgaccgggauaguacccagaaggcuauugacaaaaucacaagcaagguuaauaacaucguggauaaaaugaauaagcaauaugaaauuaucgaccacgaguucuccgagguagaaacucgucuaaacaugauuaauaacaaaauagaugaccagauccaggauauuugggccuacaaugcagagcugcucgugcugcuugaaaaccagaagacccuggacgagcaugaugcuaaugucaacaacuuguacaauaaggugaaacgcgcccucggcucuaacgcgguugaagacgggaagggauguuuugagcuguaucacaaaugcgaugaccaauguauggagacaaucagaaaugguaccuacaacaggcggaaguaucaggaagagagcaaauuagaacgacagaagaucgagggcgugaagcuggaaucagaggggacuuacaaaauucuaacgauauauaguacagucgccuccagccucgugaucgcaaugggauucgcugccuuucuguucugggcuaugucuaauggcucaugccgcugcaacauuuguaucuga

SEQ ID NO: 138355 - RNA, 1683 nt, Artificial Sequence
  derived and/or modified CDS sequence (opt3) from hemagglutinin__InfluenzaA__AGQ81162
auggagaccgugagccugaucacaauucuccuugucgccacuguuuccaacgcugacaagauaugcaucggcuaccagucuacuaauucaaccgaaacaguggauacucugaccgagaacaauguacccgugacacacgcaaaagaauuguuacauaccgagcacaacgggaugcugugugccacgagucuaggacaaccucucauucuggacacaugcaccaucgaaggucuuauuuauggcaauccaagcugugaucuguugcucgaggggagagagugguccuacaucgucgaaaggccgucugcggugaacggacugugcuaucccggcaauguugagaaccuggaggagcuccggucguuauucucaagcgcucgcaguuaccagcgaauacagaucuuuccugacacgauuuggaauguguccuaugaugguacuucuaaggccuguagcggguccuucuaccguucaaugagauggcugacccagaaaaacagugacuauccaauccaagaugcacaguacacaaauaaccagggaaagaauauucuuuuuauguggggcaucaaccaucccccuacugacaccacacagagggauuuguacacccggacggacacuacaaccagcgucgccacugaggaaauaaaucgcauuuucaaaccacugaucggccccagaccucuagugaacgggcucaugggaaggauugauuauuacuggucuguacugaagccaggucaaacacuucggaucaaguccgacggcaaccugaucgcuccgugguaugggcacauuuugucaggagagagccauggccgcauacucaaaaccgaucugaagaaagguaguugcacgguucagugucagaccgaaaaagggggauuaaauacaacucugcccuuucagaacgugucuaaguacgcauucggcaauugcuccaaguauaucggcauuaagagccucaaacuugccgucgggcugcgaaacgugccuucgagaucuuccaggggauuguuuggugcuaucgccggcuucauagaagggggauggucaggccuaguggcggguugguacggguuucaacacaguaaugaccagggcgucggaauggcagccgaccgggauagcacccagaaggcuauugacaaaaucacauccaagguuaacaauaucguggauaaaaugaacaagcaauaugaaauuaucgaccacgaguucucugagguagaaacucgucugaauaugauuaacaauaaaauagaugaccagauccaggauauuugggccuacaacgcagagcuccuggugcuucuggaaaaucagaagaccuuggacgagcaugaugcuaacgucaauaaccucuacaacaaggugaaacgcgcccugggcagcaaugcgguugaagacgggaagggauguuuugaguuauaucacaaaugcgaugaccaauguauggagacaaucagaaacgguaccuacaauaggaagaaauaucaggaagagucaaagcuggaacggcagaagaucgagggcgugaaacuagaaagugaggggacuuacaagauucucacgauauauuccacagucgccagcucucuggugaucgcaaugggauucgcugccuuucuuuucugggcuaugucaaacggcaguugccgaugcaauauuuguaucuga

SEQ ID NO: 138356 - RNA, 1683 nt, Artificial Sequence
  derived and/or modified CDS sequence (opt3) from hemagglutinin__InfluenzaA__AGQ81164
auggagaccgugagccugaucacaauucuccuugucgccacuguuuccaacgcugacaagauaugcaucggcuaccagucuacuaauucaaccgaaacaguggauacucugaccgagaacaauguacccgugacacacgcaaaagaauuguuacauaccgagcacaacgggaugcugugugccacgagucuaggacaaccucucauucuggacacaugcaccaucgaaggucuuauuuauggcaauccaagcugugaucuguugcucgaggggagagagugguccuacaucgucgaaaggccgucugcggugaacggacugugcuaucccggcaauguugagaaccuggaggagcuccggucguuauucucaagcgcucgcaguuaccagcgaauacagaucuuuccugacacgauuuggaauguguccuaugaugguacuucuaaggccuguagcggguccuucuaccguucaaugagauggcugacccagaaaaacagugacuauccaauccaagaugcacaguacacaaauaaccagggaaagaauauucuuuuuauguggggcaucaaccaucccccuacugacaccacacagagggauuuguacacccggacggacacuacaaccagcgucgccacugaggaaauaaaucgcauuuucaaaccacugaucggccccagaccucuagugaacgggcucaugggaaggauugauuauuacuggucuguacugaagccaggucaaacacuucggaucaaguccgacggcaaccugaucgcuccgugguaugggcacauuuugucaggagagagccauggccgcauacucaaaaccgaucugaagaaagguaguugcacgguucagugucagaccgaaaaagggggauuaaauacaacucugcccuuucagaacgugucuaaguacgcauucggcaauugcuccaaguauaucggcauuaagagccucaaacuugccgucgggcugcgaaacgugccuucgagaucuuccaggggauuguuuggugcuaucgccggcuucauagaagggggauggucaggccuaguggcggguugguacggguuucaacacaguaaugaccagggcgucggaauggcagccgaccgggauagcacccagaaggcuauugacaaaaucacauccaagguuaacaauaucguggauaaaaugaacaagcaauaugaaauuaucgaccacgaguucucugagguagaaacucgucugaauaugauuaacaauaaaauagaugaccagauccaggauauuugggccuacaacgcagagcuccuggugcuucuggaaaaucagaagaccuuggacgagcaugaugcuaacgucaauaaccucuacaacaaggugaaacgcgcccugggcagcaaugcgguugaagacgggaagggauguuuugaguuauaucacaaaugcgaugaccaauguauggagacaaucagaaacgguaccuacaauaggcggaaguaucaggaagagucaaaacuggaacgacagaagaucgagggcgugaagcuagaaagugaggggacuuacaaaauucucacgauauauuccacagucgccagcucucuggugaucgcaaugggauucgcugccuuucuuuucugggcuaugucaaacggcaguugccgcugcaauauuuguaucuga

SEQ ID NO: 138357 - RNA, 1683 nt, Artificial Sequence
  derived and/or modified CDS sequence (opt3) from hemagglutinin__InfluenzaA__AGQ81167
auggagaccgugagccugaucacaauucuccuugucgccacuguuuccaacgcugacaagauaugcaucggcuaccagucuacuaauucaaccgaaacaguggauacucugaccgagaacaauguacccgugacacacgcaaaagaauuguuacauaccgagcacaacgggaugcugugugccacgagucuaggacaaccucucauucuggacacaugcaccaucgaaggucuuauuuauggcaauccaagcugugaucuguugcucgaggggagagagugguccuacaucgucgaaaggccgucugcggugaacggacugugcuaucccggcaauguugagaaccuggaggagcuccggucguuauucucaagcgcucgcaguuaccagcgaauacagaucuuuccugacacgauuuggaauguguccuauaacgguacuucuaaggccuguagcggguccuucuaccguucaaugagauggcugacccagaaaaauaguaacuauccaauccaagaugcacaguacacaaauaaccagggaaagaauauucuuuuuauguggggcaucaaccaucccccuacugacaccacacagagggauuuguacacccggacggacacuacaaccagcgucgccacugaggaaauaaaccgcauuuucaaaccacugaucggccccagaccucuagugaaugggcucaugggaaggauugauuauuacuggucuguacugaagccaggucaaacacuucggaucaaguccgacggcaaccugaucgcuccgugguaugggcacauuuugucaggagagagccauggccgcauacucaaaaccgaucugaagaaagguaguugcacgguucagugucagaccgaaaaagggggauuaaauacaacucugcccuuucagaacgugucuaaguacgcauucggcaauugcuccaaguauaucggcauuaagagccucaaacuugccgucgggcugcgaaacgugccuucgagaucuuccaggggauuguuuggugcuaucgccggcuucauagaagggggauggucaggccuaguggcggguugguacggguuucaacacaguaaugaccagggcgucggaauggcagccgaucgggacagcacccagaaggcuauugacaaaaucacauccaagguuaacaauaucguggauaaaaugaacaagcaauaugaaauuaucgaccacgaguucucugagguagaaacucgucugaauaugauuaacaauaaaauagaugaccagauccaggauauuugggccuacaacgcagagcuccuggugcuucuggaaaaucagaagaccuuggacgagcaugaugcuaacgucaacaaucucuacaacaaggugaaacgcgcccugggcagcaaugcgguugaagacgggaagggauguuuugaguuauaucacaaaugcgaugaccaauguauggagacaaucagaaacgguaccuacaauaggcggaaguaucaggaagagucaaaacuggaacgacagaagaucgagggcgugaagcuagaaagugaggggacuuacaaaauucucacgauauauuccacagucgccagcucucuggugaucgcaaugggauucgcugccuuucuuuucugggcuaugucaaacggcaguugccgcugcaauauuuguaucuga

SEQ ID NO: 138358 - RNA, 1683 nt, Artificial Sequence
  derived and/or modified CDS sequence (opt3) from hemagglutinin__InfluenzaA__AGQ81168
auggagaccgugagccugaucacaauucuccuugucguuacuguguccaacgccgacaagauaugcaucggcuaccagucuacuaauucaaccgaaacaguagauacucugaccgagaacaaugugcccgucacacacgcuagagaauuguuacauaccgagcacaacgggaugcugugugcaacgagucuaggacauccucucauucuggacacaugcaccaucgaaggucuuauuuauggcaauccaagcugugaucuguugcucgggggaagggagugguccuacaucguggagcggccgucugccguuaacggccugugcuaucccgguaauguggaaaaccuggaggaacuccgcucguuauucucaagcgcgcgaaguuaccaacguauacagaucuuuccugacacgauuuggaaugucuccuauucugggacuagcaaggcuuguuccgauucauucuacagaaguaugagguggcugacccagaagggaaacgccuauccaauccaggacgcacaauacacaaauaaccagggcaaaaauauucuuuuuauguggggcaucaaccaucccccuacugauaccgcccagacaaauuuguacacccggacggacacuacaaccagcguggcuacugaggagauaaaccgcacauucaagccacugauugggcccagaccucuaguaaacggacucauggguaggaucaauuauuacuggucuguucugaaaccaggccagacccuucggauuaaguccaacgggaaucugaucgcaccgugguauggacacaucuugucaggcgaaagccacggucgcauucucaagacggaucugaaacgagggaguugcaccgugcaaugucagacagagaagggaggcuuaaacacuacccugcccuuucagaaugucucuaaauacgccuucggcaacugcuccaaguauauagggaugaaaagccucaaacuugcugugggacugagaaaugugccuucgaggucuucccgggguuuguuuggcgccaucgcgggguucauugaaggaggcuggucaggucuagucgcagggugguacggcuuucagcacaguaacgaccaaggaguuggcauggccgcugaucgugacagcacacagaaggccaucgauaaaauaacuuccaaggugaauaacauuguagacaaaaugaauaagcaguaugagaucaucgaccaugaguucucugaaguggagacccgccugaacaugauuaauaacaaaaucgaugaccaaauucaggauauaugggcauacaaugcugaacuccugguccuucuggagaaccagaagacauuggacgaacacgaugccaacgugaauaaccucuacaauaaaguuaagagagcgcuggggagcaacgccguggaggacggaaaggguuguuuugaauuauaucauaaaugcgaugaccaguguauggagaccaucaggaauggcacuuacaaccggcgaaaguaucaagaggaaucaaaacuggagcgccagaagauugaaggggucaaacuagagagugaaggaacguacaagauccucacaaucuauuccaccguggcaagcucucugguaauugcuaugggcuucgccgcuuuucuuuucugggccaugucaaaugguaguugcagaugcaacauauguaucuga

SEQ ID NO: 138359 - RNA, 1683 nt, Artificial Sequence
  derived and/or modified CDS sequence (opt3) from hemagglutinin__InfluenzaA__AGQ81169
auggagaccgugagccugaucacaauucuccuugucguuacuguguccaacgccgacaagauaugcaucggcuaccagucuacuaauucaaccgaaacaguagauacucugaccgagaacaaugugcccgucacacacgcuagagaauuguuacauaccgagcacaacgggaugcugugugcaacgagucuaggacauccucucauucuggacacaugcaccaucgaaggucuuauuuauggcaauccaagcugugaucuguugcucgggggaagggagugguccuacaucguggagcggccgucugccguuaacggccugugcuaucccgguaauguggaaaaccuggaggaacuccgcucguuauucucaagcgcgcgaaguuaccaacguauacagaucuuuccugacacgauuuggaaugucuccuauucugggacuagcaaggcuuguuccgauucauucuacagaaguaugagguggcugacccagaaggacaacgccuauccaauccaggaugcacaauacacaaauaaccaggagaaaaauauucuuuuuauguggggaaucaaccaucccccuacugacaccgugcagacaaauuuguacacccggacggauacuacaaccagcguagccacugaggaaauaaaccgcacauucaagccacugauuggccccagaccucuaguuaacggccucauggggaggaucaauuauuacuggucugugcugaaaccaggacagacccuucggauuaaguccaacgguaaucugaucgcuccgugguauggccacaucuugucaggggagagccacggacgcauucucaagacggaccugaaacgaggcaguugcaccguccaaugucagacagaaaaggguggguuaaacacuacccugcccuuucagaaugugucuaaauacgcauucggaaacugcuccaaguauauaggcaugaaaagccucaaacuugccgugggccugagaaaugucccuucgaggucuucccggggguuguuuggagcuaucgccgguuucauugagggcggguggucaggccuaguugcgggaugguacgguuuucagcacaguaacgaucaaggggugggcauggcagccgaccgugauagcacacagaaggcuaucgacaaaauaacuuccaagguaaauaacauuguggacaaaaugaauaagcaguaugaaaucaucgaucaugaguucucugaggucgaaacccgccugaacaugauuaauaacaaaaucgacgaucaaauucaggacauaugggccuacaaugcagagcuccuggugcuucuggaaaaccagaagacauuggaugagcacgacgcuaacguuaauaaccucuacaauaaagugaagagagcccugggaagcaacgcggucgaagauggcaagggguguuuugaguuauaucauaaaugcgacgaucaguguauggagaccaucaggaauggaacuuacaaccggcgaaaguaucaagaagagucaaaacuggaacgccagaagauugagggugugaaacuagaaagugagggcacguacaagauccucacaaucuauuccaccguagccagcucucugguuauugcaaugggguucgcugccuuucuuuucugggcuaugucaaauggaaguugcagaugcaacauauguaucuga

SEQ ID NO: 138360 - RNA, 1683 nt, Artificial Sequence
  derived and/or modified CDS sequence (opt3) from hemagglutinin__InfluenzaA__AGQ81170
auggagaccgugagccugaucacaauucuccuugucguuacuguguccaacgccgacaagauaugcaucggcuaccagucuacuaauucaaccgaaacaguagauacucugaccgagaacaaugugcccgucacacacgcuagagaauuguuacauaccgagcacaacgggaugcugugugcaacgagucuaggacauccucucauucuggacacaugcaccaucgaaggucuuauuuauggcaauccaagcugugaucuguugcucgggggaagggagugguccuacaucguggagcggccgucugccguuaacggccugugcuaucccgguaauguggaaaaccuggaggaacuccgcucguuauucucaagcgcgcgaaguuaccaacguauacagaucuuuccugacacgauuuggaaugucuccuauucugggacuagcaaggcuuguuccgauucauucuacagaaguaugagguggcugacccagaaggacaacgccuauccaauccaggaugcacaauacacaaauaaccagggaaagaauauucuuuuuauguggggcaucaaccaucccccuacugacaccgcccagacaaauuuguacacccggacggauacuacaaccagcguggcuacugaggagauaaaccgcacauucaagccacugauuggccccagaccucuaguaaacgggcucaugggaaggaucaauuauuacuggucuguucugaaaccaggucagacccuucggauuaaguccaacggcaaucugaucgcaccgugguaugggcacaucuugucaggagaaagccacggccgcauucucaagacggaccugaaacgagguaguugcaccgugcaaugucagacagagaaagggggauuaaacacuacccugcccuuucagaaugucucuaaauacgccuucggcaacugcuccaaguauauaggcaugaaaagccucaaacuugcuguggggcugagaaaugugccuucgaggucuucccggggauuguuuggugccaucgcgggcuucauugaagggggauggucaggccuagucgcagguugguacggguuucagcacaguaacgaucaaggcguuggaauggccgcugaccgugauagcacacagaaggccaucgacaaaauaacuuccaaggugaauaacauuguagacaaaaugaauaagcaguaugagaucaucgaucaugaguucucugaaguggagacccgccugaacaugauuaauaacaaaaucgacgaucaaauucaggacauaugggcauacaaugcugaacuccugguccuucuggagaaccagaagacauuggaugaacacgacgccaacgugaauaaccucuacaauaaaguuaagagagcgcugggcagcaacgccguggaggaugggaagggauguuuugaauuauaucauaaaugcgacgaucaguguauggagaccaucaggaaugguacuuacaaccggcgaaaguaucaagaggaaucaaaacuggagcgccagaagauugaaggcgucaaacuagagagugaagggacguacaagauccucacaaucuauuccaccguggcaagcucucugguaauugcuaugggauucgccgcuuuucuuuucugggccaugucaaauggcaguugcagaugcaacauauguaucuga

SEQ ID NO: 138361 - RNA, 1683 nt, Artificial Sequence; identical to SEQ ID NO: 138360
  derived and/or modified CDS sequence (opt3) from hemagglutinin__InfluenzaA__AGQ81171

SEQ ID NO: 138362 - RNA, 1683 nt, Artificial Sequence; identical to SEQ ID NO: 138360
  derived and/or modified CDS sequence (opt3) from hemagglutinin__InfluenzaA__AGQ81172

SEQ ID NO: 138363 - RNA, 1683 nt, Artificial Sequence
  derived and/or modified CDS sequence (opt3) from hemagglutinin__InfluenzaA__AGQ81173
auggagaccgccagccugaucacaauucuccuuguggucacuguuuccaacgcugacaagauaugcaucggcuaccagucuacuaauucaaccgaaacaguggauacucugaccgagaacaauguacccgugacacacgcaaaagaauuguuacauaccgagcacaacgggaugcugugugccacgagucuaggaaauccucucauucuggacacaugcaccaucgaaggucuuauuuauggcaacccaagcugugaucuguugcucgggggaagagagugguccuacaucgucgagaggccgucugcggugaauggccugugcuaucccgguaacguugaaaaucuggaggaacuccggucguuauucucaagcgcucgcaguuaccaacgaauacagaucuuuccugacacgauuuggaacguguccuauucugggacuagcaaggccuguuccgauucauucuaccguaguaugagauggcugacccagaaagacaaugcauauccaauccaggaugcccaauacacaaacaaucagggaaagaacauucuuuuuauguggggcaucaaucaucccccuacugacaccgcucagacaaacuuguacaccaggacggauacuacaaccagcgucgcaacugaggagauaaaccggacauucaaaccacugauuggcccccgcccucuagugaaugggcucaugggaagaaucaacuauuacuggucuguacugaagccaggucagacccuuaggauuaaguccaauggcaaccugaucgccccgugguaugggcacaucuugucaggagaaagccauggccggauucucaaaacggaccugaagcgcgguaguugcaccguucaaugucagacagagaaagggggauuaaauacuacccugcccuuucagaacgugucuaaguacgcuuucggcaauugcuccaaauauauaggcaugaaaagccucaaacuugccgucgggcugcgaaacgugccuucgagaucuuccaggggauuguuuggugcgaucgcaggcuucauugaagggggauggucaggccuaguggccgguugguacggguuucagcacaguaaugaucaaggcgucggaauggcugccgaccgggauagcacacagaaggcaaucgacaagauaacuuccaagguuaacaauauuguggacaagaugaacaaacaguaugagaucaucgaucacgaguucucugaaguagagacccgucugaauaugauuaacaauaagaucgacgaucaaauucaggacauaugggcuuacaacgccgaacuccuggugcuucuggagaaccagaaaacauuggaugaacaugacgcgaaugucaacaaucucuacaacaaggugaagcgcgcccugggcagcaaugcaguugaggaugggaaaggauguuuugaauuauaucacaagugcgacgaucaguguauggagaccaucagaaacgguacuuacaauaggcggaaauaucaagaggaaucaaagcuggagcgacagaaaauugaaggcgugaagcuagagagugaagggacguacaagauccucacaaucuauuccaccgucgcuagcucucuggugauugccaugggauucgcugccuuucuuuucugggcaaugucaaacggcaguugccgcugcaauauauguaucuga

SEQ ID NO: 138364 - RNA, 1683 nt, Artificial Sequence; identical to SEQ ID NO: 138360
  derived and/or modified CDS sequence (opt3) from hemagglutinin__InfluenzaA__AGQ81175

SEQ ID NO: 138365 - RNA, 1683 nt, Artificial Sequence
  derived and/or modified CDS sequence (opt3) from hemagglutinin__InfluenzaA__AGQ81177
auggagaccgugagccugaucacaauucuccuugucgccacuguuuccaacgcugacaagauaugcaucggcuaccagucuacuaauucaaccgaaacaguggauacucugaccgagaacaauguacccgugacacacgcaaaagaauuguuacauaccgagcacaacgggaugcugugugccacgagucuaggacaaccucucauucuggacacaugcaccaucgaaggucuuauuuauggcaauccaagcugugaucuguugcucgaggggagagagugguccuacaucgucgaaaggccgucugcggugaacggacugugcuaucccggcaauguugagaaccuggaggaacuccggucguuauucucaagcgcucgcaguuaccagcgaauacagaucuuuccugacacgauuuggaauguguccuauaacgguacuucuaaggccuguagcggguccuucuaccguucaaugagauggcugaccaggaaaaauggagauuauccaauccaggacgcacaauacacaaacaaucagggcaagaacauucuuuuuauguggggcaucaaucaucccccuacugauaccacacagcgggacuuguacacccgcacggauacuacaaccagugucgccacugaggaaauaaacagaauuuucaaaccacugaucgggcccaggccucuagugaacggacucaugggucggauugacuauuacuggagcguacugaagccaggccagacacuucgcaucaagucugaugggaaucugaucgcuccgugguauggacacauuuuguccggcgagucacauggucgaauacucaaaaccgaccugaagagagggagcugcacgguucaaugucagaccgaaaaaggaggcuuaaacacaacucugcccuuucagaaugugaguaaguacgcauucggcaacugcucuaaauauaucgggauuaagucccucaaacuugccgucggacugaggaaugugccuagccggucgucucgugguuuguuuggcgcuaucgccggguucauagagggaggcugguccggucuaguggcggggugguacggcuuucagcacucaaacgaucaaggagucggcauggcagccgaccgcgacaguacccagaaggcuauugauaagaucacaagcaaaguuaauaacaucguggacaagaugaauaaacaguaugaaauuaucgaucacgaguucuccgagguagaaacuagacugaacaugauuaauaacaagauagacgaucaaauccaggacauuugggccuacaaugcagagcuccuggugcuucuggaaaaccagaaaaccuuggaugagcaugacgcuaaugucaacaaccucuacaauaaggugaagagggcccuggggucuaacgcgguugaagauggaaaagguuguuuugaguuauaucacaagugcgacgaucaguguauggagacaauccggaauggcaccuacaaccgacgcaaauaucaagaagagagcaagcuggaaagacagaaaaucgagggggugaagcuagaaucagagggaacuuacaagauucucacgauauauaguacagucgccuccagccuggugaucgcaaugggcuucgcugccuuucuuuucugggcuaugucuaaugguucauguaggugcaacauuugcaucuga

SEQ ID NO: 138366 - RNA, 1683 nt, Artificial Sequence; identical to SEQ ID NO: 138365
  derived and/or modified CDS sequence (opt3) from hemagglutinin__InfluenzaA__AGQ81178

SEQ ID NO: 138367 - RNA, 1683 nt, Artificial Sequence; identical to SEQ ID NO: 138357
  derived and/or modified CDS sequence (opt3) from hemagglutinin__InfluenzaA__AGQ81181

SEQ ID NO: 138368 - RNA, 1683 nt, Artificial Sequence; identical to SEQ ID NO: 138357
  derived and/or modified CDS sequence (opt3) from hemagglutinin__InfluenzaA__AGQ81183

SEQ ID NO: 138369 - RNA, 1683 nt, Artificial Sequence; identical to SEQ ID NO: 138356
  derived and/or modified CDS sequence (opt3) from hemagglutinin__InfluenzaA__AGQ81184

SEQ ID NO: 138370 - RNA, 1683 nt, Artificial Sequence
  derived and/or modified CDS sequence (opt3) from hemagglutinin__InfluenzaA__AGQ81185
auggagaccgccagccugaucacaauucuccuuguggcuacugucuccaacgcagacaagauaugcaucggcuaccagucuacuaauucaaccgaaacaguugauacucugaccgagaacaaugugcccguaacacacgccaaagaauuguuacauaccgagcacaacgggaugcugugugcgacgagucuaggacaaccucucauucuggacacaugcaccaucgaaggucuuauuuauggcaauccaagcugugaucuguugcucgaggggagagagugguccuacaucguggaaaggccgucugcugucaacggacugugcuaucccggcaauguggagaaccuggaggagcuccggucguuauucucaagcgcccgcaguuaccagcgaauacagaucuuuccugacacgacuuggaauguuuccuauaacgguaccucuaaggcauguagcggguccuucuaccguucaaugagauggcugacacagaaaaauaguaacuauccaauucaagaugcccaguacacuaauaaccagggaaagaauauccuuuuuauguggggcauuaaccaucccccuaccgacacaacccagagggauuuguacacgcggacugacacaaccacuagcguggcuacagaggaaaucaaccgcauauucaaaccacugauuggccccagaccucuagucaaugggcucaugggaaggaucgauuauuacuggucugugcugaagccaggucaaacccuucggauuaaguccgacggcaaccugaucgcaccgugguaugggcacaucuugucaggagagagccauggccgcauucucaaaacggaucugaagcgagguaguugcaccguacagugucagacagaaaaagggggauuaaauacuacccugcccuuucagaacguuucuaaguacgccuucggcaauugcuccaaauauauaggcaucaagagccucaaacuugcuguggggcugagaaacgucccuucgaggucuucccggggauuguuuggugccauugcgggcuucaucgaagggggauggucaggccuaguggcagguugguacggguuucaacacaguaaugaccagggcgugggaauggccgcugaucgugacagcacacagaaggccauagacaagauuacuuccaaagucaacaauaucguugauaagaugaacaaacaauaugaaaucauugaccacgaguucucugagguggaaacccgccugaauaugaucaacaauaagauugaugaccagauacaggauaucugggcauacaacgcugagcuccugguacuucuggaaaaucagaaaacauuggacgagcaugaugccaacgugaacaaucucuacaacaaggucaagagagcgcugggcagcaaugccguggaagacgggaaaggauguuuugaguuauaucacaagugcgauaaccaauguauggagaccauuaggaaugguacuuacaaccggcgaaaauaucaggaagagucaaagcuggaacgccagaaaaucgagggcguuaagcuagaaagugaggggacguacaagauccucacaauuuauuccaccguggcaagcucucuggucauagcuaugggauucgccgcuuuucuuuucugggccaugucaaauggcaguugcagaugcaacaucuguauuuga

SEQ ID NO: 138371 - RNA, 1683 nt, Artificial Sequence
  derived and/or modified CDS sequence (opt3) from hemagglutinin__InfluenzaA__AGQ81186
auggagaccgugagccugaucacaauucuccuugucgccacuguuuccaacgcugacaagauaugcaucggcuaccagucuacuaauucaaccgaaacaguggauacucugaccgagaacaauguacccgugacacacgcaaaagaauuguuacauaccgagcacaacgggaugcugugugccacgagucuaggacaaccucucauucuggacacaugcaccaucgaaggucuuauuuauggcaauccaagcugugaucuguugcucgaggggagagagugguccuacaucgucgaaaggccgucugcggugaacggacugugcuaucccggcaauguugagaaccuggaggagcuccggucguuauucucaagcgcucgcaguuaccagcgaauacagaucuuuccugacacgauuuggaauguguccuaugaugguacuucuaaggccuguagcggguccuucuaccguucaaugagauggcugacccagaaaaacagugacuauccaauccaagaugcacaguacacaaauaaccagggaaagaauauucuuuuuauguggggcaucaaccaucccccuacugacaccacacagagggauuuguacacccggacggacacuacaaccagcgucgccacugaggaaauaaaucgcauuuucaaaccacugaucggccccagaccucuagugaacgggcucaugggaaggauugauuauuacuggucuguacugaagccaggucaaacacuucggaucaaguccgacggcaaccugaucgcuccgugguaugggcacauuuugucaggagagagccauggccgcauacucaaaaccgaucugaagaaagguaguugcacgguucagugucagaccgaaaaagggggauuaaauacaacucugcccuuucagaacgugucuaaguacgcauucggcaauugcuccaaguauaucggcauuaagagccucaaacuugccaucgggcugcgaaacgucccuucgagaucuuccaggggauuguuuggugcuauagccggcuucauugaagggggauggucaggccuaguggcggguugguacggguuucaacacaguaaugaccagggcgugggaauggcagccgaccgggauagcacccagaaggcuaucgacaaaaucacauccaaggucaacaauauuguugauaaaaugaacaagcaauaugaaaucauugaccacgaguucucugagguggaaacucgucugaauaugauaaacaauaaaaucgaugaccagauucaggauaucugggccuacaacgcagagcuccugguacuucuggaaaaucagaagaccuuggacgagcaugaugcuaacgugaauaaccucuacaacaaggucaaacgcgcccugggcagcaaugcgguggaagacgggaagggauguuuugaguuauaucacaaaugcgaugaccaauguauggagacaaucagaaacgguaccuacaauaggaagaaauaucaggaagagucaaagcuggaacggcagaagauugagggcguuaaacuagaaagugaggggacuuacaagauacucacgaucuauuccacaguggccagcucucuggucauugcaaugggauucgcugccuuucuuuucugggcuaugucaaacggcaguugccgaugcaauaucuguauuuga

SEQ ID NO: 138372 - RNA, 1683 nt, Artificial Sequence; identical to SEQ ID NO: 138360
  derived and/or modified CDS sequence (opt3) from hemagglutinin__InfluenzaA__AGQ81190

SEQ ID NO: 138373 - RNA, 1683 nt, Artificial Sequence; identical to SEQ ID NO: 138360
  derived and/or modified CDS sequence (opt3) from hemagglutinin__InfluenzaA__AGQ81191

SEQ ID NO: 138374 - RNA, 1683 nt, Artificial Sequence; identical to SEQ ID NO: 138365
  derived and/or modified CDS sequence (opt3) from hemagglutinin__InfluenzaA__AGQ81192

SEQ ID NO: 138375 - RNA, 1683 nt, Artificial Sequence
  derived and/or modified CDS sequence (opt3) from hemagglutinin__InfluenzaA__AGQ81193
auggagaccgugagccugaucacaauucuccuugucgccacuguuuccaacgcugacaagauaugcaucggcuaccagucuacuaauucaaccgaaacaguggauacucugaccgagaacaauguacccgugacacacgcaaaagaauuguuacauaccgagcacaacgggaugcugugugccacgagucuaggacaaccucucauucuggacacaugcaccaucgaaggucuuauuuauggcaauccaagcugugaucuguugcucgaggggagagagugguccuacaucgucgaaaggccgucugcggugaacggacugugcuaucccggcaauguugagaaccuggaggaacuccggucguuauucucaagcgcucgcaguuaccagcgaauacagaucuuuccugacacgauuuggaauguguccuauacugguaccucuaaggccuguagcggguccuucuaccguucaaugagauggcugacacagaaaaacggagauuauccaauccaagacgcacaguacacuaauaaccagggcaagaauauucuuuuuauguggggcaucaaccaucccccuaccgauacaacccagagggacuuguacacgcggacugauacaaccacaagugucgccacugaggaaauaaaucgcauuuucaaaccacugaucgggcccagaccucuagugaacggacucauggguaggauugacuauuacuggagcguacugaagccaggccaaacccuucggaucaagucugaugggaaccugaucgcuccgugguauggacacguuuuguccggcgagucacauggucgcauucucaaaacggaccugaagcgagggagcugcaccgugcagugucagacagaaaaaggaggcuuaaauacuacccugcccuuucagaacgucaguaaguacgcauucggcaauugcucuaaauauauagggaucaagucccucaaacuugccgugggacugagaaacgugccuagcaggucgucucgggguuuguuuggcgcuauugccggguucaucgagggaggcugguccggucuagucgcggggugguacggcuuucaacacucaaaugaucagggaguuggcauggcagccgaccgugacaguacacagaaggcuauagauaagauuacuagcaaagugaacaauaucguagacaagaugaacaaacaauaugaaaucauugaucacgaguucuccgagguggaaacccgccugaauaugaucaacaauaagauugacgaucagauacaggacaucugggccuacaacgcagagcuccugguccuucuggaaaaucagaaaacauuggaugagcaugacgcuaacgugaauaaccucuacaacaagguuaagagagcccuggggucuaaugcgguggaagauggaaaagguuguuuugaguuauaucacaagugcgacgaucaauguauggagaccauuaggaacggcacuuacaaucggcgaaaauaucaggaagagagcaagcuggaacgccagaaaaucgagggggucaagcuagaaucagagggaacguacaagauccucacaauuuauaguaccguggccuccagccugguaauagcaaugggcuucgcugccuuucuuuucugggcuaugucuaacgguucaugcagaugcaauaucuguauuuga

SEQ ID NO: 138376 - RNA, 1683 nt, Artificial Sequence; identical to SEQ ID NO: 138360
  derived and/or modified CDS sequence (opt3) from hemagglutinin__InfluenzaA__AGQ81194

SEQ ID NO: 138377 - RNA, 1686 nt, Artificial Sequence
  derived and/or modified CDS sequence (opt3) from hemagglutinin__InfluenzaA__AGQ81195
auguacaagaucguggucauuauaacccugcucggcacaguuaaagggcuugacaagaucugccugggacaccaugccguggcuaacgguacuauuguaaaaacguugaccaaugagcaggaagaggugacaaacgcaacugaaaccgucgagggcaagagcuuaaauagacuguguaugaaagggaggaaccacaaggaucuaggaaauugccaucccaucggcaugcucauugguaccccugccugugaccugcaccuuacagggacuugggauacacugaucgaacgggagaacgcgauagcuuauugcuacccaggagccaccaucaaugaggaagcauugcgccaaaagauuauggaguccggcggcaucucuaaaauuucaacgggguucacuuauggaaguagcaucaacuccgccgguaccacacgagcuuguaugcguaauggcgggaacucuuuuuacgcagaacucaaguggcuggugucgaaaucaaagggacagaauuucccgcagacuaccaacacauauagaaauaccgacacgagcgagcaucugauaauguggggcauucaccaccccaguuccacucaggagaaaaacgaucucuacgguacacaaucuuuaagcaucuccguugggucaaguaccuaucagaauaacuuugugccugucgugggagccaggccacagguaaacggccagagcggccggauugacuuccauuggacucugguucaacccggggauaauaucacauuuucucacaacggaggucuuaucgcuccuucccgcgugucaaaguugauuggcagagggcugggaauacagagcgacgccaguaucgauaauaacugcgaaucuaaguguuucuggaggggcgguuccauuaauacccggcuaccauuucagaaccucagcccccgcacggucgggcagugcccuaaauacgugaauaagcgaucgcugaugcuugcgaccggcaugagaaacgugccagagaucaugcaaggaaggggccuguucggggcaauagccggauuuauugaaaaugguugggagggcauggucgacgggugguacggauuccggcaucagaacgcucagggcacaggucaagccgcagauuauaaaucuacucaggcugccaucgaccagaucaccgggaaguugaaucgucucauugagaaaacaaacacugaauuugaguccaucgaaucagaguucagugaaauugagcaccagauaggcaauguuaucaacuggaccaaggauagcauuacagacaucuggaccuaccaagcggaacuguuaguggccauggagaaucagcacacuaucgacauggcagauuccgagaugcugaaccucuaugaacgcguaagaaaacagcuuaggcagaacgcugaggaagacggaaagggcuguuuugagauuuaccaugccugcgaugacucuuguauggaaagcauacggaauaacacguaugaucacucacaauaccgagaggaggcucuguugaaucgccuaaacaucaauccggugacacugaguuccggguauaaggacauuauccucugguucagcuucggagccucuugcuuuguccugcuugcagugguuaugggucugguguucuuuugcuugaaaaacggcaauaugagauguaccauuugcaucuga

SEQ ID NO: 138378 - RNA, 1686 nt, Artificial Sequence
  derived and/or modified CDS sequence (opt3) from hemagglutinin__InfluenzaA__AGQ81196
auguacaagaucguggucauuauagcccugcucggcgcuguuaaagggcuugacaagaucugccugggacaccaugcaguggccaacgguaccauuguaaaaacauugacuaaugagcaggaagaggugacgaacgcgaccgaaacagucgagagcgcuuccuuaaauagacuguguaugaagggcaggucucacaaagaucuagggaacugccaucccaucggaaugcucauuggcacuccugccugugaccugcaccuuaccgguacaugggauacccugaucgaacgggagaaugcaauagccuauugcuacccaggggcuacugugaacgaggaagcauugcgccaaaagaucauggagucaggaggcauuaguaagaucagcacaggcuucaccuauggguccucuauuaauucggccggaacgacuaaggcuuguaugcgaaaccgugguaauucauuuuacgccgaacucaaauggcugguuagcaaaaguaagggccagaacuucccgcagaccacaaauacuuauagaaacaccgacacagcggagcaucugaucaugugggggauacaccaccccuccucuacccaggagaaaaaugaucucuacggaacgcagagcuuauccauuucagugggcaguagcacuuaucaaaacaauuuugucccugugguaggugcaaggccacagguuaacgggcagucuggacggaucgacuuccauuggacacuggugcaacccggcgauaacauuaccuuuucccacaauggcgggcuuaucgccccuucacgcgucagcaaguuggugggaagaggucugggcauccagagugacgcuccaauugauaacaauugcgaaucuaaguguuucuggaggggaggguccauaaacacucggcuacccuuucagaaucucagcccucgcacagugggccagugcccaaaauacgucaacaagcgaucgcugaugcuugccaccgguaugagaaauguuccggagaucaugcaagggaggggccuguucggagcaauugcuggcuuuaucgaaaacgggugggagggaaugguggacgguugguacggcuuccggcaucagaaugcccaggggacgggacaagcggccgauuauaaaucuacccagacagcaauagaccagauuacuggcaaguugaaccgucucaucgagaaaaccaauacagaauuugaguccaucgaaucagaguucagugaaauugagcaccagaucgguaacguaauuaauuggacuaaggauagcauaaccgacaucuggacauaccaagcugaacuguuaguggccauggagaaccagcacaccauugacauggcugauuccgagaugcugaaucucuaugaacgcgucagaaaacagcuuaggcagaacgccgaggaagacgggaagggcuguuuugagaucuaccaugcaugcgaugacucuuguauggaaagcauccggaacaauacuuaugaucacucacaauaccgagaggaggcccuguugaaccgccuaaauauuaaccccgugaagcugaguuccggauauaaagacauaauccucugguucagcuucggcgcuucuugcuuuguucugcuugcgguggucauggggcugguguucuuuugcuugaagaauggaaacaugagauguacgauuugcaucuga

SEQ ID NO: 138379 - RNA, 1686 nt, Artificial Sequence
  derived and/or modified CDS sequence (opt3) from hemagglutinin__InfluenzaA__AGQ81198
auguacaagaucguggucauuauagcccugcucggcgcuguuaaagggcuugacaagaucugccugggacaccaugcaguggccaacgguaccauuguaaaaacauugacuaaugagcaggaagaggugacgaacgcgaccgaaacagucgagagcacuuccuuaaauagacuguguaugaagggcaggaaccacaaagaucuagggaauugccaucccaucggaaugcucauuggcaccccugcuugugaccugcaccuuacagguaccugggauacucugaucgaacgggagaacgccauagcauauugcuacccaggggccacaaucaaugaggaggcuuugcgccaaaagauuauggaaucuggaggcaucucaaagauuaguaccggcuucacguaugggagcuccaucaacucugcaggaaauacuaaagccuguaugcgaaacgguggcaauucguuuuacgcugaacuccguuggcuggugucaaagaacaaagggcagaauuucccgcagaccacaaacacuuauagaaauaccgacacagccgagcaucugauaauuuggggaauccaccaccccagcaguaccaaggagaaaaacgaucucuacggcacgcaguccuuaucuauuagcguugguuccucaacuuaucaaaacaauuuugugccugucgugggggcgaggccacagguaaacggacagaguggccggaucgacuuccauuggacacugguucagcccggcgauaauaucaccuuuagccacaacgggggacuuauugcaccuucucgcguguccaaguugauagguagaggccuggggauccaaucagacgccccaauugauaauaacugcgaaagcaaguguuucuggaggggaggcaguaucaauacucggcuacccuuucagaaccucucuccucgcacagucggucagugcccaaaauacgugaauaagaaaucccugaugcuugcuaccgggaugcgaaacgugccggagauaaugcagggcagaggacuguucggcgccauugcaggguuuaucgaaaauggaugggaggguauggucgacggcugguacggguucaggcaucaaaacgcucagggaacgggccaggccgcggauuauaagagcacccaagccgcaaucgaccagauuacagguaaauugaaucggcucaucgaaaagacuaacaccgaguuugagucgauugaaucugaguucuccgaaauagagcaccagaucgggaauguuauuaacuggacaaaagauucaaucacugacaucuggaccuaccaggcugaacuguuaguggccauggagaaccaacacacaauugacauggcugauagugagaugcugaaucucuaugaacguguacgcaagcagcuuagacagaacgccgaggaagacggcaagggauguuuugagauauaccaugcaugcgaugacagcuguauggaauccaucaggaauaacaccuaugaucacucucaguaccgggaggaggcccuguugaaucgacuaaacauuaaucccgugacucugagcucaggcuauaaagacaucauucucugguucaguuucggggcuuccugcuuuguccugcuugcggugguuaugggacugguguucuuuugcuugaagaacgguaauaugcgcuguacgaucugcauauga

SEQ ID NO: 138380 - RNA, 1686 nt, Artificial Sequence
  derived and/or modified CDS sequence (opt3) from hemagglutinin__InfluenzaA__AGQ81199
auguacaagaucguggucauuauagcccugcucggcgcuguuaaagggcuugacaagaucugccugggacaccaugcaguggccaacgguaccauuguaaaaacauugacuaaugagcaggaagaggugacgaacgcgaccgaaacagucgagagcgcuuccuuaaauagacuguguaugaagggcaggucucacaaagaucuagggaacugccaucccaucggaaugcucauuggcacuccugccugugaccugcaccuuaccgguacaugggauacccugaucgaacgggagaaugcaauagccuauugcuacccaggggcuacugugaacgaggaagcauugcgccaaaagaucauggagucaggaggcauuaguaagaucagcacaggcuucaccuauggguccucuauuaauucggccggaacgacuaaggcuuguaugcgaaacgguggcaauucauuuuacgccgaacucaaauggcugguuagcaaaaguaaggggcagaacuucccgcagaccacaaauacuuaucguaacaccgacacagcggagcaucugaucauguggggaauacaccaccccuccucuacccaggagaaaaaugaucucuacggcacgcagagcuuauccauuucaguggguaguagcacuuaucaaaacaauuuugucccugugguaggggcaagaccacagguuaacggacagucuggcaggaucgacuuccauuggacacuggugcaacccggcgauaacauuaccuuuucccacaaugggggacuuaucgccccuucacgggucagcaaguuggugggucgcggccuggggauccagagugacgcuccaauugauaacaauugcgaaucuaaguguuucuggagaggaggcuccauaaacacuaggcuacccuuucagaaucucagcccucggacagugggucagugcccaaaauacgucaacaagcgcucgcugaugcuugccaccgggaugcgaaauguuccggagaucaugcaaggcagaggacuguucggcgcaauugcuggguuuaucgaaaacggaugggaggguaugguggacggcugguacggguucaggcaucagaaugcccagggaacgggccaagcggccgauuauaaaucuacccagacagcaauagaccagauuacugguaaguugaaccggcucaucgagaaaaccaauacagaauuugaguccaucgaaucagaguucagugaaauugagcaccagaucgggaacguaauuaauuggacuaaggauagcauaaccgacaucuggacauaccaagcugaacuguuaguggccauggagaaccagcacaccauugacauggcugauuccgagaugcugaaucucuaugaacguguccgcaaacagcuuagacagaacgccgaggaagacggcaagggauguuuugagaucuaccaugcaugcgaugacucuuguauggaaagcaucaggaacaauacuuaugaucacucacaauaccgggaggaggcccuguugaaccgacuaaauauuaaccccgugaagcugaguuccggcuauaaagacauaauccucugguucagcuucggggcuucuugcuuuguucugcuugcgguggucaugggacugguguucuuuugcuugaagaaugguaacaugcgcuguacgauuugcaucuga

SEQ ID NO: 138381 - RNA, 1698 nt, Artificial Sequence
  derived and/or modified CDS sequence (opt3) from hemagglutinin__InfluenzaA__AGQ81200
augaagaaaacccuccuguucgccgcuaucuuucuuuacgugaaggcagacgagauuugcauaggcuaucugagcaacaauuccacagauaaagucgacacuaucauugaaaacaauguuacggugaccucuucaguagaguugguggaaacagagcacacugggaguuucuguagcaucaacggaaagcagcccauugguuuaggcgauugcuccuuugccggguggauccugggaaauccuaugugugacgaucuaauaggcaaaaccucuuggucguacaucgucgaaaagccaaacccggcgaaugguauuugcuaucccgggacacucgagaacgaggaggagcugagacuuaaguucucaggagugcuggaauuuagcaaauucgaggcuuuuaccaguacuggcuggggcgccguuaauuccggggcaggagugacagccgcuuguaaguucgguucuagcaacuccuuuuucaggaauauggucugguugauccaucaaucaggcaccuacccugugauuaaacggacguuuaacaauacuaaggggcgcgacguacucguuguguggggaauccaccauccagcaacccugaaagagcaccaggaucuguauaagaaggacaguagcuacgucgccgugggcucugaaacauauaaccgacguuucauacccgagauuuccacuagaccuaaagugaauggucaggcugggaggaugaccuuuuacuggacaaucgucaagccaggagaaucaauuaccuucgagagcaacggcgccuuccucgcgccccgguacgcauuugaaaucguuagugugggcaacgggaaauuauuccgcucugagcugaauaucgaguccugcagcacgaagugucagacugaaauuggagguauaaacacaaauaaaucguuucauucuguacacagaaacaccaucggcgauugcccuaaguaugugaaugucaaaucccuuaaguuggccacugggcugaggaacgugccagcuauugccucacggggacuauucggcgcaaucgcugguuuuauagaagggggcuggccgggacucauuaauggcugguacggguuccaacaccgcaacgaagagggaacagguaucgccgcggacaaggaaaguacccagaaagccaucgaucagauuacgagcaagguuaauaacaucguggacaaaaugaauaccaacuuugaguccguccagcaugaguucucugaaauugaggaacgaauaaaucaacugagcaagcacguggaugacucaguaguugacaucuggaguuauaacgcacagcuucugguguugcucgagaaugagaaaacacuggauuuacaugacuccaacgucagaaaccugcacgaaaaggugaggcggaugcucaaggauaaugcuaaagacgagggcaacggguguuuuacuuucuaccacaagugcgauaaugaauguauugagcguguccgcaacggaaccuaugaccauaaagaauuugaggaggaaagcaagaucaauagacaggagaucgaaggcgugaaacuugauucuucagguaacguuuacaagauucugaguauauauagcugcaucgccuccucuuuggugcuagcugcccugauuaugggguucauccucugggcaugcucgaauggcagcuguaggugcacaauuuguaucuga

SEQ ID NO: 138382 - RNA, 1698 nt, Artificial Sequence
  derived and/or modified CDS sequence (opt3) from hemagglutinin__InfluenzaA__AGQ81202
augaagaaaacccuccuguucgccgcuaucuuucuuuacgugaaggcagacgagauuugcauaggcuaucugagcaacaauuccacagauaaagucgacacuaucauugaaaacaauguuacggugaccucuucaguagaguugguggaaacagagcacacugggaguuucuguagcaucaacggaaagcagcccauuuccuuaggugauugcucuuuugccggcuggauccuggggaauccuaugugugacgaucuaauaggaaaaaccucguggucauacaucgucgaaaagccaaacccggcgaauggcauuugcuaucccgguacacucgagaacgaggaggaacugagacuuaaguucagcggggugcuggaauuuaguaaauucgaggcuuuuaccuccaauggauggggcgccguuaacucuggcgcaggggugacugccgcuuguaaguucggaagcuccaauucauuuuucaggaacacagucugguugauccaucaaagugguaccuacccugugauuaaacggacguuuaauaacacuaagggccgcgacguacucguuguguggggaguccaccauccagcaacccugaaagagcaccaggaucuguauaagaaggacagcucuuacguggccgugggguccgaaacauauaaucgacguuucauccccgagauaucaacuagaccuaaagucaacggccaggcugguaggaugaccuuuuacuggacaauuguuaagccaggggaaagcaucaccuucgagaguaacggagccuuccucgcgccccgguacgcauuugaaauugugucuguaggcaauggcaaauuauuccgcuccgagcugaacaucgagagcugcucgacgaagugucagacugaaaucgggggaauuaauacaaacaaaucuuuucauuccgugcacagaaauaccauaggugauugcccuaaguaugucaacgugaaaucacuuaaguuggccacuggccugaggaauguuccagcuaucgccagucgggggcuauucggagcaauugcuggcuuuaucgaggguggguggccgggccucauaaacggaugguacggcuuccaacaccgcaaugaagaggggacaggaauugccgcggacaaggaaagcacccagaaagccaucgaucagaucacguccaaggugaacaauauugucgaccgaaugaacaccaauuuugagucugugcagcaugagagcucagaaaucgaggaaagaauuaaccaacugaguaaacacguagaugacuccaugguugacauauggagcuauaaugcacagcuucugguguugcucgagaacgaaaagacacuggauuuacaugacucuaacgucaggaaucugcacgagaaagugcggcguaugcucaaggauaacgcuaaggacgaggguaauggcuguuucacuuuuuaccacaaaugcgauaacaaguguaucgaacgcgucagaaaugggaccuaugaccauaaagaguucgaagaggagucaaagauuaacaggcaggaaaucgagggagugaaacuugauaguagcggcaauguuuacaagauccuguccauuuauucuugcauagccucgagcuuggugcuagcugcccugaucauggguuuuauucucugggcaugcuccaacgggucaugucggugcacaaucuguauuuga

SEQ ID NO: 138383 - RNA, 1698 nt, Artificial Sequence
  derived and/or modified CDS sequence (opt3) from hemagglutinin__InfluenzaA__AGQ81203
augaagaaaacccuucucuucgccgcuaucuuucuuuacgugaaggcagacgagauuugcauaggcuaucugagcaacaauuccacagauaaagucgacacuaucauugaaaacaauguuacggugaccucuucaguagaguugguggaaacagagcacacugggaguuucuguagcaucaacggaaagcagcccauuuccuuaggugauugcucuuuugccggcuggauccuggggaauccuaugugugacgaucuaauaggaaaaaccucguggucauacaucgucgaaaagccaaacccggcgaauggcauuugcuaucccgguacacucgagaacgaggaggaacugagacuuaaguucagcggggugcuggaauuuaauaaauucgaggcuuuuaccaguaacggauggggcgccguuaauuccggcgcaggggugacugccgcuuguaaguucggaucuagcaacuccuuuuucaggaauauggucugguugauccaucaaucagguacauacccugugauuaaacggaccuuuaacaauacgaagggccgcgacguacucguugugugggggauccaccauccagcaacucugaaagagcaccaggaucuguauaagaaggacaguagcuacgucgccgugggaucugaaaccuauaaccgacguuucauacccgagauuuccacaagaccuaaagugaacggccaggcugguaggaugacuuuuuacuggaccaucgucaagccaggggaaucaauuacauucgagagcaauggagccuuccucgcgccccgguacgcauuugaaaucguuagugugggcaacggcaaauuauuccgcucugagcugaauaucgaguccugcagcaccaagugucagacggaaauugggggaauaaacacuaauaaaucguuucauucuguacacagaaacacaaucggugauugcccuaaguaugugaaugucaaaucccuuaaguuggccaccggccugaggaacgugccagcuauugccucacgggggcuauucggagcaaucgcuggcuuuauagaggguggguggccgggccucauuaauggaugguacggcuuccaacaccgcaacgaagaggggacuggaaucgccgcggacaaggaaaguacacagaaagccaucgaucagauuaccagcaagguuaauaacaucguggaccgaaugaauacgaacuuugaguccguccagcaugaguucucugaaauugaggaaagaauaaaucaacugagcaaacacguggaugacucaguaguugacaucuggaguuauaacgcacagcuucugguguugcucgagaacgaaaagacccuggauuuacaugacuccaaugucaggaaccugcacgagaaagugcggcguaugcucaaggauaaugcuaaggacgaggguaacggcuguuuuacauucuaccacaaaugcgauaaugaauguauugagcgcgucagaaacgggacuuaugaccauaaggaauuugaggaggaaagcaaaaucaauaggcaggagaucgaaggagugaagcuggauucuucaggcaacguuuacaaaauucugaguauauauagcugcaucgccuccucuuuggugcuagcugcccugauuauggguuucauccucugggcaugcucgaaugggagcugucggugcaccauuuguaucuga

SEQ ID NO: 138384 - RNA, 1698 nt, Artificial Sequence
  derived and/or modified CDS sequence (opt3) from hemagglutinin__InfluenzaA__AGQ81204
augaagaaaacccuucucuucgccgcuaucuuucuuuacgugaaggcagacgagauuugcauaggcuaucugagcaacaauuccacagauaaagucgacacuaucauugaaaacaauguuacggugaccucuucaguagaguugguggaaacagagcacacugggaguuucuguagcaucaacggaaagcagcccauuuccuuaggugauugcucuuuugccggcuggauccuggggaauccuaugugugacgaucuaauaggaaaaaccucguggucauacaucgucgaaaagccaaacccggcgaauggcauuugcuaucccgguacacucgagaacgaggaggaacugagacuuaaguucagcggggugcuggaauuuaauaaauucgaggcuuuuaccaguaacggauggggcgccguuaauuccggcgcaggggugacugccgcuuguaaguucggaucuagcaacuccuuuuucaggaauauggucugguugauccaucaaucagguacauacccugugauuaaacggaccuuuaacaauacgaagggccgcgacguacucguugugugggggauccaccauccagcaacucugaaagagcaccaggaucuguauaagaaggacaguagcuacgucgccgugggaucugaaaccuauaaccgacguuucauacccgagauuuccacaagaccuaaagugaacggccaggcugguaggaugacuuuuuacuggaccaucgucaagccaggggaaucaauuacauucgagagcaauggagccuuccucgcgccccgguacgcauuugaaaucguuagugugggcaacggcaaauuauuccgcucugagcugaauaucgaguccugcagcaccaagugucagacggaaauugggggaauaaacacuaauaaaucguuucauucuguacacagaaacacaaucggugauugcccuaaguaugugaaugucaaaucccuuaaguuggccaccggccugaggaacgugccagcuauugccucacgggggcuauucggagcaaucgcuggcuuuauagaggguggguggccgggccucauuaauggaugguacggcuuccaacaccgcaacgaagaggggacuggaaucgccgcggacaaggaaaguacacagaaagccaucgaucagauuaccagcaagguuaauaacaucguggaccgaaugaauacgaacuuugguuccguccagcaugaguucucugagauugaagagagaauaaaucaacugagcaaacacguggaugacucaguaguugacaucuggaguuauaacgcacagcuucugguguugcucgaaaacgagaagacccuggauuuacaugacuccaaugucaggaaccugcacgaaaaagugcggcguaugcucaaggauaaugcuaaggacgagggcaacggguguuuuacauucuaccacaaaugcgauaaugaguguauugaacgcgucagaaacggaacuuaugaccauaaggaguuugaagaggagagcaaaaucaauaggcaggaaaucgagggcgugaagcuggauucuucagguaacguuuacaaaauucugaguauauauagcugcaucgccuccucuuuggugcuagcugcccugauuaugggguucauccucugggcaugcucgaauggcagcugucggugcaccauuuguaucuga

SEQ ID NO: 138385 - RNA, 1698 nt, Artificial Sequence
  derived and/or modified CDS sequence (opt3) from hemagglutinin__InfluenzaA__AGQ81205
augaagaaaacccuucucuucgccgcuaucuuucuuuacgugaaggcagacgagauuugcauaggcuaucugagcaacaauuccacagauaaagucgacacuaucauugaaaacaauguuacggugaccucuucaguagaguugguggaaacagagcacacugggaguuucuguagcaucaacggaaagcagcccauuuccuuaggugauugcucuuuugccggcuggauccuggggaauccuaugugugacgaucuaauaggaaaaaccucguggucauacaucgucgaaaagccaaacccggcgaauggcauuugcuaucccgguacacucgagaacgaggaggaacugagacuuaaguucagcggggugcuggaauuuaauaaauucgaggcuuuuaccaguaacggauggggcgccguuaauuccggcgcaggggugacugccacauguaaguucggaucuagcaacuccuuuuucaggaauauggucugguugauccaucaaucagguaccuacccugugauuaaacggacguuuaacaauacuaagggccgcgacguacucguugugugggggauccaccauccagcuacccugaaagagcaccaggaucuguauaagaaggacaguagcuacgucgcagugggaucugaaacauauaaccgacguuucauacccgagauuuccacuagaccuaaagugaacggccaggccgguaggaugaccuuuuacuggacaaucgucaagccaggggaaucaauuaccuucgagagcaauggagcuuuccucgcgccccgguacgccuuugaaaucguuagugugggcaacggcaaauuauuccgcucugagcugaauaucgaguccugcagcacgaagugucagacugaaauugggggaauaaacacaaauaaaucguuucauucuguacacagaaacaccaucggugauugcccuaaguaugugaaugucaaaucccuuaaguuggcaacuggccugaggaacgugccagccauugcuucacgggggcuauucggagccaucgcaggcuuuauagaggguggguggccgggccucauuaauggaugguacggcuuccaacaccgcaacgaagaggggacaggaaucgcugccgacaaggaaaguacccagaaagcgaucgaucagauuacgagcaagguuaauaacaucguggaccgaaugaauaccaacuuugaguccguccaguaugaguucucugaaauugaggaaagaauaaaucaacugagcaaacauguggaugacucaguaguugacaucuggaguuacaacgcccagcuucugguguugcucgagaacgaaaagacacuggauuuacacgacuccaaugucaggaaccugcaugagaaagugcggcguaugcucaaggauaaugcaaaggacgaggguaacggcuguuuuacuuucuaucacaaaugcgauaaugaauguauugagcgcgucagaaacgggaccuacgaccacaaggaauuugaggaggaaagcaaaaucaauaggcaggagaucgaaggagugaagcuggauucuucaggcaacguuuauaaaauucugaguauauacagcugcaucgcuuccucuuuggugcuagccgcucugauuauggguuucauccucugggccugcucgaaugggagcugucggugcacaauuuguaucuga

SEQ ID NO: 138386 - RNA, 1698 nt, Artificial Sequence
  derived and/or modified CDS sequence (opt3) from hemagglutinin__InfluenzaA__AGQ81206
augaagaaaacccuucucuucgccgcuaucuuucuuuacgcaaaggccgacgagauuugcauaggcuaucugagcaacaauuccacagauaaaguggacacuaucauugaaaacaaugucacgguuaccucuucaguggaguugguagaaacagagcacacugggaguuucuguagcaucaacggaaagcagcccauuuccuuaggugauugcucuuuugcgggcuggauccuggggaauccuaugugugacgaucuaauaggaaaaaccucguggucauacaucguggaaaagccaaacccggcuaauggcauuugcuaucccgguacacucgagaacgaggaggaacugagaagcaaguucagugggguccuugaauuuuccaaauucgaggccuuuaccucuaauggauggggcgcagugaacagcggcgccgggguuacugcugcauguaaguucggauccucaaauaguuucuucaggaacaugguguggcugauccaucaaagcgguacauacccugucauuaaacggaccuuuaauaacacgaagggccgcgacguguugguaguuugggggauccaccauccagccacucucaaagagcaccaggaucuguauaagaaggacucuuccuacguggcugucggaucagaaaccuauaaucgacguuucauacccgagauuagcacaagaccuaaagugaacggccaggccgguaggaugacuuuuuacuggaccaucgugaagccagaagagaguauuacauucgaaucuaacggggcguuccuggcaccccgguacgccuuugagaucgucuccguuggaaauggcaaacucuuccgcagcgaguuaaacaucgaaucgugcucuaccaagugucagacggagauuggcgggauaaauacuaacaaauccuuucauucagugcacagaaauacaaucggagauugcccuaaguauguaaacgugaaaagucugaagcuggcuaccgguuugaggaaugucccagccauugcaagccggggccuguucggggcuaucgccggauuuauagaaggcgguuggccggggcuaauuaacggcugguacggauuccaacaccgcaaugaggaaggcacugggaucgcggccgacaaggaguccacacagaaagcaaucgaucagauuaccucuaaggugaacaauaucguugaccgaaugaacacgaauuuugagagcgugcagcaugaauuuucagagauugaagagagaauaaaccaacucaguaaacacgucgaugacuccgugguagacaucuggagcuauaaugcucagcugcuuguucuguuggaaaacgagaagacccucgaucugcaugacucuaacgugaggaauuuacacgagaaaguccggcguaugcugaaggauaacgccaaggacgaaggaaaugguuguuuuacauucuaccacaaaugcgauaacgaguguauugaacgcgugagaaauggcacuuaugaccauaaggaguuugaggaagagucaaaaaucaacaggcaggaaaucgagggggucaagcucgauaguagcggaaauguguacaaaauucuuuccauauauucuugcaucgcuucgagccugauuuuggccgcacuaaucaugggcuucauucugugggccugcuccaacgguucaugucggugcaccaucuguauauga

SEQ ID NO: 138387 - RNA, 1698 nt, Artificial Sequence
  derived and/or modified CDS sequence (opt3) from hemagglutinin__InfluenzaA__AGQ81209
augaagaaaacccuucucuucgccgcuaucuuucuuuacgugaaggcagacgagauuugcauaggcuaucugagcaacaauuccacagauaaagucgacacuaucauugaaaacaauguuacggugaccucuucaguagaguugguggaaacagagcacacugggaguuucuguagcaucaacggaaagcagcccauuuccuuaggugauugcucuuuugccggcuggauccuggggaauccuaugugugacgaucuaauaggaaaaaccucguggucauacaucgucgaaaagccaaacccggcgaauggcauuugcuaucccgguacacucgagaacgaggaggaacugagacuuaaguucagcgggauccuggaauuuaguaaauucgaggcuuuuaccuccaauggauggggcgccgugaacucuggcgcagggguuacugccgcuuguaaguucggaagcuccaauucauuuuucaggaacauggugugguugauucaucaaagugguacauacccugucaucaaacggaccuuuaauaacacgaagggccgcgacgugcucauaguaugggggauucaccauccagcaacucugaaagagcaccaggaucuguauaagaaggacagcucuuacguugccgugggauccgaaaccuauaaucgacguuucauccccgagauuucaacaagaccuaaagucaacggccaggcugguaggaugacuuuuuacuggaccaucgugaagccaggggaaagcaucacauucgagaguaacggagccuuccucgcgccccgguacgcauuugaaauugugucugucggcaauggcaaauuauuccgcuccgagcugaacauagagagcugcucgaccaagugucagacggaaaucgggggaauuaauacuaacaaaucuuuucauuccguucacagaaauacaaucggugauugcccuaaguaugugaacguaaaaucacuuaaguuggccaccggccugaggaaugugccagcuauagccagucgggggcuauucggagcaauugcuggcuuuaucgaggguggguggccgggccucaucaacggaugguacggcuuccaacaccgcaaugaagaggggacuggaauugccgcggacaaggaaagcacacagaaagccaucgaucagauuaccuccaaggucaacaauauaguggaccgaaugaacacgaauuuugagucuguucagcaugaguucagcgaaaucgaggaaagaauuaaccaacugucaaaacacguggaugacagugucguggacaucugguccuauaaugcacagcuucugguauugcucgagaacgaaaagacccuggauuuacaugacagcaacguuaggaaucugcacgagaaagugcggcguaugcucaaggauaacgcuaaggacgaggguaauggcuguuuuacauucuaccacaaaugcgauaacgaauguaucgagcgcgucagaaaugggacuuaugaccauaaggaauuugaggaggaaucuaaaauuaacaggcaggagauagaaggagugaagcuggauucaaguggcaaugucuaccggauccugagcauuuauuccugcaucgccucuucguuggugcuagcugcccugauuauggguuucauccucugggcaugcagcaacggguccugucgaugcaccauauguaucuga

SEQ ID NO: 138388 - RNA, 1698 nt, Artificial Sequence
  derived and/or modified CDS sequence (opt3) from hemagglutinin__InfluenzaA__AGQ81211
augaagaaaacccuucucuucgccgcuaucuuucuuuacgugaaggcagacgagauuugcauaggcuaucugagcaacaauuccacagauaaagucgacacuaucauugaaaacaauguuacggugaccucuucaguagaguugguggaaacagagcacacugggaguuucuguagcaucaacggaaagcagcccauuuccuuaggugauugcucuuuugccggcuggauccuggggaauccuaugugugacgaucuaauaggaaaaaccucguggucauacaucgucgaaaagccaaacccggcgaauggcauuugcuaucccgguacacucgagaacgaggaagaacugagacuuaaguucagcggggugcuggaauuuaguaaauucgaggcuuuuaccuccaauggauggggcgccguuaacucuggcgcaggggugacugccgcuuguaaguucggaagcuccaauucauuuuucaggaacauggucugguugauccaucaaagugguacauacccugugauuaaacggaccuuuaauaacacgaagggccgcgacguacucaucguuugggggauacaccauccagcaacucugaaagagcaccaggaucuguauaagaaggacagcucuuacguggccgucggauccgaaaccuauaaucgacguuucauucccgagaucucaacaagaccuaaagugaacggccaggcugguaggaugacuuuuuacuggaccauugugaagccaggggaaagcaucacauucgagaguaacggagccuuccucgcgccccgguacgcauuugaaaucgucucuguuggcaauggcaaauuauuccgcuccgagcugaacauugagagcugcucgaccaagugucagacggaaauagggggaaucaauacuaacaaaucuuuucauuccgugcacagaaauacaauuggugauugcccuaaguauguaaacgugaaaucacuuaaguuggccaccggccugaggaaugucccagcuaucgccagucgggggcuauucggagcaauagcuggcuuuauugaggguggguggccgggccucaucaacggaugguacggcuuccaacaccgcaaugaagaggggacuggaaucgccgcggacaaggaaagcacacagaaagccauugaucagaucaccuccaaggugaacaauauuguugaccgaaugaacacgaauuuugagucugugcagcaugaguucagcgaaauagaggaaagaaucaaccaacugucaaaacacgucgaugacagugugguagacauuugguccuauaaugcacagcuucugguuuugcucgagaacgaaaagacccuggauuuacaugacuuuaacgugaggaaucugcacgagaaaguccggcguaugcucaaggauaacgcuaaggacgaggguaauggcuguuucacauuuuaccacaaaugcgauaacgaauguaucgagcgcgugagaaaugggacuuaugaccauaaggaguucgaggaggaaagcaaaaucaacaggcaggagauugaaggagucaagcuggauucuucaggcaauguguaccggauacugaguaucuauagcugcauugccuccucuuugguucuagcugcccugaucauggguuuuauucucugggcaugcucgaacgggagcugucgaugcaccaucuguauauga

SEQ ID NO: 138389 - RNA, 1698 nt, Artificial Sequence
  derived and/or modified CDS sequence (opt3) from hemagglutinin__InfluenzaA__AGQ81213
augaagaaaacccuucucuucgccgcuaucuuucuuuacgugagagcagacgagauuugcauaggcuaucugagcaacaauuccacagauaaggucgacacuaucauugaaaacaauguuacggugaccucuucaguagaguugguggaaacagagcacacugggaguuucuguagcaucaacggaaaacagcccauuuccuuaggugauugcucuuuugccggcuggauccuggggaauccuaugugugacggacuaauaggcaagaccucguggucauacaucgucgaaaaaccaaacccggcgaaugguauuugcuaucccgggacacucgagaacgaggaggaacugaggcuuaaguucagccgggugcuggaauuuaguaaguucgaggcuuuuaccuccaauggauggggcgccguuaacucuggcgcaggggugacugccgcuuguaaauucggaagcuccaauucauuuuuccgcaacauggucugguugauccaucaaagugguacauacccugugauuaagcgaaccuuuaauaacacgaaaggccgugauguacucguugugugggggauccaccauccagcaacucugaaggagcaccaggaccuguauaaaaaggauagcucuuacgucgccgugggauccgaaaccuauaauagaagguucauacccgagauuucaacacggccuacugugaacggccaggcuggucgcaugaccuuuuacuggacaaucgucaagccaggggaaagcauuaccuucgagaguaacggagccuuccucgcgcccagauacgcauuugaaaucguuucugugggcaauggcaaauuauucagguccgagcugaacaucgagagcugcucgacgaagugucagacugaaauugggggaauaaauacaaacaaaucuuuucauuccguacaccggaauaccaucggugacugcccuaaguaugugaacgucaaaucacuuaaguuggccacuggccugcgcaaugugccagcuauugccagucgagggcuauucggagcaaucgcuggcuuuauagaggguggguggccgggccucauuaacggaugguacggcuuccaacacagaaaugaagaggggacaggaaucgccgcggauaaagaaagcacccagaaggccaucgaccagauuacguccaagguuaacaauaucguggauaggaugaacaccaauuuugagucuguccagcaugaguucagcgaaauugaggaacggauaaaccaacugucaaaacacguggacgauaguguaguugacaucugguccuauaaugcacagcuucugguguugcucgagaacgaaaagacacuggacuuacaugauagcaacguccguaaucugcacgagaaagugcgcagaaugcucaaggacaacgcuaaagaugaggguaauggcuguuuuacuuucuaccacaagugcgacaacgaauguauugagaggguccggaaugggaccuaugaucauaaggaauuugaggaggaaucuaaaaucaaccgacaggagaucgaaggagugaagcuggacucaaguggcaauguuuacaaaauucugagcauauauuccugcaucgccucuucguuggugcuagcugcccugauuauggguuucauccucugggcaugcagcaacggguccugucgcugcacaauuuguaucuga

SEQ ID NO: 138390 - RNA, 1698 nt, Artificial Sequence
  derived and/or modified CDS sequence (opt3) from hemagglutinin__InfluenzaA__AGQ81214
augaagaaaacccuucucuucgccgcuaucuuucuuuacgugaaggcagacgagauuugcauaggcuaucugagcaacaauuccacagauaaagucgacacuaucauugaaaacaauguuacggugaccucuucaguagaguugguggaaacagagcacacugggaguuucuguagcaucaacggaaagcagcccauuuccuuaggugauugcucuuuugccggcuggauccuggggaauccuaugugugacgaucuaauaggaaaaaccucguggucauacaucgucgaaaagccaaacccggcgaauggcauuugcuaucccgguacacucgagaacgaggaggaacugagacuuaaguucagcggggugcuggaauuuaguaaauucgaggcuuuuaccuccaauggauggggcgccguuaacucuggcgcaggggugacugccgcuuguaaguucggaagcuccaauucauuuuucaggaacauggucugguugauccaucaaagugguacauacccugugauuaaacggaccuuuaauaacacgaagggccgcgacguacucaucguuugggggauacaccauccagcaacucugaaagagcaccaggaucuguauaagaaggacagcucuuacguggccgucggauccgaaaccuauaaucgacguuucauucccgagaucucaacaagaccuaaagugaacggccaggcugguaggaugacuuuuuacuggaccauugugaagccaggggaaagcaucacauucgagaguaacggagccuuccucgcgccccgguacgcauuugaaaucgucucuguuggcaauggcaaauuauuccgcuccgagcugaacauugagagcugcucgaccaagugucagacggaaauagggggaaucaauacuaacaaaucuuuucauuccgugcacagaaauacaauuggugauugcccuaaguauguaaacgugaaaucacuuaaguuggccaccggccugaggaaugucccagcuaucacaagucgggggcuauucggagccauagcaggcuuuauugaggguggguggccgggccucaucaacggaugguacggcuuccaacaccgcaaugaagaggggacuggaaucgcugccgacaaggaaagcacccagaaagcgauugaucagaucacguccaaggugaacaauauuguugaccgaaugaacaccaauuuugagucugugcagcaugaguucagcgaaauagaggguagaaucaaccaacugucaaaacacgucgaugacagugugguagacauuugguccuauaaugcccagcuucugguuuugcucgaaaacgagaagacacuggauuuacaugacagcaacgugaggaaucugcacgaaaaaguccggcguaugcucaaggauaacgcaaaggacgagggcaauggguguuuuacuuucuaccacaaaugcgauaacgaguguaucgaacgcgugagaaauggaaccuaugaccauaaggaguuugaagaggagucuaaaaucaacaggcaggaaauugagggcgucaagcuggauucaagugguaauguguacaaaauacugagcaucuauuccugcauugcuucuucguugguucuagccgcucugaucaugggguucauucucugggccugcagcaacggcuccugucggugcacaaucuguauauga

SEQ ID NO: 138391 - RNA, 1698 nt, Artificial Sequence
  derived and/or modified CDS sequence (opt3) from hemagglutinin__InfluenzaA__AGQ81215
augaagaaaacccuucucuucgccgcuaucuuucuuuacgugaaggcagacgagauuugcauaggcuaucugagcaacaauuccacagauaaagucgacacuaucauugaaaacaauguuacggugaccucuucaguagaguugguggaaacagagcacacugggaguuucuguagcaucaacggaaagcagcccauuuccuuaggugauugcucuuuugccggcuggauccuggggaauccuaugugugacggacuaauaggcaaaaccucguggucauacaucgucgaaaagccaaacccggcgaaugguauuugcuaucccgggacacucgagaacgaggaggagcugagacuuaaguucagcggaauccuggaauuuaguaaauucgaggcuuuuaccuccaauggcuggggcgccgugaacucuggggcaggaguuacugccgcuuguaaguucgguagcuccaauucauuuuucaggcauauggugugguugauucaccaaaguggcacauacccugucaucaaacggaccuuuaacaauacgaaggggcgcgaugugcucguaguuuggggaauacaucacccagcaacucugaaagagcagcaggaccuguauaagaaggauagcucuuacguggccgucggcuccgaaaccuauaaccgacguuucauucccgagaucucaacaagaccuaaagugaauggucaggcugggaggaugacuuuuuacuggaccauugugaagccaggagaaagcaucacauucgagaguaacggcgccuuccucgcgccccgguacgcauuugaaaucgucucuguuggcaacgggaaauuauuccgcuccgagcugaauauugagagcugcucgaccaagugucaaacggaaauaggagguaucaacacuaauaaaucuuuucauuccgugcacagaaacacaauuggcgacugcccuaaguauguaaaugugaaaucacuuaaguuggccaccgggcugaggaacgucccagcuaucgccagucggggacuauucggcgcaauagcugguuuuauugaagggggcuggccgggacucaucaauggcugguacggguuccagcaccgcaacgaagagggaacugguaucgccgcggauaaggaaagcacacagaaagccauugaccagaucaccuccaaggugaauaacauuguugaucgaaugaauacgaacuuugagucugugcaacaugaguucagcgaaauagaggaaagaaucaaucagcugucaaaacacgucgacgauagugugguagacauuugguccuauaacgcacagcuucugguuuugcucgagaaugaaaagacccuggacuuacaugauagcaacgugaggaaccugcacgagaaaguccggcguaugcucaaggacaaugcuaaggaugagggcaacggguguuuuacauucuaccacaaaugcgacaaugaauguaucgagcgcgugagaaacggaacuuaugaucauaaggaauuugaggaggaaucuaaaaucaauaggcaggagauugaaggcgucaagcuggacucaagugguaacguguacaaaauacugagcaucuauuccugcauugccucuucguugguucuagcugcccugaucaugggguucauucucugggcaugcagcaauggcuccugucggugcaccaucuguauauga

SEQ ID NO: 138392 - RNA, 1698 nt, Artificial Sequence
  derived and/or modified CDS sequence (opt3) from hemagglutinin__InfluenzaA__AGQ81216
augaagaaaacccuucucuucgccgcuaucuuucuuuacgugaaggcagacgagauuugcauaggcuaucugagcaacaauuccacagauaaagucgacacuaucauugaaaacaauguuacggugaccucuucaguagaguugguggaaacagagcacacugggaguuucuguagcaucaacggaaagcagcccauuuccuuaggugauugcucuuuugccggcuggauccuggggaauccuaugugugacgaucuaauaggaaaaaccucguggucauacaucgucgaaaagccaaacccggcgaauggcauuugcuaucccgguacacucgagaacgaggaagaacugagacuuaaguucagcggggugcuggaauuuaguaaauucgaggcuuuuaccuccaauggauggggcgccguuaacucuggcgcaggggugacugccgcuuguaaguucggaagcuccaauucauuuuucaggaacauggucugguugauccaucaaagugguacauacccugugaccaaacggacguuuaauaacacuaagggccgcgacguacucguugugugggggauucaccauccagcaacccugaaagagcaccaggaucuguauaagaaggacagcucuuacgucgccgugggauccgaaacauauaaucgacguuucacucccgagaucucaaccagaccuaaagugaacggccaggcugguaggaugacauuuuacuggaccauagucaagccaggggaaagcauuacguucgagaguaacggagccuuccucgcgccccgguacgcauuugaaaucguuucugugggcaauggcaaauuauuccgcuccgagcugaacauugagagcugcucgacuaagugucagacagaaaucgggggaaucaauaccaacaaaucuuuucauuccguacacagaaauacuauuggugauugcccuaaguaugugaacgucaaaucacuuaaguuggccacaggccugaggaaugugccagcuauagccaguaaggggcuauucggagcaaucgcuggcuuuauugaggguggguggccgggccucaucaacggaugguacggcuuccaacaccggaaugaagaggggaccggaauagccgcggacaaagaaagcacgcagaaggccauugaucagaucaccuccaaaguuaacaauaucguggaccgcaugaacacaaauuuugagucuguccgacaugaguucagcgaaauugaggaaagaaucaaccagcugucaaagcacguggaugacaguguaguugacauuugguccuauaaugcacaacuucugguguugcucgagaacgagaaaacucuggauuuacaugacagcaacgucaggaaucugcacgagcgggugcgucgcaugcucaaggauaacgcuaaggacgaggguaauggcuguuuuaccuucuaccacaaaugcgauaacgaauguauagagagagucaggaaugggacauaugaccauaaggaauuugaggaggaaucuaaaaucaaccggcaggagauugaaggagugaagcuggauucaaguggcaauguuuacaaaauccugagcaucuauuccugcauugccucuucguuggugcuagcugcccugauaauggguuucauccucugggcaugcgggaacggcagcugucgaugcacuauuuguaucuga

SEQ ID NO: 138393 - RNA, 1698 nt, Artificial Sequence
  derived and/or modified CDS sequence (opt3) from hemagglutinin__InfluenzaA__AGQ81217
augaagaaaacccuccuguucgccgcuaucuuucuuuacgcaaaggccgacgagauuugcauaggcuaucugagcaacaauuccacagauaaaguggacacuaucauugaaaacaaugucacgguuaccucuucaguggaguugguagaaacagagcacacugggaguuucuguagcaucaacggaaagcagcccauuuccuuaggugauugcucuuuugcgggcuggauccuggggaauccuaugugugacgaucuaauaggaaaaaccucguggucauacaucguggaaaagccaaacccggcuaauggcauuugcuaucccgguacacucgagaacgaggaagaacugagacuuaaguucagcgggguccuggaauuuaguagguucgaggccuuuaccuccaauggauggggcgcagugaacucuggcgccgggguuacugcugcauguaaauucggaagcuccaauucauuuuuccggaacauggugugguugauccaucaaagugguacauacccugucauuaagcgcaccuuuaauaacacgaaaggccgagacgugcucguaguuugggggauccaccauccagccacucugaaggagcaccaggaucuguauaaaaaggacagcucuuacguggcugucggauccgaaaccuauaaucguagauucauacccgagauuucaacaaggccuaaggugaacggccaggccggucggaugacuuuuuacuggaccaucgugaaaccagaagagagcauuacauucgaaaguaacggggcguuccucgcaccccgcuacgccuuugagaucgucucuguuggaaauggcaaguuauucagauccgagcugaacaucgaaagcugcucgaccaaaugucagacggagauuggcgggauaaauacuaacaagucuuuucauuccgugcacaggaauacaaucggagauugcccuaaauauguaaacgugaagucacuuaaauuggcuaccggucugcggaaugucccagccauugcaagucgcggccuauucggggcuaucgccggauuuauagaaggcgguuggccggggcucauuaacggcugguacggauuccaacaccgaaaugaggaaggcacugggaucgcggccgacaaggagagcacacagaaggcaaucgaucagauuaccuccaaagugaacaauaucguugacagaaugaacacgaauuuugagucugugcagcaugaguucagcgagauugaagagaggauaaaccaacugucaaagcacgucgaugacagugugguagacaucugguccuauaaugcucagcuucugguuuugcucgaaaacgagaaaacccuggauuuacaugacagcaacgugcggaaucugcacgagaagguccgucgcaugcucaaagauaacgccaaggacgaaggaaaugguuguuuuacauucuaccacaagugcgauaacgaguguauugaaagagugaggaauggcacuuaugaccauaaagaguuugaggaagagucuaagaucaaccggcaggaaaucgagggggucaaacuugauucaaguggaaauguguacaagauucugagcauauauuccugcaucgcuucuucguugauucuagccgcacugaucaugggcuucauucucugggccugcagcaacgguuccugucgaugcaccaucuguauauga

SEQ ID NO: 138394 - RNA, 1704 nt, Artificial Sequence
  derived and/or modified CDS sequence (opt3) from hemagglutinin__InfluenzaA__AGQ88499
auggagaagaucgugcuccuguucgccaccauuagccuugucaaauccgaccacauaugcaucggcuaccaugcuaacaauucuacagaacagguugauacuauuauggagaagaacgugacgguaacccacgcacaagacauccuggaaaagacacauaaugggaaguugugugauuuaaacggagugaaaccccugauucuaaaggacugcucagucgccgguuggcuccugggcaauccuaugugugaugaguuuaucaacgugccagaauggaguuauauaguugagaaggcgaauccggcuaacgaccuuugcuaccccgggaauuucaacgauuaugaggaacugaaacacuugcucagcagaaucaaucauuuugagaagauucagaucauuccuaaagacuccuggacugaucacgaagccucucugggagugucggcagccuguccauaccagggcaacagcucauucuuuaggaaugucguguggcugaucaagaaagacaacgcuuaucccaccauaaagaaggguuacaauaacacaaaccaggaggaucucuuaguacugugggggauucaccauccuaauaacgaggcagaacaaacccggcuuuaucagaauccaacuacauacaucaguauuggaaccuccacguugaaccagcgccugguucccaaaaucgccacucgaucuaagaucaauggccagagcggccguauugacuucuuuuggaccauacuaaaaccuaacgaugcuauccacuucgaguccaaugggaacuuuauugccccagaauacgcguauaagaucgugaaaaagggagacucaacaauaaugaaaagugaggucgaauacgguaauugcaacacuagaugucaaaccccgauuggcgcaaucaauagcucuaugcccuuccauaacauccacccucucacaauuggggagugcccaaaguaugugaaguccaauaaacuggugcuugccaccggacugaggaacucaccccagcgggagcgcagaaggaagcggggcuuguuuggugcuaucgccggguucauugaaggaggcuggcagggcauggucgacgggugguacggauaucaccauagcaaugagcaggguaguggcuacgcagcugauaaagaaucuacgcaaaaggccauagacgggguuacuaacaaagugaacuccaucauugauaagaugaauacacaguuugaggcgguaggacgcgaguucaacaaucucgaacgaagaaucgagaaccugaauaagaaaauggaagacggcuucuuagauguguggaccuauaacgccgagcugcucguccuuauggaaaaugagaggacucuggacuaccacgauagcaacgugcggaauuuguacgacaagguucgucuacagcugaaagauaacgcaaaggaacucgguaauggguguuuugaguucuaucauaaaugcaacaaugaguguauggaaucggugcgcaacggcacauacgacuauccucaauacucugaggaagcuagacugaagagggaggagaucuccggagucaaacuugaaucaauuggcauauaucagauccugaguauuuacagcaccguggccuccucuuugguacucgcuaucaugauggccgggcugagcuuauggaugugcucaaauggaagucugcagugccggauuuguaucuga

SEQ ID NO: 138395 - RNA, 1683 nt, Artificial Sequence; identical to SEQ ID NO: 138285
  derived and/or modified CDS sequence (opt3) from hemagglutinin__InfluenzaA__AGR33888

SEQ ID NO: 138396 - RNA, 1683 nt, Artificial Sequence; identical to SEQ ID NO: 138285
  derived and/or modified CDS sequence (opt3) from hemagglutinin__InfluenzaA__AGR33889

SEQ ID NO: 138397 - RNA, 1683 nt, Artificial Sequence
  derived and/or modified CDS sequence (opt3) from hemagglutinin__InfluenzaA__AGR33890
augaacacccagauccugguguucgcccucauugcuauaacacccacuaauagcgacaagaucugccuuggccaccaugcagucuccaacgggacgaaaguuaauacccugacagagagaggaguggaaguagugaacgccacugagaccgucgaaaggacaucuauuccucggaucuguucaaaggguaaacgcaccguggauuugggccaaugcggguuacugggaacuauuacaggcccaccgcagugugaccaguuucuagaguucagugcggaucucaucauagaacgacgugaggguagcgacguuugcuaccccgggaaguuugugaaugaggaagcucugagacagauccuuagggaguccggaggcauugauaaagaagccaugggcuucaccuauucugggauccggacgaacggagcaacuucggccugucgcagaucagguagcaguuuuuacgcugagaugaaguggcuguuguccaauaccgacaacgcagccuucccuccaaugacaaagucuuauaaaaauacuaggaaggcucccgcccucauuaucuggggcauacaccauagcgucuccaccgcggagcaaacaaaacuguacgggucaggaaacaagcuggugaccguacggaguagcaauuaucagcagucuuuuguuccuuccccaggcgcagguccccaggugaacgggcaaucaggacgcauugauuuccacuggcucauguuaaauccuaacgacacggucacuuuuagcuucaauggcgccuuuaucgcuccagaucgagccaguuuccugagaggcaaaucuauggggauucaguccggaguccagguggacgcaaacugcgaaggugauuguuaccauagcggcgggacaaucaucucgaaccuuccguuucagaauauugacucuagggugguuggaaagugcccccgguaugugaagcaaaaauccuugcugcuagcuaccggcaugaagaacguaccugagauaccaaaaggucguggccucuucggggccaucgcgggauucauugaaaauggcugggaggggcugaucgauggaugguacgguuuucgccaccagaacgcccagggcgaagggacugcagcugacuacaagucaacacaaagugccauaaaucagaugaccggaaaacuuaacagacugauugagaagacgaaucagcaguucgaguugaucgacaacgaauuuaccgagguggaaaaacaaaucggcaaugucauuaacuggacaagggauagcaucacugaggugugguccuauaaugcugaacuccugguugccauggagaaccagcacaccauugacuuagcagauucugagaugaauaagcuguacgaacgggugaagcgacagcuccgcgagaacgccgaagaggacgguacaggguguuucgaaauauuucauaaaugcgaugacgauuguauggcuagcaucagaaauaacacuuaugaccacucaaaguacagggaggaggcgaugcagaaccggauucaaaucgaucccgucaaacuuaguuccggcuauaaggacgugauccugugguucagcuuuggagcaucuugcuucauuuugcuagccauagcuaugggccugguauuuaucugcguuaaaaaugggaacaugcgcuguaccauuugcaucuga

SEQ ID NO: 138398 - RNA, 1683 nt, Artificial Sequence
  derived and/or modified CDS sequence (opt3) from hemagglutinin__InfluenzaA__AGR33892
augaacacccagauccugguguucgcccucauugcuauaauccccacaaaugcagacaagauuugccuuggccaccaugccgucagcaacgggacuaaaguuaauacgcugaccgagagaggaguggaaguagugaacgcgacagagacugucgaaaggaccuccaucccucggauuuguucuaaggguaaacgcacaguggauuugggccaaugcggguuacugggaaccaucacuggcccaccgcagugugaccaguuucuagaguucucagcugaucucauaaucgaacgacgugaggguagugacguuugcuaccccgggaaguuugugaaugaggaagcccugagacagauucuuagggagagcggaggcaucaacaaagaagcaaugggcuucacauauuccgggauucggaccaauggagccacgucugcuugucgcagaucggguagcagcuuuuacgcagagaugaaguggcuguugaguaacacugauaaugccgcuuucccuccaaugaccaaguccuauaaaaacacaaggaaggcccccgcgcucaucauauggggcauucaccauucugggagcacugcagagcaaaccaaacuguacggauccggcaauaagauggucacagugcggucaaguaacuaucagcagagcuuuguaccuucuccaggugccgggccccagguuaauggacaauccggccgcaucgacuuccacuggcugaugcucaacccuaaugauaccgugacguuuucauucaacggcgcuuuuauugccccagaccgagcaucauucuuaagagggaaaaguaugggaauccagucugguguccagguggaugcuaacugcgaaggcgacuguuaccauuccgggggaacuaucauuagcaaucugccguuucagaacauagauucgaggguggucggcaagugcccccgguauguuaagcaaaaaucucuuuugcuggccacagguaugaagaaugugccugagaucccaaaagggcguggccuauucggagcgauugccggcuucaucgaaaacgggugggagggacucauagacgguugguacggcuuucgccaccagaaugcacagggggaaggaaccgcugccgauuacaaguccacucaaucagcuauuaaccagaugacaggcaaacugaauagacuuaucgagaagaccaaccagcaguucgagcugaucgacaaugaauuuacggagguagaaaaacaaauugguaacgugaucaauuggaccagggacaguauuacagaggucuggagcuauaacgccgaauugcucguggcaauggagaaucagcacacuauagaucuggccgacuccgagaugaacaaguuauacgaacggguuaagcgacagcugcgcgagaaugcugaagaggaugggaccggcuguuucgaaaucuuucauaaaugcgacgaugacuguauggcgucuauuagaaacaacacauaugaucacagcaaguacagggaggaggcaaugcagaaucggauccaaaucgaccccgugaaacucucaaguggauauaaggaugucauucuuugguucuccuuuggcgccagcugcuucauacuguuggcuaucgccauggggcuaguguuuauuugcguagaaaacggaaauaugcgcuguacuaucugcauuuga

SEQ ID NO: 138399 - RNA, 1683 nt, Artificial Sequence; identical to SEQ ID NO: 138277
  derived and/or modified CDS sequence (opt3) from hemagglutinin__InfluenzaA__AGR33895

SEQ ID NO: 138400 - RNA, 1683 nt, Artificial Sequence; identical to SEQ ID NO: 138356
  derived and/or modified CDS sequence (opt3) from hemagglutinin__InfluenzaA__AGR33897

SEQ ID NO: 138401 - RNA, 1683 nt, Artificial Sequence
  derived and/or modified CDS sequence (opt3) from hemagglutinin__InfluenzaA__AGR33899
auggagaccgugagccugaucacaauucuccuugucgccacuguuuccaacgcugacaagauaugcaucggcuaccagucuacuaauucaaccgaaacaguggauacucugaccgagaacaauguacccgugacacacgcaaaagaauuguuacauaccgagcacaacgggaugcugugugccacgagucuaggacaaccucucauucuggacacaugcaccaucgaaggucuuauuuauggcaauccaagcugugaucuguugcucgaggggagagagugguccuacaucgucgaaaggccgucugcggugaacggacugugcuaucccggcaauguugagaaccuggaggagcuccggucguuauucucaagcgcucgcaguuaccagcgaauacagaucuuuccugacacgauuuggaauguguccuauaacgguacuucuaaggccuguagcggguccuucuaccguucaaugagauggcugacccagaaaaauaguaacuauccaauccaagaugcacaguacacaaauaaccagggaaagaauauucuuuuuauguggggcaucaaccaucccccuacugacaccacacagagggauuuguacacccggacggacacuacaaccagcgucgccacugaggaaauaaaccgcauuuucaaaccacugaucggccccagaccucuagugaaugggcucaugggaaggauugauuauuacuggucuguacugaagccaggucaaacacuucggaucaaguccgacggcaaccugaucgcuccgugguaugggcacauuuugucaggagagagccauggccgcauacucaaaaccgaucugaagaaagguaguugcacgguucagugucagaccgaaaaagggggauuaaauacaacucugcccuuucagaacgugucuaaguacgcauucggcaauugcuccaaguauaucggcauuaagagccucaaacuugccgucgggcugcgaaacgugccuucgagaucuuccaggggauuguuuggugcuaucgccggcuucauagaagggggauggucaggccuaguggcggguugguacggguuucaacacaguaaugaccagggcgucggaauggcagccgaucgggacagcacccagaaggcuauugacaaaaucacauccaagguuaacaauaucguggauaaaaugaacaagcaauaugaaauuaucgaccacgaguucucugagguagaaacucgucugaauaugauuaacaauaaaauagaugaccagauccaggauauuugggccuacaacgcagagcuccuggugcuucuggaaaaucagaagaccuuggacgagcaugaugcuaacgucaacaaucucuacaacaaggugaaacgcgcccugggcagcaaugcgguugaagacgggaagggauguuuugaguuauaucacaaaugcgaugaccaauguauggagacaaucagaaacgguaccuacaauaggucaaaguaucaggaagagaguaaacuggaacggcagaagaucgagggcgugaagcuagaauccgaggggacuuacaaaauucucacgauauauagcacagucgccucuucacuggugaucgcaaugggauucgcugccuuucuuuucugggcuaugaguaacggcagcugccgaugcaauauuuguaucuga

SEQ ID NO: 138402 - RNA, 1683 nt, Artificial Sequence
  derived and/or modified CDS sequence (opt3) from hemagglutinin__InfluenzaA__AGR33900
auggagaccgugagccugaucacaauucuccuugucgccacuguuuccaacgcugacaagauaugcaucggcuaccagucuacuaauucaaccgaaacaguggauacucugaccgagaacaauguacccgugacacacgcaaaagaauuguuacauaccgagcacaacgggaugcugugugccacgagucuaggacaaccucucauucuggacacaugcaccaucgaaggucuuauuuauggcaauccaagcugugaucuguugcucgaggggagagagugguccuacaucgucgaaaggccgucugcggugaacggacugugcuaucccggcaauguugagaaccuggaggagcuccggucguuauucucaagcgcucgcaguuaccagcgaauacagaucuuuccugacacgauuuggaauguguccuauaacgguacuucuaaggccuguagcggguccuucuaccguucaaugagauggcugacccagaaaaauagugauuauccaauccaagacgcacaguacacaaacaaucagggaaagaacauucuuuuuauguggggcaucaaucaucccccuacugauaccacacagagggacuuguacacccggacggauacuacaaccagcgucgccacugaggaaauaaaccgcauuuucaaaccacugaucggccccagaccucuagugaacgggcucaugggaaggauugacuauuacuggucuguacugaagccaggucaaacacuucggaucaaguccgauggcaaucugaucgcuccgugguaugggcacauuuugucaggagagagccauggccgcauacucaaaaccgaccugaagaaagguaguugcacgguucagugucagaccgaaaaagggggauuaaacacaacucugcccuuucagaaugugucuaaguacgcauucggcaacugcuccaaguauaucggcauuaagagccucaaacuugccgucgggcugcgaaaugugccuucgagaucuuccaggggauuguuuggugcuaucgccggcuucauagaagggggauggucaggccuaguggcggguugguacggguuucaacacaguaacgaucagggcgucggaauggcagccgaccgggacagcacccagaaggcuauugauaaaaucacauccaagguuaauaacaucguggacaaaaugaauaagcaauaugaaauuaucgaucacgaguucucugagguagaaacucgucugaacaugauuaauaacaaaauagacgaucagauccaggacauuugggccuacaaugcagagcuccuggugcuucuggaaaaccagaagaccuuggaugagcaugacgcuaaugucaacaaccucuacaauaaggugaaacgcgcccugggcagcaacgcgguugaagaugggaagggauguuuugacuuauaucacaaaugcgaugaccaauguauggagacaaucagaaaugguaccuacaacaggcggaaguaucaggaggaaucaaaacuggagcgacagaagaucgaaggcgugaagcuagagagugaagggacuuacaaaauucucacgauauauuccacagucgccagcucucuggugaucgcaaugggauucgcugccuuucuuuucugggcuaugucaaauggcaguugccgcugcaacauuuguaucuga

SEQ ID NO: 138403 - RNA, 1683 nt, Artificial Sequence
  derived and/or modified CDS sequence (opt3) from hemagglutinin__InfluenzaA__AGR33902
auggagaccgccagccugaucacaauucuccuuguggcuacugucuccaacgcagacaagauaugcaucggcuaccagucuacuaauucaaccgaaacaguugauacucugaccgagaacaaugugcccguaacacacgccaaagaauuguuacauaccgagcacaacgggaugcugugugcgacgagucuaggacaaccucucauucuggacacaugcaccaucgaaggucuuauuuauggcaauccaagcugugaucuguugcucgaggggagagagugguccuacaucguggaaaggccgucugcugucaacggacugugcuaucccggcaauguggagaaccuggaggagcuccggucguuauucucaagcgcccgcaguuaccagcgaauacagaucuuuccugacacgacuuggaauguuuccuauaacgguauuucuaaggcauguagcggguccuucuaccguucaaugagauggcugacccagaaaaauaguaacuauccaauccaagaugcccaguacacaaauaaccagggaaagaauauucuuuuuauguggggcaucaaccaucccccuacugacaccacacagagggauuuguacacccggacggacacuacaaccagcguggcuacugaggaaauaaaccgcauuuucaaaccacugaucggccccagaccucuagucaaugggcucaugggaaggauugauuauuacuggucugugcugaagccaggucaaacacuucggaucaaguccgacggcaaccugaucgcaccgugguaugggcacauuuugucaggagagagccauggccgcauacucaaaaccgaucugaagcgagguaguugcacgguacagugucagaccgaaaaagggggauuaaauacaacucugcccuuucagaacguuucuaaguacgccuucggcaauugcuccaaauauaucggcauuaagagccucaaacuugcuguggggcugagaaacgucccuucgaggucuucccggggauuguuuggugccaucgcgggcuucauagaagggggauggucaggccuaguggcagguugguacggguuucaacacaguaaugaccagggcgugggaauggccgcugaucgugacagcacccagaaggccauugacaagaucacauccaaagucaacaauaucguugauaagaugaacaaacaauaugaaauuaucgaccacgaguucucugagguggaaacucgccugaauaugauuaacaauaagauagaugaccagauccaggauauuugggcauacaacgcugagcuccugguacuucuggaaaaucagaaaaccuuggacgagcaugaugccaacgugaacaaucucuacaacaaggucaagagagcgcugggcagcaaugccguggaagacgggaaaggauguuuugaguuauaucacaagugcgauaaccaauguauggagacaaucaggaaugguaccuacaaccggcgaaaauaucaggaagagucaaagcuggaacgccagaaaaucgagggcguuaagcuagaaagugaggggacuuacaagauucucacgauauauuccacaguggcaagcucucuggucaucgcuaugggauucgccgcuuuucuuuucugggccaugucaaauggcaguugcagaugcaacauuuguaucuga

SEQ ID NO: 138404 - RNA, 1698 nt, Artificial Sequence; identical to SEQ ID NO: 133561
  derived and/or modified CDS sequence (opt3) from hemagglutinin__InfluenzaA__AGR49817

SEQ ID NO: 138405 - RNA, 1698 nt, Artificial Sequence
  derived and/or modified CDS sequence (opt3) from hemagglutinin__InfluenzaA__AGR49841
augaaggugaaacugcucguccuucugugcaccuucacagccacuuacgcugacacgaucuguauuggcuaucacgcaaacaauagcaccgauacaguugacacuguguuggagaagaacguaaccgugacacauuccgucaauuuacuggaaaacucucacaaugggaaacuaugccuccugaagggaauagcgccccuucagcuggguaacuguucaguggccggcuggaucuuggggaauccugagugcgaacuccugauuaguaaagagagcugguccuacaucguugaaaagccaaacccggagaauggaaccuguuaucccggccauuuugcugauuacgaggaacugagagagcaacucucuucggugagcucauucgaaagguuugagauuuucccuaaggagaguuccuggccaaaccacacugucacaggugugucugccagcugcucccauaauggggaaucaaguuuuuaucggaacuuacuguggcuuaccggcaaaaauggauuguaccccaaccugagcaagucuuaugcaaauaacaaagagaaggaaguucuaguacucuggggcgugcaccacccuccaaacaucgucgaccagaaaacgcuguaccgcacugagaaugccuacguguccguggucucaagccauuauagucgaaaguucacccccgaaauagcuaagcguccuaaaguuagagaucaggaggggaggaucaacuacuauuggacacuucuggagccacgggacacuauuaucuuugaagcaaauggaaacuugauugccccgcgcuacgcuuucgcccucucuagagguuuuggcuccgggaucauaaauagcaacgcgcccaugggaaagugugaugcaaaaugccagaccccucaaggcgccauuaauucgucucugccauuccagaacgugcaccccguaacaaucggugaguguccuaaguaugugagguccgcuaaauuacggauggucaccgggcugcgcaauauuccaucaauccagagucgaggacucuuuggcgccaucgcaggcuucauugaagggggauggacggguaugguggacggcugguacggguaucaucaccagaacgagcaaggaagcggcuacgcugccgaucagaaguccacucagaaugcgauaaacgguaucacaaauaaaguuaacucugugauugaaaagaugaauacccaguuuacugccgucgggaaggaguucaacaaacuugagagaaggauggaaaaccugaauaagaaaguggacgauggcuucaucgacauauggacauacaacgcagaguugcuaguacugcucgaaaaugagcggacccuggauuuucacgacagcaacguuaagaaucuuuaugaaaaagugaagucacaacugaagaacaaugcuaaagagauuggaaacggcugcuucgaguuuuaccauaaguguaaugacgaaugcauggagagugucaaaaacgggacguaugauuaccccaaguauuccgaagagagcaaauugaaucgugagaagaucgacggagugaagcucgaaucuaucggugucuaccagauucuggccaucuauucaaccguggcuaguagcuuaguucugcuagugucccucggcgccauuucuuucuggaugugcucgaacgggagccugcagugucgcauaugcaucuga

SEQ ID NO: 138406 - RNA, 1698 nt, Artificial Sequence; identical to SEQ ID NO: 133561
  derived and/or modified CDS sequence (opt3) from hemagglutinin__InfluenzaA__AGR49853

SEQ ID NO: 138407 - RNA, 1698 nt, Artificial Sequence
  derived and/or modified CDS sequence (opt3) from hemagglutinin__InfluenzaA__AGR49865
augaaggugaaacugcucguccuucugugcaccuucacagccacuuacgcugacacgaucuguauuggcuaucacgcaaacaauagcaccgauacaguugacacuguguuggagaagaacguaaccgugacacauuccgucaauuuacuggaaaacaaucacaacgggaaacuaugccuccugaagggaauagcgccccuucagcuggguaauuguucuguggccggcuggaucuuggggaacccugagugcgaacuccugauuucaaaagagaguuggagcuacaucguugaaaagccaaauccggagaacggaaccuguuaucccggccauuuugcugauuacgaggaacugagagagcaacucuccucugugucgucauucgaaagguuugagauuuucccuaaggagagcaguuggccaaaucacacugucacagguguguccgccucuugcagccauaacggggaauccucauuuuaucggaauuuacuguggcuuaccggcaaaaacggauuguaccccaaucugaguaagagcuaugcaaacaacaaagagaaggaaguucuaguacucuggggcgugcaccacccuccaaauaucgucaaccagaaaacgcuguaccgcacugagaaugccuacgugucuguggucuccucacauuauagccgaaaguucacccccgaaauagcuaagcguccuaaaguuagagaccaggaggggaggaucaacuacuauuggacacuucuggagccaggagauacuauuaucuuugaagcaaaugguaacuugauugccccgcgguacgcuuucgcccucaaucgcggcuuugggaguggaaucauaaacucuaaugcgcccauggacaagugugaugcaaaaugccagaccccucaaggcgccauuaacuccagccugccauuccagaaugugcaccccguaacaaucggugaguguccuaaguaugugagaucggcuaaauuaaggauggucaccgggcugcggaacauuccaucuauccagucccgcggacucuuuggcgccaucgcaggcuucauugaagggggauggacggguaugguggacggcugguacggguaucaucaccagaaugagcaaggaucaggcuacgcugccgaucagaagaguacucagaacgcgauaaaugguaucacaaacaaaguuaacagcgugauugaaaagaugaauacccaguuuacugccgucgggaaggaguucaacaaacuugagcgaagaauggaaaaucugaacaagaaaguggacgauggcuucaucgacguauggacauacaaugcagaguugcuaguucugcucgaaaacgagaggacccuggauuuucacgacuccaaugugaagaaccuuuaugaaaaagucaagucucaacugaagaauaacgcuaaagagauaggaaauggcugcuucgaguuuuaccauaaguguaacgacgaaugcauggagagcgugaaaaaugggacguaugauuaccccaaguauucagaagagaguaaauugaaccgggagaagauugacggagucaagcucgaauccauggguguguaccagauccuggccaucuauagcaccguugcuucuucauuagugcugcuaguaagucucggcgccauuagcuucuggaugugcuccaaugggucucugcagugucguaucugcauuuga

SEQ ID NO: 138408 - RNA, 1701 nt, Artificial Sequence; identical to SEQ ID NO: 130704
  derived and/or modified CDS sequence (opt3) from hemagglutinin__InfluenzaA__AGR49877

SEQ ID NO: 138409 - RNA, 1701 nt, Artificial Sequence; identical to SEQ ID NO: 130482
  derived and/or modified CDS sequence (opt3) from hemagglutinin__InfluenzaA__AGR49888

SEQ ID NO: 138410 - RNA, 1701 nt, Artificial Sequence
  derived and/or modified CDS sequence (opt3) from hemagglutinin__InfluenzaA__AGR49900
augaagaccaucauugcccugagcuacauacucugccuuguguucgcucagaaacugcccggcaacgacaauuccacagcaacuuuguguuuagggcaccaugccgucccuaacggaacgaucguuaagaccauuacaaaugaucaaaucgaggugacuaacgcgaccgaacugguacagucuucaaguacaggugagauuugcgacagcccacaccagauccuagauggcgaaaauuguacccucauagacgcucugcuuggggauccgcagugcgacggauuucaaaacaaaaagugggaucuguucguggagagauccaaagccuauucuaaguguuaccccuaugacgucccugauuacgcaucguugaggucacucguggccagcaguggcacucuggaauuuaauaacgaguccuucaauuggacagguguuacccagaacgggacgucuagcgcuugcauccggcgcuccaauaacucauuuuucagucgacugaauuggcucacucauuuaaaguuuaaauauccagcacugaacgugaccaugcccaauaacgagaaguucgacaaacuuuacauuuggggaguccaccauccuggcacagauaacgaccagaucuuuuuguaugcccaggcuagcggccguauuacugugucuaccaagagaucccaacagacaguaaucccaaauauagggucaaggccccggguucgcaacauuccuagcagaaucaguauuuacuggaccaucgugaaaccaggagauauccugcuaauuaauucuacggguaaccucauagccccgaggggcuacuucaagauccgguccggaaagagcucgauuaugcgcucugacgcgcccaucgggaaauguaauuccgaaugcauaacuccuaacggcucaauuccaaaugacaagcccuuucagaacgucaaucgaaucacauauggugcauguccuagauacgugaaacagaacacccugaagcuggccacugggaugaggaaugugccagagaaacaaacacggggaaucuucggcgcuauugccggcuuuaucgaaaacgggugggagggaauggucgaugguugguauggcuuccgucaccagaauagugaggggauuggacaggcagcugaccuuaagagcacccaagccgcgauagaucagaucaacggcaaauugaaucgccucauugguaagacgaacgaaaaguuccaccagaucgagaaagaauuuuccgagguugaagggagaauccaggaccuggagaaguacguggaggauaccaaaauugacuuauggucuuauaacgccgaacugcucguagcacuugagaaucaacauacaauagaucugacugacagcgaaaugaacaaguuguucgagaaaaccaagaagcagcuaagggaaaaugcugaggauaugggcaacggaugcuuuaaaaucuaccacaagugugacaaugccugcauuggcucaauccggaacgggacauaugaucaugacguguaccgagacgaggcucugaauaaccgcuuccagauuaaaggagucgaacucaagagugguuacaaagauuggauccuguggauauccuuugccaucagcugcuuccuucuguguguggcauugcucggcuuuauuaugugggccugccagaaggggaauaucagauguaacauuugcaucuga

SEQ ID NO: 138411 - RNA, 1701 nt, Artificial Sequence
  derived and/or modified CDS sequence (opt3) from hemagglutinin__InfluenzaA__AGR49912
augaagaccaucauugcccugagcuacauacucugccuuguguccgcucagaaacugcccggcaacgacaauucuacagcaacuuuguguuuagggcaccaugccgucccuaacggaacgaucguuaagaccauuacaaaugaucaaaucgaggugacuaacgcgaccgaacugguacagucaaguagcacaggugagauuugcgacuccccacaccagauccuagauggcgaaaauuguacccucauagacgcucugcuuggggauccgcagugcgacggauuccaaaacaaaaagugggaucuguuuguggagagaucuaaagccuauucgaauuguuaccccuaugacgucccugauuacgcaucauugaggagccucguggccaguuccggcacucuggaguucaacaaugaaucuuuuaacuggacagguguuacccagaaugggacgagcuccgcuugcauccggcgcucaaacaauaguuucuuuagccgacugaacuggcucacucauuuaaaguucaaguauccagcacugaaugugaccaugcccaacaacgaggaauuugacaaacuuuacauuuggggaguccaccauccuggcacagauaaugaccagaucuucuuguaugcccaggcuucuggccguauuacuguguccaccaagagaucacaacagacaguaaucccaaacauagggagcaggccccggguucgcaauauuccuaguagaaucucuauuuacuggaccaucgugaaaccaggagauauccugcuaauuaacuccacggguaaucucauagccccgaggggcuacuuuaagauccggagcgggaaaucgucuauuaugcgcuccgacgcgcccaucggaaaguguaacucaaagugcauaacuccuaauggcaguauuccaaacgacaaacccuuccagaaugucaaccgaaucacauauggugcauguccuagauacgugaagcagaauacccugaaacuugccacugggaugaggaacgugccagagaagcaaacacggggaaucuuuggcgcuauugccggcuucaucgaaaaugggugggagggaauggucgaugguugguauggcuuucgucaccagaacagcgaggggauuggacaggcagcugaccugaaauccacccaagccgcgauagaucagaucaauggcaaguugaaccgccucauugguaaaacgaacgaaaaguuccaccagaucgagaaggaguucucugaaguugaagggagaauccaggaccuggagaaauacguggaggauaccaagauugacuuauggagcuauaaugccgaacugcucguagcacuugagaaccaacauacaauagaucugacugacucagaaaugaauaaauuguuugagaagaccaaaaagcagcuaagggaaaacgcugaggauaugggcaauggaugcuucaagaucuaccacaaaugugacaacgccugcauuggcaguauccggaaugggacauaugaucaugacguguaccgagacgaggcucugaacaaucgcuuucagauuaagggagucgaacucaaauccgguuacaaggauuggauccuguggaucagcuucgccauaucuugcuuucuucuguguguggcauugcucggcuucauuaugugggccugccagaaagggaacaucagauguaauauuugcaucuga

SEQ ID NO: 138412 - RNA, 1701 nt, Artificial Sequence
  derived and/or modified CDS sequence (opt3) from hemagglutinin__InfluenzaA__AGR49924
augaagaccaucauugcccugagcuacauacucugccuuguguccgcucagaaacugcccggcaacgacaauucuacagcaacuuuguguuuagggcaccaugccgucccuaacggaacgaucguuaagaccauuacaaaugaucaaaucgaggugacuaacgcgaccgaacugguacagucaaguagcacaggugagauuugcgacuccccacaccagauccuagauggcgaaaauuguacccucauagacgcucugcuuggggauccgcagugcgacggauuccaaaacaaaaagugggaucuguuuguggagagaucuaaagccuauucgaauuguuaccccuaugacgucccugauuacgcaucauugaggagccucguggccaguuccggcacucuggaguucaacaaugaaucuuuuaacuggacagguguuacccagaaugggacgagcuccgcuugcauccggcgcucaaacaauaguuucuuuagccgacugaacuggcucacucauuuaaaguucaaguauccagcacugaaugugaccaugcccaacaacgaggaauuugacaaacuuuacauuuggggaguccaccauccuggcacagauaaugaccagaucuucuuguaugcccaggcuucuggccguauuacuguguccaccaagagaucacaacagacaguaaucccaaacauagggagcaggccccggguucgcaauauuccuaguagaaucucuauuuacuggaccaucgugaaaccaggagauauccugcuaauuaacuccacggguaaucucauagccccgaggggcuacuuuaagauccggagcgggaaaucgucuauuaugcgcuccgacgcgcccaucggaaaguguaacucaaagugcauaacuccuaauggcaguauuccaaacgacaaacccuuccagaaugucaaccgaaucacauauggugcauguccuagauacgugaagcagaauacccugaaacuugccacugggaugaggaacgugccagagaagcaaacacggggaaucuuuggcgcuauugccggcuucaucgaaaaugggugggagggaauggucgaugguugguauggcuuucgucaccagaacagcgaggggauuggacaggcagcugaccugaaauccacccaagccgcgguugaucagauaaauggcaaguugaaccgccucaucgguaaaacgaacgaaaaguuccaccagauugagaaggaguucucugaaguggaagggagaauccaggaccuggagaaauacguagaggauaccaagaucgacuuauggagcuauaaugccgaacugcucguggcacuugagaaccaacauacaauugaucugacugacucagaaaugaauaaauuguuugagaagaccaaaaagcagcuaagggaaaacgcugaggauaugggcaauggaugcuucaagauauaccacaaaugugacaacgccugcaucggcaguauucggaaugggacauaugaucaugacgucuaccgagacgaggcucugaacaaucgcuuucagaucaagggaguggaacucaaauccgguuacaaggauuggauucuguggaucagcuucgccauaucuugcuuucuucuguguguugcauugcucggcuucaucaugugggccugccagaaagggaacauuagauguaauaucugcauuuga

SEQ ID NO: 138413 - RNA, 1701 nt, Artificial Sequence
  derived and/or modified CDS sequence (opt3) from hemagglutinin__InfluenzaA__AGR49936
augaagaccaucauugcccugagcuacauacucugccuuaucuccgcucagaaauuccccggcaacgacaauucuacagcaacucuguguuuggggcaccaugccgugccuaacggaacgauugucaagaccaucacaaaugaucaaauugagguuacuaacgcgaccgaauuagugcagucaaguagcacaggugagaucugcgacuccccacaccagauacuggauggcgaaaauuguacccuaaucgacgcucuccugggggauccgcagugcgacggauuucaaaacaaaaagugggaucuuuucguagagagaucuaaagccuauucgaauuguuaccccuaugacgugccuggcuacgcaucacugaggagcuuggucgccaguuccgguacucucgaauuuaacaaugagucuuucaacuggacaggggugacccagaauggaacgagcuccgcuugcauucggcgcucaaacaauaguuucuucagccgacugaacuggcugacucaucucaaguuuaaguauccagcauuaaauguuaccaugcccaacaacgaggaauuugauaaacuguacaucuggggcgugcaccauccuggcacagacaaugaucagauuuuucuuuaugcccaggcuucugggcguaucacugucuccaccaagagaucacaacagacagugauaccaaacauuggaagcaggccccggguacgcaauaucccuaguagaauuucuaucuacuggaccaucguuaaaccaggugacauuuugcugauaaacuccacgggcaaucuaaucgccccgaggggguacuucaagauucggagcggaaaaucgucuaucaugcgcuccgaugcgcccauaggcaaguguaacucagagugcauuacuccuaaugguaguaucccaaacgacaagcccuuucagaaugugaaccgaaucacauauggggcauguccuagauacgucaaacagaauacccucaagcuggccacuggaaugaggaacgugccagaaaaacaaacacggggcauuuucggcgcuaucgccggguuuauugagaauggaugggaggguaugguggacggcugguauggguuccgucaccagaacagcgaaggaauaggccaggcagcugaucuuaaguccacccaagccgcgaucgaccagauuaaugguaaacugaaccgcuugaucgggaagacgaacgagaaauuccaccagaucgaaaaggaguuuucugaagucgagggcaggauucaggaucucgagaaguacguugaagacaccaaaauagaucuguggagcuauaaugccgaguuacugguggcacucgaaaaccaacauacaaucgaccuuacugauucagagaugaauaagcuguucgagaaaaccaagaaacaguugagagaaaacgcugaggacaugggaaauggcugcuuuaagauuuaccacaagugugauaacgccugcaucgggaguauucggaauggaacauaugaccaugauguauaccgagacgaagcucuaaacaaucgcuuccagaucaaagguguggagcugaaguccggcuacaaagacuggauacucuggaucagcuuugccauuucuugcuuccugcuuugugucgcacuguugggguuuaucaugugggccugccagaagggaaacauuagauguaauaucugcauauga

SEQ ID NO: 138414 - RNA, 1701 nt, Artificial Sequence; identical to SEQ ID NO: 135742
  derived and/or modified CDS sequence (opt3) from hemagglutinin__InfluenzaA__AGR49948

SEQ ID NO: 138415 - RNA, 1701 nt, Artificial Sequence; identical to SEQ ID NO: 130575
  derived and/or modified CDS sequence (opt3) from hemagglutinin__InfluenzaA__AGR49960

SEQ ID NO: 138416 - RNA, 1701 nt, Artificial Sequence
  derived and/or modified CDS sequence (opt3) from hemagglutinin__InfluenzaA__AGR49972
augaaggccauccuggugguccuccuuuacaccuucgcuacagcaaacgccgacacucugugcauuggcuaucacgcgaauaacagcacggauaccguugacacaguguuggagaaaaauguaacugugacccauuccgucaacuuacuggaagauaagcacaaugggaaacuauguaagcucagaggaguggcuccccugcaucuugguaaaugcaacauagccggcuggauccuggggaauccugagugugaaucuuugucaacagcaaguagcugguccuacauuguugagaccucuucgucagacaacggaacuugcuauccaggcgauuuuaucgacuacgaggagcucagggagcagcugagcaguguguccucuuucgaacgguuugagauuuucccgaagacaagcuccuggcccaaucacgauucaaacaagggugucaccgccgcuuguccucaugcaggggccaaaaguuuuuauaagaaucugaucuggcucgugaaaaagggaaacagcuacccaaaauuaucuaaguccuauauaaaugacaagggcaaagaaguacugguucuuuggggcauccaccaccccucaacgagcgcugaucaacagaguuuguaccagaacgccgacgcguacguguucgucgggucuucccgcuauagcaagaaauuuaagccugagauugcaauccgaccaaaagugcgugaucaggagggaagaaugaauuacuauuggacuauuguggaacccggugacaagaucaccuucgaggccacaggcaaccuggucguuccuagguacgcuuuugccauggaacggaacgcagggucgggaauaauuaucucugauacuccagugcaugacugcaauaccacaugucaaaccccgaaaggcgcuauuaacacgucccuacccuuccagaauauccacccuaucacuauugguaagugcccaaaguauguaaaaucaacaaagcuccgccuggccaccgggcuuagaaacgugcccaguauacagagcaggggacuguuuggcgcgaucgccggcuucauugaagggggauggacugguauggucgacggcugguacggguaucaucaccagaaugaacaaggauccggcuacgcagcugauuugaaaucuacacagaacgccaucgacgagauaaccaauaaggugaacagcguuauugagaaaaugaauacgcaguuuaccgcuguggguaaggaguucaaccaccucgaaaagcggaucgaaaaucugaacaaaaaggucgaugacggguucuuagauaucuggacauacaaugccgagcugcucgugcuucuggaaaacgagcgcacuuuggacuaucaugauucaaauguuaaaaaccuauacgagaagguacgaagucagcugaaaaacaaugcaaaggaaauuggcaacggauguuuugaguucuaucacaagugcgacaauaccuguauggaauccgugaaaaacggcacauacgauuauccuaaguacagcgaggaagccaaacucaauagagaggagaucgacggggucaagcuggaaucuacuaggauuuaucaaauacuugcuaucuacucaaccguggcgaguagccuggucuuggugguuucccucggagcaauuucuuuuuggaugugcucgaacgguagccugcagugccggaucuguaucuga

SEQ ID NO: 138417 - RNA, 1698 nt, Artificial Sequence; identical to SEQ ID NO: 134746
  derived and/or modified CDS sequence (opt3) from hemagglutinin__InfluenzaA__AGR49983

SEQ ID NO: 138418 - RNA, 1698 nt, Artificial Sequence; identical to SEQ ID NO: 134746
  derived and/or modified CDS sequence (opt3) from hemagglutinin__InfluenzaA__AGR49995

SEQ ID NO: 138419 - RNA, 1701 nt, Artificial Sequence; identical to SEQ ID NO: 130704
  derived and/or modified CDS sequence (opt3) from hemagglutinin__InfluenzaA__AGR50007

SEQ ID NO: 138420 - RNA, 1701 nt, Artificial Sequence; identical to SEQ ID NO: 130704
  derived and/or modified CDS sequence (opt3) from hemagglutinin__InfluenzaA__AGR50018

SEQ ID NO: 138421 - RNA, 1701 nt, Artificial Sequence; identical to SEQ ID NO: 130704
  derived and/or modified CDS sequence (opt3) from hemagglutinin__InfluenzaA__AGR50029

SEQ ID NO: 138422 - RNA, 1701 nt, Artificial Sequence
  derived and/or modified CDS sequence (opt3) from hemagglutinin__InfluenzaA__AGR50040
augaagaccaucauugcccugagcuacauacucugccuuguguucgcucagaaacugcccggcaacgacaauuccacagcaacuuuguguuuagggcaccaugccgucccuaacggaacgaucguuaagaccauuacaaaugaucaaaucgaggugacuaacgcgaccgaacugguacagucuucaaguacaggugagauuugcgacagcccacaccagauccuagauggcgaaaauuguacccucauagacgcucugcuuggggauccgcagugcgacggauuucaaaacaaaaagugggaucuguucguggagagauccaaagccuauucuaauuguuaccccuaugacgucccugauuacgcaucguugaggucacucguggccagcaguggcacucuggaauuuaacaaugaguccuucaacuggacagguguuacccagaaugggacgucuagcgcuugcauccggcgcuccaacaauucauuuuucagucgacugaacuggcucacucauuuaaaguuuaaguauccagcacugaaugugaccaugcccaacaacgagcaguucgacaaacuuuacauuuggggaguccaccauccuggcacagauaaugaccagaucuuuuuguaugcccaagcuagcggccguauuacugugucuaccaagagaucccagcagacaguaaucccaaacauagggucaaggccccggguucgcaauauuccuagcagaaucaguauuuacuggaccaucgugaaaccaggagauauccugcuaauuaacucuacggguaaucucauagccccgaggggcuacuucaagauccgguccgggaaaagcucgauuaugcgcucugacgcgcccaucggaaaguguaacuccgaaugcauaacuccuaauggcucaauuccaaacgacaagcccuuucagaaugucaaccgaaucacauauggugcauguccuagauacgugaaacaaaauacccugaagcuggccacugggaugaggaacgugccagagaaacagacacggggaaucuucggcgcuauugccggcuuuaucgaaaaugggugggagggaauggucgaugguugguauggcuuccgucaccagaacagugaggggcgcggacaagcagcugaccuuaagagcacccaggccgcgauugaucagauaaauggcaaauugaacagacucaucgguaagacgaacgaaaaauuccaccagauugagaaggaauuuuccgagguugaagggaggauccaagaccuggagaaguacguggaggauaccaaaaucgacuuauggucuuauaaugccgaacugcucguagcacuugagaaccagcauacaauugaucugacugacagcgaaaugaauaaguuguucgagaaaaccaagaaacagcuacgggaaaacgcugaggauaugggcaauggaugcuuuaagauauaccacaagugugacaacgccugcaugggcucaauccgaaaugggacauaugaucaugacguguaccgcgacgaggcucugaacaauagauuccagauuaaaggagucgaacucaagagugguuacaaagauuggauccuguggauuuccuuugccaucagcugcuuccuucuguguguggcauugcucggcuuuauaaugugggccugccaaaaggggaacaucagguguaauauuugcaucuga

SEQ ID NO: 138423 - RNA, 1701 nt, Artificial Sequence; identical to SEQ ID NO: 130704
  derived and/or modified CDS sequence (opt3) from hemagglutinin__InfluenzaA__AGR50052

SEQ ID NO: 138424 - RNA, 1701 nt, Artificial Sequence; identical to SEQ ID NO: 130704
  derived and/or modified CDS sequence (opt3) from hemagglutinin__InfluenzaA__AGR50063

SEQ ID NO: 138425 - RNA, 1701 nt, Artificial Sequence
  derived and/or modified CDS sequence (opt3) from hemagglutinin__InfluenzaA__AGR50074
augaaggccauccuggugguccuccuuuacaccuucgcuacagcaaacgccgacacucugugcauuggcuaucacgcgaauaacagcacggauaccguugacacaguguuggagaaaaauguaacugugacccauuccgucaacuuacuggaagauaagcacaaugggaaacuauguaagcucagaggaguggcuccccugcaucuugguaaaugcaacauagccggcuggauccuggggaauccugagugugaaucuuugucaacagcaaguagcugguccuacauuguugagaccucuucgucagacaacggaacuugcuauccaggcgauuuuaucgacuacgaggagcucagggagcagcugagcaguguguccucuuucgaacgguuugagauuuucccgaagacaagcuccuggcccaaucacgauucaaacaagggugucaccgccgcuuguccucaugcaggggccaaaaguuuuuauaagaaucugaucuggcucgugaaaaagggaaacagcuacccaaaauuaucuaaguccuauauaaaugacaagggcaaagaaguacugguucuuuggggcauccaccaccccucaacgagcgcugaucaacagaguuuguaccagaacgccgacgcguacguguucgucgggucuucccgcuauagcaagaaauuuaagccugagauugcaauccgaccaaaagugcguaaucaggagggaagaaugaacuacuauuggacucugguggaacccggugauaagauuaccuucgaggccacaggcaaccuagucguuccuagguacgcuuuugccauggaacggaaugcagggucgggaaucauaauuucugacacuccagugcaugauugcaacaccacaugucaaaccccgaaaggcgcuaucaauacgucccuccccuuccagaacauucacccuaucacuaucgguaagugcccaaaguauguaaaaucaacaaagcugcgccuugccaccgggcugagaaaugugcccaguauucagagcaggggauuguuuggcgcgauagccggcuucaucgaagggggauggacugguauggucgacggcugguacggguaucaucaccagaacgaacaaggauccggcuacgcagcugaccucaaaucuacacagaaugccauugaugagaucaccaacaaggugaauagcguuauagagaaaaugaacacgcaguuuaccgcuguggguaaggaguucaaucaccuggaaaagcggauugaaaacuuaaauaaaaaggucgacgauggguuccuggacaucuggacauacaacgccgagcuccuugugcuguuggaaaaugagcgcacucuagauuaucaugacucaaacguaaagaaccuguacgagaagguucgaagucagcucaaaaauaacgcaaaggaaaucggcaauggauguuuugaguucuaucacaagugcgauaacaccuguauggaauccgugaaaaauggcacauacgacuauccuaaguacagcgaggaagccaaacugaacagagaggagauugauggggucaaacuugaaucuacuaggaucuaucaaauucuggcuauauacucaaccguggcgaguagcuugguccucgugguuucccugggagcaaucucuuuuuggaugugcucgaaugguagcuuacagugccggauuuguaucuga

SEQ ID NO: 138426 - RNA, 1701 nt, Artificial Sequence; identical to SEQ ID NO: 130704
  derived and/or modified CDS sequence (opt3) from hemagglutinin__InfluenzaA__AGR50085

SEQ ID NO: 138427 - RNA, 1701 nt, Artificial Sequence; identical to SEQ ID NO: 130704
  derived and/or modified CDS sequence (opt3) from hemagglutinin__InfluenzaA__AGR50096

SEQ ID NO: 138428 - RNA, 1701 nt, Artificial Sequence; identical to SEQ ID NO: 130704
  derived and/or modified CDS sequence (opt3) from hemagglutinin__InfluenzaA__AGR50107

SEQ ID NO: 138429 - RNA, 1701 nt, Artificial Sequence; identical to SEQ ID NO: 130897
  derived and/or modified CDS sequence (opt3) from hemagglutinin__InfluenzaA__AGR50118

SEQ ID NO: 138430 - RNA, 1701 nt, Artificial Sequence
  derived and/or modified CDS sequence (opt3) from hemagglutinin__InfluenzaA__AGR50129
augaaggccauccuggugguccuccuuuacaccuucgcuacagcaaacgccgacacucugugcauuggcuaucacgcgaauaacagcacggauaccguugacacaguguuggagaaaaauguaacugugacccauuccgucaacuuacuggaagauaagcacaaugggaaacuauguaagcucagaggaguggcuccccugcaucuugguaaaugcaacauagccggcuggauccuggggaauccugagugugaaucuuugucaacagcaaguagcugguccuacauuguugagaccucuucgucagacaacggaacuugcuauccaggcgauuuuaucgacuacgaggagcucagggagcagcugagcaguguguccucuuucgaacgguuugagauuuucccgaagacaagcuccuggcccaaucacgauucaaacaagggugucaccgccgcuuguccucaugcaggggccaaaaguuuuuauaagaaucugaucuggcucgugaaaaagggaaacagcuacccaaaauuaucuaaguccuauauaaaugacaagggcaaagaaguacugguucuuuggggcauccaccaccccucaacgagcgcugaucaacagaguuuguaccagaacgccgacgcguacguguucgucgggucuucccgcuauagcaagaaauuuaagccugagauugcaauccgaccaaaagugcgugaucaggagggaagaaugaauuacuauuggacucugguggaacccggugacaagauuaccuucgaggccacaggcaaccuagucguuccuagguacgcuuuugccauggaacggaacgcagggucgggaaucauaauuucugauacuccagugcaugacugcaauaccacaugucaaaccccgaaaggcgcuaucaacacgucccuccccuuccagaauauucacccuaucacuaucggucagugcccaaaguauguaaagucaacaaaacugcgccuugccaccgggcugagaaacgugcccaguauucagagcaggggauuguuuggcgcgauagccggcuucaucgaagggggauggacugguauggucgacggcugguacggguaucaucaccaaaaugaacagggauccggcuacgcagcugaucucaagucuacacagaacgccauugacgagaucaccaauaaagugaacagcguuauagagaagaugaauacgcaguuuaccgcuguggguaaagaguucaaccaccuggaaaagcggauugaaaauuuaaacaagaaagucgaugacggguuccuggauaucuggacauacaaugccgagcuccuugugcuguuggaaaacgagcgcacucuagacuaucaugauucaaauguaaagaaccuguacgagaaaguucgaagucaacucaagaacaaugcaaaagaaaucggcaacggauguuuugaguucuaucacaagugcgacaauaccuguauggaauccgugaagaacggcacauacgauuauccuaaauacagcgaggaagccaagcugaauagagaggagauugacggggucaaacuugaaucuacuaggaucuaucagauucuggcuauauacucaaccguggcgaguagcuugguccucgugguuucccugggagcaaucucuuuuuggaugugcucgaacgguagcuuacagugccggauuuguaucuga

SEQ ID NO: 138431 - RNA, 1701 nt, Artificial Sequence; identical to SEQ ID NO: 130704
  derived and/or modified CDS sequence (opt3) from hemagglutinin__InfluenzaA__AGR50140

SEQ ID NO: 138432 - RNA, 1701 nt, Artificial Sequence; identical to SEQ ID NO: 130899
  derived and/or modified CDS sequence (opt3) from hemagglutinin__InfluenzaA__AGR50151

SEQ ID NO: 138433 - RNA, 1698 nt, Artificial Sequence; identical to SEQ ID NO: 134746
  derived and/or modified CDS sequence (opt3) from hemagglutinin__InfluenzaA__AGR50162

SEQ ID NO: 138434 - RNA, 1701 nt, Artificial Sequence; identical to SEQ ID NO: 130704
  derived and/or modified CDS sequence (opt3) from hemagglutinin__InfluenzaA__AGR50174

SEQ ID NO: 138435 - RNA, 1701 nt, Artificial Sequence; identical to SEQ ID NO: 130743
  derived and/or modified CDS sequence (opt3) from hemagglutinin__InfluenzaA__AGR50185

SEQ ID NO: 138436 - RNA, 1701 nt, Artificial Sequence; identical to SEQ ID NO: 130704
  derived and/or modified CDS sequence (opt3) from hemagglutinin__InfluenzaA__AGR50196

SEQ ID NO: 138437 - RNA, 1701 nt, Artificial Sequence
  derived and/or modified CDS sequence (opt3) from hemagglutinin__InfluenzaA__AGR50207
augaaggccauccuggugguccuccuuuacaccuucgcuacagcaaacgccgacacucugugcauuggcuaucacgcgaauaacagcacggauaccguugacacaguguuggagaaaaauguaacugugacccauuccgucaacuuacuggaagauaagcacaaugggaaacuauguaagcucagaggaguggcuccccugcaucuugguaaaugcaacauagccggcuggauccuggggaauccugagugugaaucuuugucaacagcaaguagcugguccuacauuguugagaccucuucgucagacaacggaacuugcuauccaggcgauuuuaucgacuacgaggagcucagggagcagcugagcaguguguccucuuucgaacgguuugagauuuucccgaagacaagcuccuggcccaaucacgauucaaacaagggugucaccgccgcuuguccucaugcaggggccaaaaguuuuuauaagaaucugaucuggcucgugaaaaagggaaaaagcuacccaaaguuaucuaaguccuauauaaacgacaaaggcaaggaaguacugguucuuuggggcauccaccaccccucaacgagcgcugaucaacagaguuuguaccagaaugccgacgcguacguguucgucgggucuucccgcuauagcaaaaaguuuaaaccugagauugcaauccgaccaaaggugcgugaucaggagggaagaaugaacuacuauuggacucugguggaacccggugacaaaauuaccuucgaggccacaggcaaucuagucguuccuagguacgcuuuugccauggaacggaacgcagggucgggaaucauaauuucugauacuccagugcaugacugcaacaccacaugucaaaccccgaagggcgcuaucaauacgucccuccccuuccagaacauucacccuaucacuaucgguaagugcccaaaauauguaaagucaacaaaacugcgccuugccaccgggcugagaaaugugcccaguauucagagcaggggauuguuuggcgcgauagccggcuucaucgaagggggauggacugguauggucgacggcugguacggguaucaucaccagaacgaacaaggauccggcuacgcagcugaucucaagucuacacagaaugccauugacgagaucaccaacaaagugaauagcguuauagagaagaugaacacgcaguuuaccgcuguggguaaggaguucaaucaccuggaaaaacggauugaaaacuuaaauaagaaagucgaugacggguuccuggauaucuggacauacaacgccgagcuccuugugcuguuggaaaaugagcgcacucuagacuaucaugauucaaacguaaagaaucuguacgagaaaguucgaagucagcucaagaacaacgcaaaggaaaucggcaauggauguuuugaguucuaucacaaaugcgacaacaccuguauggaauccgugaagaauggcacauacgauuauccuaaauacagcgaggaagccaagcugaacagagaggagauugacggggucaaacuugaaucuacuaggaucuaucaaauucuggcuauauacucaaccguggcgaguagcuugguccucgugguuucccugggagcaaucucuuuuuggaugugcucgaaugguagcuuacagugccggauuuguaucuga

SEQ ID NO: 138438 - RNA, 1701 nt, Artificial Sequence; identical to SEQ ID NO: 130704
  derived and/or modified CDS sequence (opt3) from hemagglutinin__InfluenzaA__AGR50218

SEQ ID NO: 138439 - RNA, 1701 nt, Artificial Sequence; identical to SEQ ID NO: 130704
  derived and/or modified CDS sequence (opt3) from hemagglutinin__InfluenzaA__AGR50229

SEQ ID NO: 138440 - RNA, 1701 nt, Artificial Sequence; identical to SEQ ID NO: 130899
  derived and/or modified CDS sequence (opt3) from hemagglutinin__InfluenzaA__AGR50240

SEQ ID NO: 138441 - RNA, 1701 nt, Artificial Sequence; identical to SEQ ID NO: 130757
  derived and/or modified CDS sequence (opt3) from hemagglutinin__InfluenzaA__AGR50251

SEQ ID NO: 138442 - RNA, 1701 nt, Artificial Sequence
  derived and/or modified CDS sequence (opt3) from hemagglutinin__InfluenzaA__AGR50262
augaaggccauccuggugguccuccuuuacaccuucgcuacagcaaacgccgacacucugugcauuggcuaucacgcgaauaacagcacggauaccguugacacaguguuggagaaaaauguaacugugacccauuccgucaacuuacuggaagauaagcacaaugggaaacuauguaagcucagaggaguggcuccccugcaucuugguaaaugcaacauagccggcuggauccuggggaauccugagugugaaucuuugucaacagcaaguagcugguccuacauuguugagaccucuucgucagacaacggaacuugcuauccaggcgauuuuaucgacuacgaggagcucagggagcagcugagcaguguguccucuuucgaacgguuugagauuuucccgaagacaagcuccuggcccaaucacgauucaaacaagggugucaccgccgcuuguccucaugcaggggccaaaaguuuuuauaagaaucugaucuggcucgugaaaaagggaaacagcuacccaaaauuaucuaaguccuauauaaaugacaagggcaaagaaguacugguucuuuggggcauccaccaccccucaacgagcgcugaucaacagaguuuguaccagaacgccgacgcguacguguucgucgggucuucccgcuauagcaagaaauuuaagccugagauugcaauccgaccaaaagugcgugaucaggagggaagaaugaauuacuauuggacucugguggaacccggugacaagauuaccuucgaggccacaggcaaccuagucguuccuagguacgcuuuugccauggaacggaacgcagggucgggaaucauaauuucugauacuccagugcaugacugcaauaccacaugucaaaccccgaaaggcgcuaucaacacgucccuccccuuccagaauauucacccuaucacuaucgguaagugcccaaaguauguaaaaucaacaaagcugcgccuugccaccgggcugagaaacgugcccaguauucagagcaggggauuguuuggcgcgauagccggcuucaucgaagggggauggacugguauggucgacggcugguacggguaucaucaccagaaugaacaaggauccggcuacgcagcugaucucaaaucuacacagaacgccauugacgagaucaccaauaaggugaacagcguuauagagaaaaugaauacgcaguuuaccgcuguggguaaggaguucaaccaccuggaaaagcggauugaaaauuuaaacaaaaaggucgaugacggguuccuggauaucuggacauacaaugccgagcuccuugugcuguuggaaaacgagaaaacucuagacuaucaugauucaaauguaaagaaccuguacgagaaaguucgcagucagcucaagaacaaugcaaaggaaaucggcaacggauguuuugaguucuaucacaaaugcgacaauaccuguauggaauccgugaagaacggcacauacgauuauccuaaauacagcgaggaagccaagcugaaucgagaggagauugacggggucaaacuugaaucuacuagaaucuaucaaauucuggcuauauacucaaccguggcgaguagcuugguccucgugguuucccugggagcaaucucuuuuuggaugugcucgaacgguagcuuacagugcaggauuuguaucuga

SEQ ID NO: 138443 - RNA, 1701 nt, Artificial Sequence; identical to SEQ ID NO: 130704
  derived and/or modified CDS sequence (opt3) from hemagglutinin__InfluenzaA__AGR50273

SEQ ID NO: 138444 - RNA, 1701 nt, Artificial Sequence
  derived and/or modified CDS sequence (opt3) from hemagglutinin__InfluenzaA__AGR50284
augaaggccauccuggugguccuccuuuacaccuucgcuacagcaaacgccgacacucugugcauuggcuaucacgcgaauaacagcacggauaccguugacacaguguuggagaaaaauguaacugugacccauuccgucaacuuacuggaagauaagcacaaugggaaacuauguaagcucagaggaguggcuccccugcaucuugguaaaugcaacauagccggcuggauccuggggaauccugagugugaaucuuugucaacagcaaguagcugguccuacauuguugagaccucuucgucagacaacggaacuugcuauccaggcgauuuuaucgacuacgaggagcucagggagcagcugagcaguguguccucuuucgaacgguuugagauuuucccgaagacaagcuccuggcccaaucacgauucaaacaagggugucaccgccgcuuguccucaugcaggggccaaaaguuuuuauaagaaucugaucuggcucgugaaaaagggaaacagcuacccaaaauuaucuaaguccuauauaaaugacaagggcaaagaaguacugguucuuuggggcauccaccaccccucaacgagcgcugaucaacagaguuuguaccagaacgccgacgcguacguguucgucgggucuucccgcuauagcaagaaauuuaagccugagauugcaauccgaccaaaagugcgugaucaggagggaagaaugaauuacuauuggacucugguggaacccggugacaagauuaccuucgaggccacaggcaaccuagucguuccuagguacgcuuuugccauggaacggaacgcagggucgggaaucauaauuucugauuccccagugcaugacugcaauacuaccugucaaacaccgaaaggcgcuaucaacaccucacuccccuuccagaauauucacccuaucacgaucgguaagugcccaaaguauguaaaaaguacuaagcugcgccuugccacagggcugagaaacgugcccagcauucaguccaggggauuguuuggcgcgauagccggcuucaucgaagggggauggaccgguauggucgacggcugguacggguaucaucaccagaaugaacaaggaucuggcuacgcagcugaucucaaaagcacucagaacgccauugacgagaucacaaauaaggugaacucaguuauagagaaaaugaauacccaguuuacggcuguggguaaggaguucaaccaccuggaaaagcggauugaaaauuuaaacaaaaaggucgaugacggguuccuggauaucuggaccuacaaugccgagcuccuugugcuguuggaaaacgagcgcacacuagacuaucaugauaguaauguaaagaaccuguacgagaagguucgaucccagcucaaaaacaaugcaaaggaaaucggcaacggauguuuugaguucuaucacaagugcgacaauacuuguauggaaagcgugaaaaacggcaccuacgauuauccuaaguacucugaggaagccaaacugaauagagaggagauugacggggucaaacuugaaucaacaaggaucuaucaaauucuggcuauauacaguacuguggcgagcuccuugguccucgugguuucucugggagcaaucucguuuuggaugugcagcaacgguuccuuacagugccggauuuguaucuga

SEQ ID NO: 138445 - RNA, 1701 nt, Artificial Sequence; identical to SEQ ID NO: 131447
  derived and/or modified CDS sequence (opt3) from hemagglutinin__InfluenzaA__AGR50295

SEQ ID NO: 138446 - RNA, 1701 nt, Artificial Sequence; identical to SEQ ID NO: 130704
  derived and/or modified CDS sequence (opt3) from hemagglutinin__InfluenzaA__AGR50306

SEQ ID NO: 138447 - RNA, 1701 nt, Artificial Sequence; identical to SEQ ID NO: 130704
  derived and/or modified CDS sequence (opt3) from hemagglutinin__InfluenzaA__AGR50317

SEQ ID NO: 138448 - RNA, 1701 nt, Artificial Sequence; identical to SEQ ID NO: 138437
  derived and/or modified CDS sequence (opt3) from hemagglutinin__InfluenzaA__AGR50328

SEQ ID NO: 138449 - RNA, 1701 nt, Artificial Sequence
  derived and/or modified CDS sequence (opt3) from hemagglutinin__InfluenzaA__AGR50339
augaaggccauccuggugguccuccuuuacaccuucgcuacagcaaacgccgacacucugugcauuggcuaucacgcgaauaacagcacggauaccguugacacaguguuggagaaaaauguaacugugacccauuccgucaacuuacuggaagauaagcacaaugggaaacuauguaagcucagaggaguggcuccccugcaucuugguaaaugcaacauagccggcuggauccuggggaauccugagugugaaucuuugucaacagcaaguagcugguccuacauuguugagaccucuucgucagacaacggaacuugcuauccaggcgauuuuaucgacuacgaggagcucagggagcagcugagcaguguguccucuuucgaacgguuugagauuuucccgaagacaagcuccuggcccaaucacgauucaaacaagggugucaccgccgcuuguccucaugcaggggccaaaaguuuuuauaagaaucugaucuggcucgugaaaaagggaaacagcuacccaaaauuaucuaaguccuauauaaaugacaagggcaaagaaguacugguucuuuggggcauccaccaccccucaacgagcgcugaucaacagaguuuguaccagaacgccgacgcguacguguucgucgggucuucccgcuauagcaagaaauuuaagccugagauugcaauccgaccaaaagugcgugaucaggagggaagaaugaauuacuauuggacucugguggaacccggugacaagauuaccuucgaggccacaggcaaccuagucguuccuagguacgcuuuugccauggaacggaacgcagggucgggaaucauaauuucugauacuccagugcaugacugcaauaccacaugucaaaccuccaaaggcgcuaucaacacgucacucccguuccagaauauucaccccaucacuaucgguaagugcccuaaguauguaaaaaguacaaagcugcgccuugccaccgggcugagaaacgugccaagcauucaguccaggggauuguuuggcgcgauagccggcuucaucgaagggggauggacugguauggucgacggcugguacggguaucaucaccagaaugaacaaggaucuggcuacgcagcugaucucaaaagcacacagaacgccauugacgagaucaccaauaaggugaacucaguuauagagaaaaugaauacgcaguuuaccgcuguggguaaggaguucaaccaccuggaaaagcggauugaaaauuuaaacaaaaaggucgaugacggguuccuggauaucuggacauacaaugccgagcuccuugugcuguuggaaaacgagcgcacucuagacuaucaugauaguaauguaaagaaccuguacgagaagguucgaucccagcucaaaaacaaugcaaaggaaaucggcaacggauguuuugaguucuaucacaagugcgacaauaccuguauggaaagcgugaaaaacggcacauacgauuaucccaaguacucugaggaagccaaacugaauagagaggagauugacggggucaaacuugaaucaacuaggaucuaucaaauucuggcuauauacaguaccguggcgagcuccuugguccucgugguuucucugggagcaaucucguuuuggaugugcagcaacgguuccuuacagugccggauuuguaucuga

SEQ ID NO: 138450 - RNA, 1701 nt, Artificial Sequence
  derived and/or modified CDS sequence (opt3) from hemagglutinin__InfluenzaA__AGR50350
augaaggccauccuggugguccuccuuuacaccuucgcuacagcaaacgccgacacucugugcauuggcuaucacgcgaauaacagcacggauaccguugacacaguguuggagaaaaauguaacugugacccauuccgucaacuuacuggaagauaagcacaaugggaaacuauguaagcucagaggaguggcuccccugcaucuugguaaaugcaacauagccggcuggaucauggggaauccugagugugaaucucugucaacagcaaguagcugguccuacauuguugagaccucuucgucagacaacggaacuugcuauccaggcgauuuuaucgacuacgaagaguugagggagcagcucagcaguguguccucuuucgaacgguuugagauuuucccgaagacaagcuccuggcccaaucacgauucaaacaagggugucaccgccgcuuguccucaugcaggggccaaaaguuuuuauaagaaucugaucuggcuggugaaaaagggaaacagcuacccaaaacucucuaaguccuauauaaaugacaagggcaaagaaguauuaguucuguggggcauccaccaccccucaacgagcgcugaucaacagagucuuuaccagaacgccgacgcguacguguucgucgggucuucccgcuauagcaagaaauuuaagccugagauugcaauccgaccaaaagugcgugaucaggagggaagaaugaauuacuauuggacuuugguggaacccggugacaagauuaccuucgaggccacaggcaaccuggucguuccuagguacgcuuuugccauggaacggaacgcagggucgggaaucauaauuucugauacuccagugcaugacugcaauaccacaugucaaaccccgaaaggcgcuaucaacacgucccuacccuuccagaauauucacccuaucacuaucgguaagugcccaaaguauguaaaaucaacaaagcuccgccuggccaccgggcuuagaaacgugcccaguauucagagcaggggacuguuuggcgcgauagccggcuucaucgaagggggauggacugguauggucgacggcugguacggguaucaucaccagaaugaacaaggauccggcuacgcagcugauuugaaaucuacacagaacgccauugacgagaucaccaauaaggugaacagcguuauagagaaaaugaauacgcaguuuaccgcuguggguaaggaguucaaccaccucgagaagcggauugaaaaucugaacaaaaaggucgaugacggguucuuagauaucuggacauacaaugccgagcugcucgugcuucuggaaaacgagcgcacuuuggacuaucaugauucaaauguuaaaaaccuauacgagaagguacgaagucagcugaaaaacaaugcaaaggaaaucggcaacggauguuuugaguucuaucacaagugcgacaauaccuguauggaauccgugaaaaacggcacauacgauuauccuaaguacagcgaggaagccaaacucaauagagaggagauugacggggucaagcuggaaucuacuaggaucuaucaaauucuugcuauauacucaaccguggcgaguagccuggucuuggugguuucccucggagcaaucucuuuuuggaugugcucgaacgguagccugcagugccggauuuguaucuga

SEQ ID NO: 138451 - RNA, 1698 nt, Artificial Sequence
  derived and/or modified CDS sequence (opt3) from hemagglutinin__InfluenzaA__AGR50361
augaaggugcagcugcucguccuucugugcaccuucacagccacuuacgcugacacgaucuguauuggcuaucacgcaaacaauagcaccgauacaguugacacuguguuggagaaaaacguaaccgugacacauuccgucaauuuacuggaaaacucucacaaugggaagcuaugccuccugaaaggaauagcgccccuucaacuggguaacuguucaguggccggcuggaucuuggggaauccugagugcgaacuccugauuaguaaggagagcugguccuacaucguugaaaaaccaaacccggagaauggaaccuguuaucccggccauuuugcugauuacgaggaacugagagagcagcucucuucggugagcucauucgaaagguuugagauuuucccuaaggagaguuccuggccaaaccacacugucacaggugugucugccagcugcucccauaauggggaaucaaguuuuuaucggaacuuacuguggcuuaccggaaagaauggcuuguaccccaaccugagcaaaucuuaugcaaauaacaaggagaaagaaguucuaguacucuggggcgugcaccacccuccaaacaucgucgaccagaagacgcuguaccgcacugagaaugccuacguguccguggucucaagccauuauagucgaaaauucacccccgaaauagcuaagcguccuaagguuagagaucaggaggggaggaucaacuacuauuggacacuucuggagccaggagacacuauuaucuuugaagcaaaugguaacuugauugccccgcgguacgcuuucgcccucucucgcggcuuuggguccggaaucauaaauagcaacgcgcccaugggcaaaugugaugcaaagugccaaaccccucagggugccauuaauucgucucugccauuccagaacgugcaccccguaacaaucggggaguguccuaaauaugugagauccgcuaaguuaaggauggucaccggacugcggaauauuccaucaauccagagucgcggccucuuuggcgccaucgcaggguucauugaaggagguuggacgggcaugguggacgggugguacggauaucaucaccaaaacgagcagggcagcgguuacgcugccgaucagaaauccacucagaaugcgauaaacgggaucacaaauaagguuaacucugugauugaaaagaugaauacccaauuuacugccgucggcaaggaguucaacaaacuugagcgaagaauggaaaaccugaauaaaaagguggacgauggauucaucgacauauggacauacaacgcagaguugcuaguacugcucgaaaaugagaggacccuggauuuucacgacagcaacguuaaaaaucuuuaugaaaaggugaaaucacagcugaagaacaaugcuaaggagauuggcaacgggugcuucgaguuuuaccauaaauguaaugacgaaugcauggagagugucaagaacggaacguaugauuaccccaaauauuccgaagagagcaaguugaaucgggagaaaaucgacggugugaagcucgaaucuaugggcgucuaccagauccuggccauuuauucaaccguggcuaguagcuuaguucugcuagugucccucggggccaucucuuucuggaugugcucgaacggaagccugcaaugucguauuugcauauga

SEQ ID NO: 138452 - RNA, 1701 nt, Artificial Sequence
  derived and/or modified CDS sequence (opt3) from hemagglutinin__InfluenzaA__AGT18718
augaaggugauccuggucguucuccuuuacaccuucgccacagcuaacgcagacacucugugcauuggcuaucacgccaauaacagcacggauaccguggacacaguauuggagaaaaaugugacugucacccauuccgugaacuuacuggaagauaagcacaaugggaaacuauguaagcucagaggaguugcgccccugcaucuugguaaaugcaacauagcuggcuggauccuggggaauccugagugugaaucuuugucaacagccaguagcugguccuacauuguggagaccucuucgucagacaacggaacuugcuauccaggcgauuuuaucaauuacgaagaacucagggagcagcugagcagugucuccucuuucgaacgguuugagauuuucccgaagacaagcuccuggcccaaccacgacucaaauaagggugugaccgcagccuguccucaugcuggggcaaaaaguuuuuauaagaaccugaucuggcucgugaaaaagggaaauagcuacccaaaauuaucuaaguccuauauaaacgauaagggcaaagaaguucuggugcuuuggggcauccaccaccccucaacgacugccgaccaacagagcuuguaccagaaugcugaugccuacgucuucguggggaccagucgcuauucuaagaaauuuaagccugagauugcgauccgaccaaaagugcgugaccaggagggaagaaugaacuacuauuggacacugauugaacccggugauaagaucacuuucgaggcaaccggcaaccuagucguuccuagguacgccuuugcuauggaacggaaugccggguccggaauaauuaucagcgacacaccagugcaugauugcaacaccacgugucaaacuccggagggcgcaauuaauacaucgcuccccuuccagaacauccacccuaucaccauugguaaaugcccaaaguauguaaagucuacuaaacugcgccuugcuacagggcugagaaaugugcccuccauacagucaaggggauuguuuggcgccaucgcgggcuucauugaagggggauggaccgguauggucgacggcugguacggguaucaucaccagaacgagcaaggaaguggcuacgccgcagaccucaagagcacgcagaaugcuaucgauaaaauaaccaacaagguaaauuccguuauugagaaaaugaacacacaguuuacugccguggguaaggaguucaaucaccuggagaagcggaucgaaaacuuaaauaaaaaggucgacgauggguuccuggacaucuggaccuacaacgcugagcuccuugugcuguuggaaaaugagcgcacacuagauuaucaugacucuaacguuaaaaaccuguacgagaagguacgaaaucagcucaaaaacaaugccaaggaaauuggcaacggauguuuugaguucuaucacaagugcgauaauacuuguauggaaagcgugaaaaacggcaccuacgacuauccuaaguacucagaggaagcaaaacugaauagagagaagaucgauggggucaaacuugagaguacaaggauuuaucaaauacuggccaucuacuccaccguggcuagcucuuugguccucgugguuucacugggagcgauuaguuuuuggaugugcagcaacgguuccuuacagugccggaucuguaucuga

SEQ ID NO: 138453 - RNA, 1701 nt, Artificial Sequence
  derived and/or modified CDS sequence (opt3) from hemagglutinin__InfluenzaA__AGT18720
augaaggugauccuggucguucuccuuuacaccuucgccacagcuaacgcagacacucugugcauuggauaucacgccaauaacagcacggauaccguggacacaguauuggagaaaaaugugacugucacccauuccgugaacuuacuggaagauaagcacaaugggaaacuauguaagcucagaggaguugcgccccugcaucuugguaaaugcaacauagcuggcuggauccuggggaauccugagugugaaucuuugucaacagccaguagcugguccuacauuguggagaccucuucgucagacaacggaacuugcuauccaggcgauuuuaucaauuacgaagaacucagggagcagcugagcagugucuccucuuucgaacgguuugagauuuucccgaaggcaagcuccuggcccaaccacgacucaaauaagggugugacagccgcuuguccucaugcaggggccaaaaguuuuuauaagaaccugaucuggcucguuaaaaagggaaauagcuacccaaaauuaucuaaguccuauauaaacgauaagggcaaagaaguacuggugcuuuggggcauccaccaccccaauaccacggcugaccaacagucauuguaccagaacgccgaugcguacgucuucguggggacuagccgcuauaguaagaaauuuaagccugagauugcaauccgaccaaaagugcgugaccaggagagaaggaugaacuacuauuggacccugauugaacccggagauaagaucacauucgaggccacugguaaucuagucguuccucgguacgcuuuugccauggaacgcaacgcaggcucugggauaauuaucuccgacaccccagugcaugauugcaauacaaccugucaaacgccggagggagcuauuaacacuagccuccccuuccagaauauccacccuaucacaauuggcaaaugcccaaaguauguaaagucgaccaaacugagacuugccacuggucugaggaacgugcccucuauacagucccggggguuguuuggagcgaucgccggcuucauugaaggcggguggacaggaauggucgacgguugguacggcuaucaucaccagaaugagcaagggucaggauacgcagcugaccucaagaguacccagaacgccaucgauaaaauaacgaauaaggugaacagcguuauugagaaaaugaauacccaguuuacagcugugggcaaggaguucaaccaccuggagaagcgcaucgaaaauuuaaacaaaaaggucgacgaugguuuccuggacaucuggacuuacaaugccgagcuccuugugcuguuggaaaacgagcgaacccuagauuaucaugacuccaacguuaaaaaucuguacgagaagguaagaaaccagcucaaaaauaacgcaaaggaaauugggaauggcuguuuugaguucuaucacaagugcgauaacacauguauggaaucugugaaaaauggaacuuacgacuauccuaaguacagcgaggaagccaaacugaacagggagaagaucgauggcgucaaacuugagucaacccggauuuaucaaauacuggcuaucuacaguacaguggcguccagcuugguccucgugguuucucugggggcaauuucauuuuggaugugcaguaauggcagcuuacagugccguaucuguaucuga

SEQ ID NO: 138454 - RNA, 1701 nt, Artificial Sequence
  derived and/or modified CDS sequence (opt3) from hemagglutinin__InfluenzaA__AGT18721
augaaggccauccuggugguccuccuuuacaccuucgcuacagcaaacgccgacacucugugcauuggcuaucacgcgaauaacagcacggauaccguugacacaguguuggagaaaaauguaacugugacccauuccgucaacuuacuggaagauaagcacaaugggaaacuauguaagcucagaggaguggcuccccugcaucuugguaaaugcaacauagccggcuggauccuggggaauccugagugugaaucuuugucaacagcaaguagcugguccuacauuguugagaccucuucgucagacaacggaacuugcuauccaggcgauuuuaucaauuacgaagaacucagggagcagcugagcaguguguccucuauucaacggagcgaaaucuguacaaagaccuccucauggccgaaccacgacaguaauaagggugucacggccgcuugcccccaugcaggggccaagagcuucuauaagaaccugauauggcucgugaaaaagggaaauucuuacccuaaauuauccaagucauauaucaacgauaagggcaaagagguacugguucuuuggggcauucaccaccagaauagccgcgggcaucagcagaguuuguaccaaaacgcugacgccuacguguuugucggaacuucucgauauuccaagaaauucaagccagaaaucgcgauucgucccaaagugaaggagcaggaugguagaauggacuacuauuggacccugaucgagccuggcgauaaaauaacauuugaagcaacugggaaccuaguggucccaagguacgccuucgcuauggagcggaaugccggaagcggcauuaucauuucggacacccccguucacgauuguaacacaaccugccagacgccugaaggugcaaucaauacuucucucccauuucagaacauccauccgauuacaauagggaagugucccaaguaugugaaauccaccaagcugcgccuugcuacuggacugagaaauguaccuucaauccaaaguaggggcuuguucggcgccauugcgggguuuaucgagggagguuggacaggcaugguggacgggugguacggauaucaccaccagaacgaacagggcagcgguuacgccgcagaccucaaauccacccagaaugcuauagauaagauuacgaacaaagucaauucugugaucgagaagaugaacacccaauucacagccguugggaaggaguuuaaucaucuggaaaaacggaucgagaacuuaaauaagaaaguggacgauggcuuccuggacauuuggacuuacaacgcugaacuccuuguccuguuggagaaugaacgcacccuagauuaucacgacagcaacgugaagaaccuguacgagaaaguacgaaaucagcucaagaacaaugccaaggagaucggaaacggcugcuuugaguucuaucauaaaugugauaauacaugcauggagucaguuaagaacgggacuuacgacuauccaaaauacagugaagaggcaaagcugaauagagagaaaauugauggagugaaacuugaauccaccaggauauaucagauccuggccauuuacagcacagucgcuucuucauuggugcucgucgugagucugggugcgaucagcuucuggaugugcuccaacggcucuuuacaaugucggaucugcauuuga

SEQ ID NO: 138455 - RNA, 1701 nt, Artificial Sequence
  derived and/or modified CDS sequence (opt3) from hemagglutinin__InfluenzaA__AGT18722
augaaggccauccuggugguccuccuuuacaccuucgcuacagcaaacgccgacacucugugcauuggcuaucacgcgaauaacagcacggauaccguugacacaguguuggagaaaaauguaacugugacccauuccgucaacuuacuggaagauaagcacaaugggaaacuauguaagcucagaggaguggcuccccugcaucuugguaaaugcaacauagccggcuggauccuggggaauccugagugugaaucuuugucaacagcaaguagcugguccuacauuguugagaccucuaagucgaacaauaggacuugcuauccaggagacuuuaucaacuacgaagaacuccgggagcagcugucaagcgugaguuccuucgaacgcuuugagauuuucccgaagacaucuagcuggcccaaucacgauuccaacaaaggcgucaccgccgcuuguccucaugccggugcaaagucauuuuauaaaaaucugaucuggcucgugaagaaagggaacaguuacccaaaguuaagcaagucuuauauaaaugacaaaggaaaggaaguacugguucuuuggggcauccaccaccccuccacgacugcugaucaacagucauuguaccagaacgccgacgcguacguguucgucggcaccagccgauauaguaaaaaguuuaaaccugagauugcaauccguccaaaggugagagaucaggaggggaggaugaacuacuauuggacacugauugaacccggagacaaaaucacuuucgaggccaccgguaaucuaguggucccucgguacgcuuuugccauggaacgcaacgcaggcucugggauaauuaucuccgauacaccaguucaugacugcaauaccacgugucaaacuccggagggagcuauuaacacaagccuccccuuccagaauauccacccuaucaccauuggcaagugcccaaaguaugugaaaucgacuaagcugagacuugccacaggucugaggaacguacccucuauacagucccggggguuguuuggagcgaucgccggcuucauugaaggcggguggaccggaaugguggaugguugguacggcuaucaucaccagaaugagcaagggucaggauacgcagcugaccucaaaaguacgcagaacgccaucgacaagauaaccaauaaagucaacagcgugauugagaagaugaauacacaguuuacugcuguuggcaaggaguucaaccaccuggagaaacgcaucgaaaauuuaaacaagaaaguggaugacgguuuccuggauaucuggaccuacaaugccgagcuccuuguccuguuggaaaacgagcgaacacuagacuaucaugauuccaacgugaagaaucuguacgagaaaguaagaaaccagcucaagaauaacgcaaaggaaauugggaauggcuguuuugaguucuaucacaaaugcgacaacacuuguauggaaucuguuaagaauggaaccuacgauuauccuaaauacagcgaggaagccaagcugaacagggagaaaaucgacggcgugaaguuagagucaacacggauuuaucaaauacuggcuaucuacaguaccgucgcguccagcuuggugcucgucgugucucugggggcaauuucauuuuggaugugcaguaauggaagccuucagugccguaucuguaucuga

SEQ ID NO: 138456 - RNA, 1701 nt, Artificial Sequence
  derived and/or modified CDS sequence (opt3) from hemagglutinin__InfluenzaA__AGT18723
augaaggccauccuggugguccuccuuuacaccuucgcuacagcaaacgccgacacucugugcauuggcuaucacgcgaauaacagcacggauaccguugacacaguguuggagaaaaauguaacugugacccauuccgucaacuuacuggaagauaagcacaaugggaaacuauguaagcucagaggaguggcuccccugcaucuugguaaaugcaacauagccggcuggauccuggggaauccugagugugaaucuuugucaacagcaaguagcugguccuacauuguugagaccucuaagacuaacaauaggacaugcuauccaggagacuuuaucaacuacgaagaacuccgggagcagcugucgucagugagcaguuucgaacgcuuugagauuuucccgaagaccuccucuuggcccaaucacgauagcaacaaaggcgucacggccgcuuguccucaugccggugcaaaguccuuuuauaaaaaucugaucuggcucgugaagaaagggaacucauacccaaaguuaaguaagagcuauauaaaugacaaaggaaaggaaguacugguucuuuggggcauccaccaccaaaacaaaaaggcugagcagcagacucccuaccagaacgccgaugcguacguguucgucggcaccucucgauauuccaaaaaguuuaaaccugagauugcaauccguccaaaggugagagaccaagaagggaggauggauuacuauuggacauugauugagcccggagacaagaucacuuucgaagccaccgguaaucugguggucccucgguacgcuuuugccauggagcgcaacgcaggcucagggauaauuaucagcgauacaccaguucaugacugcaauaccacgugucagacuccggaaggagcuauuaacacaagucuacccuuccagaauauccacccuaucaccauuggcaaaugcccaaaguaugugaaaucuacuaagcucagacuggccacaggucuuaggaacguacccuccauacagagccgggggcuguuuggagcgaucgccggcuucauugagggcggguggaccggaaugguggaugguugguacggcuaucaucaccaaaaugagcaggggucgggauacgcagcugacuugaaaucuacgcagaacgccaucgacaagauaaccaauaaggucaacuccgugauugagaaaaugaauacacaguuuacugcuguuggcaaggaguucaaccaccucgaaaaacgcaucgagaaucugaacaagaaaguggaugacgguuucuuagauaucuggaccuacaaugccgaacugcucguccuucuggagaacgagcgaacauuggacuaucaugauucaaacgugaagaaucuauacgaaaagguaagaaaccaacugaaaaauaacgcaaaggagauugggaauggcuguuuugaguucuaucacaaaugcgacaacacuuguauggaaaguguuaagaauggaaccuacgauuauccuaaauacagcgaagaggccaagcucaacagggagaagaucgacggcgugaaacuggaauccacacggauuuaucagauacuugcuaucuacucuaccgucgcgagcucacugguguuggucgugagucucggggcaauuuccuuuuggaugugcagcaauggaucucugcagugccguaucuguaucuga

SEQ ID NO: 138457 - RNA, 1701 nt, Artificial Sequence
  derived and/or modified CDS sequence (opt3) from hemagglutinin__InfluenzaA__AGT18724
augaaggccauccuggugguccuccuuuacaccuucgcuacagcaaacgccgacacucugugcauuggcuaucacgcgaauaacagcacggauaccguugacacaguguuggagaaaaauguaacugugacccauuccgucaacuuacuggaagauaagcacaaugggaaacuauguaagcucagaggagugguuccccugcaucuugguaaaugcaacauagcuggcuggauccuggggaauccugagugugaaucuuugucaacagccaguagcugguccuacauuguggagaccucuaagacuaacaauaggacaugcuauccaggagacuuuaucaacuacgaagaacuccgggagcagcugucgucagucagcaguuucgaacgcuuugagauuuucccgaagaccuccucuuggcccaaucacgauagcaacaaaggcgugacggcagccuguccucaugcuggugcaaaguccuuuuauaaaaaucugaucuggcucguaaagaaagggaacucauacccaaaguuaaguaagagcuauauaaaugacaaaggaaaggaaguucuggugcuuuggggcauccaccaccccucuacuaccgccgaucaacagacauuguaccagaacgcugacgccuacgucuucgugggcacuucccgauauucaaagaaguuuaaaccugagauugcgauccguccaaaggugagagaucaggaggggaggaugaacuacuaucggacccugauugaacccgagaauaaaaucacauucgaagcaaccggaaaccuagucguuccucgcuacgccuuugcuauggagagaaaugccgguagcggcauaauuaucagugacacgccagugcaugauugcaacacuacaugucaaaccccggaaggggcaauuaauacuucucuccccuuccagaacauccacccuaucacaauuggaaagugcccaaaguauguaaaauccaccaagcugaggcuugcuacgggccugcggaaugugcccagcauacagucgcgcgguuuguuuggggccaucgcgggauucauugagggcggcuggaccgggauggucgacggaugguacgguuaucaucaccagaacgagcaaggcucuggguacgccgcagaucucaaauccacacagaaugcuaucgacaagauaacuaacaaaguuaauucagugauugaaaagaugaacacccaguuuacagccgugggaaaggaguucaaucaccuggaaaaacgaaucgagaacuuaaauaagaaagucgacgauggcuuccuggacaucuggacuuacaacgcugaacuccuugugcuguuggagaacgagagaacccuagauuaucaugacaguaauguaaagaaccuguacgaaaaaguuaggaaucagcucaagaacaaugccaaggagauugguaacggguguuuugaguucuaucacaaaugcgauaauacauguauggagagcgugaagaacggcaccuacgacuauccuaaauacuccgaagaggcaaagcugaaucgggagaaaaucgauggagucaaacuugaaucuacucguauuuaucaaauacuggccaucuacagcacgguggcuucaaguuugguccucgugguuucccugggcgcgauuagcuuuuggaugugcucuaacgggucauuacagugccgcaucuguaucuga

SEQ ID NO: 138458 - RNA, 1701 nt, Artificial Sequence
  derived and/or modified CDS sequence (opt3) from hemagglutinin__InfluenzaA__AGT18725
augaaggugauccuggucguucuccuuuacaccuucgccacagcuaacgcagacacucugugcauuggcuaucacgccaauaacagcacggauaccguggacacaguauuggagaaaaaugugacugucacccauuccgugaacuuacuggaagauaagcacaaugggaaacuauguaagcucagaggaguugcgccccugcaucuugguaaaugcaacauagcuggcuggauccuggggaauccugagugugaaucuuugucaacagccaguagcugguccuacauuguggagaccucuucgucagacaacggaacuugcuauccaggcgauuuuaucaauuacgaagaacucagggagcagcugagcagugucuccucuuucgaacgguuugagauuuucccgaagacaagcuccuggcccaaccacgacucaaauaagggugugaccgcagccuguccucaugcuggggcaaaaaguuuuuauaagaaccugaucuggcucguuaaaaagggaaauagcuacccaaaauuaucuaaguccuauauaaacgauaagggcaaagaaguacuggugcuuuggggcauccaccaccccucaacgagcgccgaccaacagaguuuguaccagaaugcugaugccuacgucuucguggggacuucucgcuauuccaagaaauuuaagccugagauugcgauccgaccaaaagugcgugaccaggagggaagaaugaacuacuauuggacccuggucgaacccggugauaagauuacauucgaggcaacuggcaaccuaguugugccuagguacgccuuugcuauggaacggaaugccgggagcggaaucauaauuucggacaccccaguacaugauugcaacacaaccugucaaacgccggagggcgcaaucaauacuucucuccccuuccagaacauucacccuaucacaaucgguaaaugcccaaaguaugugaaguccaccaaacugcgccuugcuacugggcugagaaauguccccucaauucagaguaggggauuguuuggcgccauagcgggcuucaucgaagggggauggacagguaugguggacggcugguacggguaucaucaccagaacgagcaaggaagcggcuacgccgcagaccucaaguccacccagaaugcuauugauaaaaucacgaacaagguuaauucugugauagagaaaaugaacacccaguuuacagccgucgguaaggaguucaaucaccuggagaagcggauugaaaacuuaaauaaaaagguggacgauggguuccuggacaucuggacuuacaacgcugagcuccuuguacuguuggaaaaugagcgcacccuagauuaucaugacagcaacguuaaaaaccuguacgagaaggugcgaacacagcucaaaaauaacgccaaggaaaucggcaauggauguuuugaguucuaucacaagugcgauaacacuuguauggaaucagucaaaaauggcaccuacgacuauccuaaguacagugaggaagcaaaacugaacagagagaagauugauggggugaaacuugaguccacaaggaucuaucaaauucuggccauauacagcaccgucgcuucuucauuggugcucguugugagucugggagcgaucagcuuuuggaugugcuccaaugguucuuuacagugccggauuuguaucuga

SEQ ID NO: 138459 - RNA, 1701 nt, Artificial Sequence
  derived and/or modified CDS sequence (opt3) from hemagglutinin__InfluenzaA__AGT18734
augaaggccauccuggugguccuccuuuacaccuucgcuacagcaaacgccgacacucugugcauuggcuaucacgcgaauaacagcacggauaccguugacacaguguuggagaaaaauguaacugugacccauuccgucaacuuacuggaagauaagcacaaugggaaacuauguaagcucagaggaguggcuccccugcaucuugguaaaugcaacauagccggcuggauccuggggaauccugagugugaaucuuugucaacagcaaguagcugguccuacauuguugagaccucuucgucagacaacggaacuugcuauccaggcgauuuuaucaauuacgaagaacucagggagcagcugagcaguguguccucuuucgaacgguuugagauuuucccgaagacaagcuccuggcccaaccacgacucaaauaagggugucaccgccgcuuguccucaugcaggggccaaaaguuuuuauaagaaccugaucuggcucgugaaaaagggaaauagcuacccaaaauuaucuaaguccuauauaaacgauaagggcaaagaaguacugguucuuuggggcauccaccaccccucaacgacugcugaccaacagagcuuguaccagaaugccgaugcguacguguucgucgggaccagucgcuauucuaagaaauuuaagccugagauugcaauccgaccaaaagugcgugaccaggagggaagaauuaacuacuauuggacacugaucgaacccggugauaagauaacuuucgaggccaccggcaaccuaguggucccuagguacgcuuuugccauggaacggaaugcaggguccggaauuaucauuagcgacacaccaguucaugauugcaacaccacgugucaaacuccggagggcgcuaucaauacaucgcuccccuuccagaacauccacccuauuaccauagguaaaugcccaaaguaugugaagucuacuaaacugcgccuugccacagggcugagaaauguacccuccauccagucaaggggauuguuuggcgcgauugccggcuucaucgaagggggauggaccgguaugguggacggcugguacggguaucaucaccagaacgagcaaggaaguggcuacgcagcugaccucaagagcacgcagaaugccauagauaaaauuaccaacaaggucaauuccgugaucgagaaaaugaacacacaguuuacugcuguugguaaggaguucaaucaccuggagaagcggaucgaaaacuuaaauaaaaagguggacgauggguuccuggacauuuggaccuacaacgccgagcuccuuguccuguuggaaaaugagcgcacacuagauuaucaugacucuaacgugaaaaaccuguacgagaagguacgaaaucagcucaaaaacaaugcaaaggaaaucggcaacggauguuuugaguucuaucacaagugcgauaauacuuguauggaaagcguuaaaaacggcaccuacgacuauccuaaguacucagaggaagccaaacugaauagagagaagauugauggggugaaacuugagaguacaaggauauaucaaauccuggcuauuuacuccaccgucgcgagcucuuuggugcucgucgugucacugggagcaaucaguuuuuggaugugcagcaacgguuccuuacagugccggaucuguauuuga

SEQ ID NO: 138460 - RNA, 1701 nt, Artificial Sequence; identical to SEQ ID NO: 138171
  derived and/or modified CDS sequence (opt3) from hemagglutinin__InfluenzaA__AGT18735

SEQ ID NO: 138461 - RNA, 1701 nt, Artificial Sequence
  derived and/or modified CDS sequence (opt3) from hemagglutinin__InfluenzaA__AGT18748
augaagaccaucauugcccugagcuacauacucugccuuguguucgcucagaaacugcccggcaacgacaauuccacagcaacuuuguguuuagggcaccaugccgucccuaacggaacgaucguuaagaccauuacaaaugauagaaucgaggugacuaacgcgaccgaacugguacaaaauucuucaauuggugagaucugcgacaguccacaccagauacuagaugaagagaacuguacacucaucgacgcucugcuuggcgauccgcagugcgacgauuuucagaauaaaaagugggaccuguucguggaaaggagcaaagccuauuccaacuguuaccccuaugaugucccugacuacgcaucuuugcggucgcucguggccucaagcgggacccuggaguuuaauaacgagaguuucaauugggcuggaguuacucaaaacggcacauccucugcaugccgccgagguagcaauuccucauuuuucagucgucugaacuggcucacccauuuaaauuuuaaguauccagcccugaacgugacgaugcccaacaaugaacaguucgauaaacuuuacauuuggggaguccaccauccuagcacugacaaggaucagaucuuuuuguaugcucagucuuccgggagaauuaccgugucaacaaagaggagccaacaggccguaaucccaaacauaggcagucggccccgcauuagaaauaucccuucuaggauuuccaucuacuggacuaucguuaaaccaggcgacauucugcuaauaaacagcaccgggaaucucaucgcgccgcggggauacuucaagauucgcucggguaaaucuuccaucaugcgaucagacgcacccauaggcaaguguaagagugagugcauuacaccuaacgggagcaucccaaaugauaaacccuuucagaacgugaauagaaucaccuauggagccuguccuagguacgucaagcaguccacgcugaaacuugcuacuggcaugcggaacgugccagaaaagcaaacacgugguauuuucggggccaucgcaggauuuauugagaauggcugggagggcaugguggacgggugguauggauuccgccaccagaacucugaagguagaggccaggcugccgaucugaaaagcacccaagcggccauagaccagaucaaugggaaguugaacaggcucauuggaaaaacuaaugagaaguuccaccagaucgaaaaggaguuuucagaagucgagggccggauccaggaucuggagaaauacguugaagacacaaagauugauuuauggaguuauaacgcagagcugcucguggcucuugaaaaccaacauaccauagaccugacggauuccgagaugaauaaauuguucgaaaagaccaaaaagcagcuacgagagaacgccgaggacauggguaaugggugcuuuaagaucuaccacaaaugugauaacgcuugcauuggcagcauccgcaauggaacauaugaccaugacguauacagagaugaagcccugaacaauagguuccagauuaagggcguggagcucaaaucuggguacaaggacuggauccuguggauaucauuugcaaucaguugcuuccuucugugugucgccuugcucggauuuauuaugugggcuugccagaaagguaacauccgguguaauauuugcaucuga

SEQ ID NO: 138462 - RNA, 1701 nt, Artificial Sequence
  derived and/or modified CDS sequence (opt3) from hemagglutinin__InfluenzaA__AGT18749
augaagaccaucauugcccugagcuacauacucugccuuguguucgcucagaaacugcccgagaacgacaauuccacagcaacuuuguguuuaggccaccaugccgucccuaacgggacgaucguuaagaccauuacagaugaccaaaucgaagugacuaaugcgaccgagcugguacagaacucuucaacaggagaaauuugcgauaguccacaccagauccuagacggugagaauuguacccucauagaugcucugcuuggcgacccgcagugcgauggguuucaaaacaaaaagugggaccuguucguggaaagaagcaaagccuauuccaauuguuaccccuaugaugucccugacuacgcaucuuugaggucgcucguggccucaagcggaacucuggaguuuaacaaugagaguuucaacuggacaggcguuacccagaaugguacguccucugcuugcauccggcgcagcaacaauuccuuuuucucacgacugaacuggcucacucauuuaaauuuuaaguauccagcacugaacgugaccaugcccaacaaugaacaguucgauaaacuuuacauuuggggaguccaccauccugggacagacaaagaucagaucuuuuuguaugcccaagcuaguggccguauuacugugagcaccaagagaucucagcaggccguaaucccaaacauaggcuccaggccccggguucgcaauauuccuucaagaaucagcauuuacuggacaaucgugaaaccaggggacauccugcuaauuaacaguaccggaaaucucauagcgccgagggguuacuuccggauccgcucuggccgauccagcauuaugagaucggacgcacccaucgggaaguguaacucugagugcauaacgccuaauggauccauuccaaacgauaaacccuuucagaaugucaacaggaucacuuauggcgccuguccucgguacgugaagcaaaauacacugaaacuugcuaccgguaugcguaacgugccagaaaagcagacucgcgggaucuucggagccauugcaggcuuuaucgagaauggcugggaggggauggucgacggaugguaugguuucagacaccagaacucagaaggcagggggcaagcugccgaucugaagaguacacaggcggccauugaccagauaaauggaaaauugaaccggcucaucggcaagaccaacgagaaauuccaccagauugaaaaggaguuuagcgaaguugagggucgaauccaagaucuggagaaauacguggaagacacgaagaucgauuuaugguccuauaaugcagagcugcucguagcucuugaaaaccagcauaccauugaccugacagauucugagaugaauaaguuguucgaaaagacuaagaaacagcuacgcgagaacgccgaggacauggggaauggcugcuuuaagauauaccacaaaugugauaacgcuugcaucggaagcauuagaaauggcaccuaugaccaugacguguacagggaugaagcccugaacaaucgguuccagaucaagggggucgagcucaagucaggauacaaagacuggauucuguggaucaguuuugcaauauccugcuuccuucuguguguggccuugcucgguuuuaucaugugggcuugccaaaagggcaacauucgcuguaauaucugcauuuga

SEQ ID NO: 138463 - RNA, 1701 nt, Artificial Sequence
  derived and/or modified CDS sequence (opt3) from hemagglutinin__InfluenzaA__AGT18751
augaagaccgugaucgcccugagcuacauucucugccuugucuucgcucagaaacugcccggcaacgacaauuccacagcaacuuuguguuuagggcaccaugccguuccuaacggaacgauagugaagaccaucacaaaugaucaaauugagguaacuaacgcgaccgaacuggugcaaaauucuucaacaggugagaucugcgacaguccacaccagauucuagauggcgaaaacuguacccucaucgacgcucugcuuggggauccgcagugcgacggauuucagaauaaaaagugggaucuguucgucgagagaagcaaagccuauuccaacuguuaccccuaugacgugccugauuacgcaucuuugaggucgcucguugccucaagcggcacucuggaauuuaauaacgagaguuucaauuggacaggugugacccagaacgggacguccucugcuugcauacggcgcagcaauaacuccuuuuucucacgacugaauuggcucacucauuuaaacuuuaaguauccagcacugaacgucaccaugcccaauaacgagcaguucgacaaguuguacaucuggggagugcaccauccuggcacagauaaagaccagauuuuucuuuaugcccaagcuaguggccguaucacuguaagcaccaagagaucucagcaggccguuauuccaaauaucggguccaggccccgggugcgcaacauaccuucaagaauuagcaucuacuggacaauugucaaaccaggagauauccugcuaaucaauaguaccgguaaccucauugcgccgaggggcuacuucaagauacggucugggcgcuccagcaucaugcgaucggacgcacccauuggaaaauguaauucugaaugcaucacgccuaacggcuccauaccaaaugacaagcccuuucagaacgugaauagaauuacuuauggugccuguccuagguacgugaagcaaaacacacugaaacuugcuaccgggaugcggaaugucccagagaagcagacucguggaaucuucggcgccaucgcaggcuuuauugaaaacgggugggagggaaugguugaugguugguauggcuuccgccaccaaaauucagaggggagaggacaggcugccgaccugaaaaguacacaggcggccaucgaucagauuaacggcaaguugaacaggcucauagguaaaaccaaugaaaaguuccaccagaucgagaaagaauuuagcgagguggaagggcggauucaagaccuggagaaguacguagaggauacgaagaucgacuuaugguccuauaaaucugaacugcucguggcacuugagaaccagcauaccaucgaucugacagacagcgaaaugaauaaguuguucgagaaaacuaagaaacagcuacgagaaaacgcugaggauaugggcaauggaugcuuuaagauuuaccacaagugugacaacgccugcauaggcucaauccgcaaugggaccuaugaucaugacgucuacagagacgaggcucugaacaauagguuccagauuaaaggaguggaacucaagagugguuacaaagauuggauccuguggauuuccuuugccaucagcugcuuccuucuguguguugcauugcucggcuuuauaaugugggccugccaaaaggggaacauccgguguaauauuugcaucuga

SEQ ID NO: 138464 - RNA, 1701 nt, Artificial Sequence
  derived and/or modified CDS sequence (opt3) from hemagglutinin__InfluenzaA__AGT18752
augaagaccaucauugcccugagcuacauaaucugccucguguucgcucagaaacuucccggcaacgacaauuccacagcaacucuguguuuggggcaccaugccgucccuaacggaacgauuguuaagaccaucacaaaugaucaaauugaggugacuaacgcgaccgaauuaguacagaauagcucaacaggugagaucugcaacaguccacaccagauacuggacggcgaaaauuguacccuaaucgaugcucuccugggggacccgcagugcgauggauuucaaaacaaaaagugggaccuuuucguggagagaagcaaagccuauuccaauuguuaccccuaugaugucccugacuacgcaucucugaggucguugguggccucaagcggcacucucgaauuuaacaaugagaguuucaacuggacagguguuacccagaaugggacguccucugcuugcauucggcgcagcaacaauuccuuuuucucacgacugaacuggcugacucaucucaacuuuaaguauccagcauuaaaugugaccaugcccaacaaugagcaguucgauaagcuguacaucuggggaguccaccauccuggcacagacaaagaucagauuuuucuuuaugcccaagcuaguggccguaucacugugagcaccaagagaucucagcaggccguaauaccaaacauuggguccaggccccggguucgcaauaucccuucaagaauuagcaucuacuggacaaucgugaaaccaggagacauuuugcugauaaacaguaccgguaaucuaaucgcgccgaggggcuacuucaagauucggucugggcgcuccagcaucaugcgaucggaugcacccauaggaaaauguaacucugaaugcauuacgccuaauggcuccaucccaaacgacaagcccuuucagaaugucaacagaaucacuuauggugccuguccuagguacgugaagcaaaauacacucaaacuggcuaccgggaugcggaacgugccagagaagcagacucguggaauuuucggcgccaucgcaggcuuuauugaaaaugggugggagggaauggucgacgguugguauggcuuccgccaccagaacucagaggggagaggacaagcugccgaucuuaaaaguacacaggcggccauagaccagaucaacggcaagcugaauagguugauugguaaaaccaacgaaaaguuccaccagaucgagaaagaauuuagcgagguugaagggcggauccaagaucucgagaaguacguggaggacacgaagauugaucugugguccuauucuagcgaauuacugguagcacucgagaaucagcauaccauagaccuuacagauucagaaaugaacaaacuguucgagaagacuaaaaagcaguugcgagaaaaugcugaggacaugggcaacggaugcuuuaaaaucuaccacaagugugauaaugccugcauuggcaguauccgcaacgggaccuaugaccaugauguguacagagacgaggcucuaaauaacagguuccagauuaagggagucgaacugaaauccgguuacaaggacuggauccucuggauaucuuuugccaucucuugcuuccugcuuuguguggcacuguugggcuuuauuaugugggccugccaaaaagggaauauccgguguaacauuugcaucuga

SEQ ID NO: 138465 - RNA, 1701 nt, Artificial Sequence
  derived and/or modified CDS sequence (opt3) from hemagglutinin__InfluenzaA__AGT18753
augaagaccaucauugcccugagcuacauacucugccuuguguucgcucagaaacugcccggcaacgacaauuccacagcaacuuuguguuuagggcaccaugccgucccuaacggaacgaucguuaagaccauuacaaaugaucaaaucgaggugacuaacgcgaccgaacugguacaaaauucuucaacaggugagauuugcaacaguccacaccagauccuagacggcgaaaauuguacccucauagaugcucugcuuggggacccgcagugcgauggauuucagaacaaaaagugggaccuguucguggagagaagcaaagccuauuccaauuguuaccccuaugaugucccugacuacgcaucuuugaggucgcucguggccucaagcggcacucuggaauuuaacaaugagaguuucaacuggacagguguuacccagaaugggacguccucugcuugcauccggcgcagcaacaauuccuuuuucucacgacugaacuggcucacucauuuaaacuuuaaguauccagcacugaaugugaccaugcccaacaaugagcaguucgauaaacuuuacauuuggggaguccaccauccuggcacagacaaggaucagaucuuuuuguaugcccaagcuaguggccguauuacugugagcaccaagagaucucagcaggccguaaucccaaacauaggguccaggccccggguucgcaauauuccuucaagaaucagcauuuacuggacaaucgugaaaccaggagacauccugcuaauuaacaguaccgguaaucucauagcgccgaggggcuacuucaagauccggucugggcgcuccagcauuaugcgaucggaugcacccaucggaaaauguaacucugaaugcauaacgccuaauggcuccauuccaaacgacaagcccuuucagaaugucaacagaaucacuuauggugccuguccuagguacgugaagcaaaauacacugaaacuugcuaccgggaugcggaacgugccagagaagcagacucguggaaucuucggcgccauugcaggcuuuaucgaaaaugggugggagggaauggucgacgguugguauggcuuccgccaccagaacucagaggggagaggacaagcugccgaucugaaaaguacacaggcggccauugaccagauaaacggcaaguugaauaggcucaucgguaaaaccaacgaaaaguuccaccagauugagaaagaauuuagcgagguugaagggcggauccaagaucuggagaaguacguggaggacacgaagaucgauuuaugguccuauaaaucugaacugcucguagcacuugagaaucagcauaccauugaccugacagauagcgaaaugaacaaguuguucgagaaaacuaagaaacagcuacgagaaaaugcugaggacaugggcaacggaugcuuuaagauauaccacaagugugauaaugccugcaucggcucaauucgcaacgggaccuaugaccaugauguguacagagacgaggcucugaauaacagguuccagaucaaaggagucgaacucaagagugguuacaaagacuggauucuguggaucuccuuugccauaagcugcuuccuucuguguguggcauugcucggcuuuaucaugugggccugccaaaaggggaauauucgguguaacaucugcauuuga

SEQ ID NO: 138466 - RNA, 1701 nt, Artificial Sequence
  derived and/or modified CDS sequence (opt3) from hemagglutinin__InfluenzaA__AGT18754
augaagaccaucauugcccugagcuacauacucugccuuguguucgcucagaaacugcccgagaacgacaauuccacagcaacuuuguguuuaggccaccaugccgucccuaacgggacgaucguuaagaccauuacagaugaccaaaucgaagugacuaaugcgaccgagcugguacagaacucuucaacaggagaaauuugcgauaguccacaccagauccuagacggugagaauuguacccucauagaugcucugcuuggcgacccgcagugcgauggguuucaaaacaaaaagugggaccuguucguggaaagaggaaaagccuauagcaauuguuaccccuaugaugucccugacuacgcauccuugaggucucucguggccacuucgggcacacuggaguuuaacaaugagucauucaacuggaccgguguuacgcagaaugggacuagcagugcuugcauccggcgcuccaacaauagcuuuuucucucgacugaacuggcucacccauuuaaauuuuaaguauccagcacugaacgugacaaugcccaacaaugaacaguucgauaaacuuuacauuuggggaguccaccauccuggcacugacaaggaucagaucuuuuuguaugcccaggcuuccggccguauuaccgugucaacaaagagaagucaacaggccguaaucccaaacauagggagcaggccccggguucgcaauauuccuucuagaaucuccauuuacuggaccaucgugaaaccaggagacauccugcuaauuaacucaacggguaaucucauagcgccgaggggcuacuucaagauccggagcgggcgcaguucuauuaugcgauccgacgcacccaucggaaaauguaacagcgagugcauaacuccuaauggcucgauuccaaacgauaagcccuuucagaaugucaacagaaucacauauggugccuguccuagguacgugaagcaaaauacccugaaacuugcuacugggaugcggaacgugccagaaaagcagacacguggaaucuucggcgccauugcaggcuuuaucgagaaugggugggagggaauggucgacgguugguauggcuuccgccaccagaacucugaagggagaggacaagcugccgaucugaaauccacccaggcggccauugaccagauaaauggcaaguugaacaggcucaucgguaaaacgaacgagaaguuccaccagauugaaaaagaguuuucagaaguugaggggcggauccaagaucuggagaaguacguggaagacaccaagaucgauuuauggaguuauaaugcagagcugcucguagcucuugaaaaccagcauacaauugaccugacugauagcgagaugaauaaauuguucgaaaagaccaaaaagcagcuacgagagaacgccgaggacaugggcaauggaugcuuuaaaauauaccacaagugugauaacgcuugcaucggcuccauucgcaaugggacauaugaccaugacguguacagagaugaagcccugaacaauagguuccagaucaagggagucgagcucaaaucugguuacaaggacuggauucuguggaucagcuuugcaauaucaugcuuccuucuguguguggccuugcucggcuuuaucaugugggcuugccaaaaagggaacauucgguguaauaucugcauuuga

SEQ ID NO: 138467 - RNA, 1701 nt, Artificial Sequence
  derived and/or modified CDS sequence (opt3) from hemagglutinin__InfluenzaA__AGT18756
augaagaccaucauugcccugagcuacgugcucugccuugucuucgcucagaaacugcccggcaacgacaauuccacagcaacuuuguguuuagggcaccaugccguuccuaacggaacgauagugaagaccaucacaaaugauagaauugagguaacuaacgcgaccgaacuggugcaaaauucuucaaucggugagauuugcgacaguccacaccagauccuagauggcgaaaacuguacacucauagacgcucugcuuggggauccgcagugcgacgauuuucagaauaaaaagugggaccuguucgucgagaggagcaaagccuauuccaacuguuaccccuaugaugugccugacuacgcaucuuugcggucgcucguugccucaagcggaacccuggaauuuaauaacgagaguuucaauugggcuggcgugacucaaaacgguacauccucugcaugccgccgagggagcaauuccucauuuuucagucgucugaacuggcucacccauuuaaauuuuaaguauccagcccugaacgucacgaugcccaacaaugagcaguucgauaaguuguacaucuggggagugcaccauccuggcacugacaaagaucagauuuuucuuuaugcucagagcucuggcagaaucaccguauccacaaagaggucacaacaggccguuauuccaaacaucgggagccggccccgcauaagaaauauuccuaguaggaucucuauuuacuggacuaucgugaaaccaggagacauccugcuaauuaacuccaccgguaaucucauagcgccgcggggcuacuucaagauccgcagcgggaaaucgucuauuaugcgauccgacgcacccaucggaaaguguaagucagaaugcauaacaccuaacggcaguauuccaaaugauaaacccuuucagaacgucaauagaaucaccuauggugccuguccuagguacgugaagcagagcacgcugaaacuugcuacugggaugcggaacgugccagagaagcaaacacguggaaucuucggcgccauugcaggcuuuaucgaaaaugggugggagggaauggucgacgguugguauggcuuccgccaccagaacuccgaggggagaggacaggcugccgaucugaaaucuacccaagcggccauugaccagauaaauggcaaguugaacaggcucaucgguaaaacuaaugaaaaguuccaccagauugagaaggaauuuagcgagguugaagggcggauccaggaucuggagaaauacguggaggacacaaagaucgauuuauggucauauaaaagugaacugcucguagcacuugagaaccaacauaccauugaccugacggauuccgaaaugaacaaguuguucgagaaaaccaagaagcagcuacgagaaaaugcugaggacaugggcaacggaugcuuuaaaauauaccacaagugugauaaugccugcaucggcagcauucgcaacgggacauaugaccaugacguguacagagaugaggcucugaauaacagguuccagaucaaaggagucgaacucaagucugguuacaaagacuggauucuguggaucucauuugccauaaguugcuuccuucuguguguggcauugcucggcuuuaucaugugggccugccagaaggggaauauucgguguaacaucugcauuuga

SEQ ID NO: 138468 - RNA, 1701 nt, Artificial Sequence
  derived and/or modified CDS sequence (opt3) from hemagglutinin__InfluenzaA__AGT18757
augaagaccaucauugcccugagcuacauacucugccuuguguucgcucagaaacugcccggcaacgacaauuccacagcaacuuuguguuuagggcaccaugccgucccuaacggaacgaucguuaagaccauuacaaaugauagaaucgaggugacuaacgcgaccgaacugguacaaaauucuucaauuggugagaucugcgacaguccacaccagauacuagauggcgaaaacuguacacucaucgacgcucugcuuggggauccgcagugcgacgauuuucagaauaaaaagugggaccuguucguggagaggagcaaagccuauuccaacuguuaccccuaugaugucccugacuacgcaucuuugcggucgcucguggccucaagcggaacccuggaauuuaauaacgagaguuucaauugggcuggcguuacucaaaacgguacauccucugcaugccgccgagggagcaauuccucauuuuucagucgucugaacuggcucacccauuuaaauuuuaaguauccagcccugaacgugacgaugcccaacaaugagcaguucgauaaacuuuacauuuggggaguccaccauccuggcacugacaaggaucagaucuuuuuguaugcucagagcucuggcagaauuaccguguccacaaagaggucacaacaggccguaaucccaaacauagggagccggccccgcauuagaaauaucccuaguaggauuucuaucuacuggacuaucguuaaaccaggagacauucugcuaauaaacuccaccgguaaucucaucgcgccgcggggcuacuucaagauucgcagcgggaaaucgucuaucaugcgauccgacgcacccauaggaaaguguaagucagaaugcauuacaccuaacggcaguaucccaaaugauaaacccuuucagaacgugaauagaaucaccuauggugccuguccuagguacgucaagcagagcacgcugaaacuugcuacugggaugcggaacgugccagagaagcaaacacguggaauuuucggcgccaucgcaggcuuuauugaaaaugggugggagggaaugguggacgguugguauggcuuccgccaccagaacuccgaggggagaggacaggcugccgaucugaaaucuacccaagcggccauagaccagaucaauggcaaguugaacaggcucauugguaaaacuaaugaaaaguuccaccagaucgagaaggaauuuagcgaggucgaagggcggauccaggaucuggagaaauacguugaggacacaaagauugauuuauggucauauaacgcagaacugcucguggcucuugagaaccaacauaccauagaccugacggauagugaaaugaauaaauuguucgagaagaccaaaaagcagcuacgagaaaacgccgaggacaugggcaauggaugcuuuaagaucuaccacaaaugugauaacgcuugcauuggcuccauccgcaaugggacauaugaccaugacguauacagagaugaggcccugaacaauagguuccagauuaagggaguggaacucaaaagcgguuacaaggacuggauccuguggauaucuuuugcaaucucaugcuuccuucugugugucgccuugcucggcuuuauuaugugggcuugccagaaagggaacauccgguguaauauuugcaucuga

SEQ ID NO: 138469 - RNA, 1701 nt, Artificial Sequence
  derived and/or modified CDS sequence (opt3) from hemagglutinin__InfluenzaA__AGT18758
augaagaccaucauugcccugagcuacauacucugccuuguguucgcucagaaacugcccggcaacgacaauuccacagcaacuuuguguuuagggcaccaugccgucccuaacggaacgaucguuaagaccauuacaaaugauagaaucgaggugacuaacgcgaccgaacugguacaaaauucuucaauuggugagaucugcgacaguccacaccagauacuagauggcgaaaacuguacacucaucgacgcucugcuuggggauccgcagugcgacgauuuucagaauaaaaagugggaccuguucguggagaggagcaaagccuauuccaacuguuaccccuaugaugucccugacuacgcaucuuugcggucgcucguggccucaagcggaacccuggaauuuaauaacgagaguuucaauugggcuggcguuacucaaaacgguacauccucugcaugccgccgagggagcaauuccucauuuuucagucgucugaacuggcucacccauuuaaauuuuaaguauccagcccugaacgugacgaugcccaacaaugagcaguucgauaaacuuuacauuuggggaguccaccauccuggcacugacaaggaucagaucuuuuuguaugcucagagcucuggcagaauuaccguguccacaaagaggucacaacaggccguaaucccaaacauagggagccggccccgcauuagaaauaucccuaguaggauuucuaucuacuggacuaucguuaaaccaggagacauucugcuaauaaacuccaccgguaaucucaucgcgccgcggggcuacuucaagauucgcagcgggaaaucgucuaucaugcgauccgacgcacccauaggaaaguguaagucagaaugcauuacaccuaacggcaguaucccaaaugauaaacccuuucagaacgugaauagaaucaccuauggugccuguccuagguacgucaagcagagcacgcugaaacuugcuacugggaugcggaacgugccagagaagcaaacacguggaauuuucggcgccaucgcaggcuuuauugaaaaugggugggagggaaugguggacgguugguauggcuuccgccaccagaacuccgaggggagaggacaggcugccgaucugaaaucuacccaagcggccauagaccagaucaauggcaaguugaacaggcucauugguaaaacuaaugaaaaguuccaccagaucgagaaggaauuuagcgaggucgaagggcggauccaggaucuggagaaauacguugaggacacaaagauugauuuauggucauauaguuccgaacugcucguggcacuugagaaccaacauaccauagaccugacggauagcgaaaugaacaaauuguucgagaagaccaaaaagcagcuacgagaaaaugcugaggacaugggcaacggaugcuuuaagaucuaccacaaaugugauaauacaugcauuggcucuauccgcaacgggacuuaugaccaugacguauacagagaugaggcccugaauaacagguuccagauuaagggaguggaacucaaaucagguuacaaggacuggauccuguggauaaguuuugcuaucagcugcuuccuugucuguguggcccuguugggcuuuauuaugugggcaugccagaaagggaauauccgguguaacauuugcaucuga

SEQ ID NO: 138470 - RNA, 1701 nt, Artificial Sequence
  derived and/or modified CDS sequence (opt3) from hemagglutinin__InfluenzaA__AGT18759
augaagaccaucauugcccugagcuacauacucugccuuguguucgcucagaaacugcccggcaacgacaauuccacagcaacuuuguguuuagggcaccaugccgucccuaacggaacgaucguuaagaccauuacaaaugauagaaucgaggugacuaacgcgaccgaacugguacaaaauucuucaauuggugagaucugcgacaguccacaccagauacuagauggcgaaaacuguacacucaucgacgcucugcuuggggauccgcagugcgacgauuuucagaauaaaaagugggaccuguucguggagaggagcaaagccuauuccaacuguuaccccuaugaugucccugacuacgcaucuuugcggucgcucguggccucaagcggaacccuggaauuuaauaacgagaguuucaauugggcuggcguuacucaaaacgguacauccucugcaugccgccgagggagcaauuccucauuuuucagucgucugaacuggcucacccauuuaaauuuuaaguauccagcccugaacgugacgaugcccaacaaugagcaguucgauaaacuuuacauuuggggaguccaccauccuggcacugacaaggaucagaucuuuuuguaugcucagagcucuggcagaauuaccguguccacaaagaggucacaacaggccguaaucccaaacauagggagccggccccgcauuagaaauaucccuaguaggauuucuaucuacuggacuaucguuaaaccaggagacauucugcuaauaaacuccaccgguaaucucaucgcgccgcggggcuacuucaagauucgcagcgggaaaucgucuaucaugcgauccgacgcacccauaggaaaguguaagucagaaugcauuacaccuaacggcaguaucccaaaugauaaacccuuucagaacgugaauagaaucaccuauggugccuguccuagguacgucaagcagagcacgcugaaacuugcuacugggaugcggaacgugccagagaagcaaacacguggaauuuucggcgccaucgcaggcuuuauugaaaaugggugggagggaaugguggacgguugguauggcuuccgccaccagaacuccgaggggagaggacaggcugccgaucugaaaucuacccaagcggccauagaccagaucaauggcaaguugaacaggcucauugguaaaacuaaugaaaaguuccaccagaucgagaaggaauuuagcgaggucgaagggcggauccaggaucuggagaaauacguugaggacacaaagauugauuuauggucauauaguuccgaacugcucguggcacuugagaaccaacauaccauagaccugacggauagcgaaaugaacaaauuguucgagaagaccaaaaagcagcuacgagaaaaugcugaggacaugggcaacggaugcuuuaagaucuaccacaaaugugauaaugccugcauuggcucuauccgcaacgggacauaugaccaugacguauacagagaugaggcucugaauaacagguuccagauuaagggaguggaacucaaaucagguuacaaggacuggauccuguggauaaguuuugccaucagcugcuuccuugucuguguggcacuguugggcuuuauuaugugggccugccagaaagggaauauccgguguaacauuugcaucuga

SEQ ID NO: 138471 - RNA, 1701 nt, Artificial Sequence
  derived and/or modified CDS sequence (opt3) from hemagglutinin__InfluenzaA__AGT18760
augaagaccaucauugcccugagcuacauacucugccuuguguucgcucagaaacugcccggcaacgacaauuccacagcaacuuuguguuuagggcaccaugccgucccuaacggaacgaucguuaagaccauuacaaaugauagaaucgaggugacuaacgcgaccgaacugguacaaaauucuucaauuggugagaucugcgacaguccacaccagauacuagauggcgaaaacuguacacucaucgacgcucugcuuggggauccgcagugcgacgauuuucagaauaaaaagugggaccuguucguggagaggaacaaagccuauagcaauuguuaccccuaugaugucccugacuacgcauccuugcggucucucguggccucgucaggaacccuggaauuuaacaaugagagcuucaacugggcuggcguuacucaaaaugguacaaguuccgcaugccgccgagggucuaacagcuccuuuuucucacgucugaauuggcucacccauuuaaacuuuaaguauccagcccugaacgugacgaugcccaauaacgagcaguucgauaaacuuuacauuuggggaguccaccauccuggcacugacaaggaucagaucuuuuuguaugcucagaguagcggcagaauuaccgugucuacaaagaggucccaacaggccguaaucccaaauauagggucacggccccgcauuagaaacaucccuagcaggauuaguaucuacuggacuaucguuaaaccaggagacauucugcuaauaaauucuaccgguaaccucaucgcgccgcggggcuacuucaagauucgcuccgggaaaagcucgaucaugcgaucugacgcacccauaggaaaguguaaguccgaaugcauuacaccuaauggcucaaucccaaacgauaaacccuuucagaaugugaacagaaucaccuauggugccuguccuagguacgucaagcagaguacgcugaaacuugcuacugggaugcggaaugugccagagaagcaaacacguggaauuuucggcgccaucgcaggcuuuauugaaaacgggugggagggaaugguggacgguugguauggcuuccgccaccagaauagcgaggggagaggacaggcugccgaucugaaauccacccaagcggccauagaccagaucaacggcaaguugaauaggcucauugguaaaacuaacgaaaaguuccaccagaucgagaaggaauuuucugaggucgaagggcggauccaggaucuggagaaauacguugaggacacaaagauugauuuauggagcuauaaaucagaacugcucguggcacuugagaaccaacauaccauagaccugacggauagugaaaugaauaaguuguucgagaaaaccaagaagcagcuacgagaaaacgcugaggacaugggcaauggaugcuuuaaaaucuaccacaagugugauaacgccugcauuggcuccauccgcaaugggacauaugaccaugacguauacagagaugaggcucugaacaauagguuccagauuaaaggaguggaacucaagagcgguuacaaagacuggauccuguggauaucuuuugccaucucaugcuuccuugucuguguggcacuguugggcuuuauuaugugggccugccagaaggggaacauccgguguaauauuugcaucuga

SEQ ID NO: 138472 - RNA, 1701 nt, Artificial Sequence
  derived and/or modified CDS sequence (opt3) from hemagglutinin__InfluenzaA__AGT18761
augaagaccaucauugcccugagcuacauacucugccuuguguucgcucagaaacugcccggcaacgacaauuccacagcaacuuuguguuuagggcaccaugccgucccuaacggaacgaucguuaagaccauuacaaaugauagaaucgaggugacuaacgcgaccgaacugguacaaaauucuucaauuggugagaucugcgacaguccacaccagauacuagauggcgaaaacuguacacucaucgacgcucugcuuggggauccgcagugcgacgauuuucagaauaaaaagugggaccuguucguggagaggagcaaagccuauuccaacuguuaccccuaugaugucccugacuacgcaucuuugcggucgcucguggccucaagcggaacccuggaauuuaauaacgagaguuucaauugggcuggcguuacucaaaacgguacauccucugcaugccgccgagggagcaauuccucauuuuucagucgucugaacuggcucacccauuuaaauuuuaaguauccagcccugaacgugacgaugcccaacaaugagcaguucgauaaacuuuacauuuggggaguccaccauccuggcacugacaaggaucagaucuuuuuguaugcucagagcucuggcagaauuaccguguccacaaagaggucacaacaggccguaaucccaaacauagggagccggccccgcauuagaaauaucccuaguaggauuucuaucuacuggacuaucguuaaaccaggagacauucugcuaauaaacuccaccgguaaucucaucgcgccgcggggcuacuucaagauucgcagcgggaaaucgucuaucaugcgauccgacgcacccauaggaaaguguaagucagaaugcauuacaccuaacggcaguaucccaaaugauaaacccuuucagaacgugaauagaaucaccuauggugccuguccuagguacgucaagcagagcacgcugaaacuugcuacugggaugcggaacgugccagagaagcaaacacguggaauuuucggcgccaucgcaggcuuuauugaaaaugggugggagggaaugguggacgguugguauggcuuccgccaccagaacuccgaggggagaggacaggcugccgaucugaaaucuacccaagcggccauagaccagaucaauggcaaguugaacaggcucauugguaaaacuaaugaaaaguuccaccagaucgagaaggaauuuagcgaggucgaagggcggauccaggaucuggagaaauacguugaggacacaaagauugauuuauggucauauaguuccgaguuccugguggcacucgaaaaccaacauaccauagaccuuacggauagcgaaaugaacaaacuguuugagaagaccaaaaagcaguugcgagaaaaugcugaggacaugggcaacggaugcuucaagaucuaccacaaaugugauaaugccugcauuggcucuauccgcaacgggacauaugaccaugacguauacagagaugaggcucuaaauaacagguuucagauuaagggaguggaacugaaaucagguuacaaggacuggauccucuggauaaguuucgccaucagcugcuuucuggucuguguggcacuucugggcuucauuaugugggccugccagaaagggaauauccgguguaacauuugcaucuga

SEQ ID NO: 138473 - RNA, 1701 nt, Artificial Sequence
  derived and/or modified CDS sequence (opt3) from hemagglutinin__InfluenzaA__AGT37102
auggaggccaagcuggugguccucuucugcgcuuuuaccacacuuaaagcagacaucauuuguguuggcuaccacgccaacaauagcacugauacgguggacaccauaauggaaaagaacguaacagugacucauuccgucaaucuguuggagaacucucacaaugggaaauuaugcucacugaacggaaaggcgccccuacagcucgguaauuguaacguggcuggcuggauccuggggaauccugaaugcgaucuucuguugaccgccaacaguuggagcuauauuaucgagacauccucuucgaaaaauggaaccuguuacccaggcgaguucucagacuaugaggagcucagagaacugcugagcacuguuaguuccuuugagagguucgaaauuuuuccgaaggcaacaucuuggcccaaccaugagaccacgaagggugccacuaucgcuugcagccacuccggggcaucaaguuucuaccggaaucucuuauggauagugaaaaagggaaacagcuauccuaaaaucucuaaguccuacaccaauaaccgcggcaaagagguccuggugauuuggggcguacaucacccacccacagauucaagccaacaggcccuuuaucagaacacucacaccuacaucaguguugggucuuccaaguacuaucagcgauuuacaccuguggucgcugcccguccaaagauuagagaacaagagggaaggaugaauuacuauuggaccuugcuggaacagggugacacgaucacuuucgaggcgacaggcaaccuaauagcacccugguacgccuuugcucucgauauggggagcucgucuggaauuaugguguccgacgccccugugcauaauuguaccacuaaaugccagacaccacacggcgcacugaagucaaaccuuccguuccagaauguccaucccaucaccauuggugaauguccuaaauauguuaagaguacgcaacugcggauggcuaccggguugcgcaacaucccaagcauccaguccagaggacucuuuggcgccauugcgggcuucauagaagggggauggacagguaugaucgauggcugguacggguaucaccaccagaaugagcagggaucuggcuacgccgcagaccagaaaagcacucaaauugcuaucgaugguauaucaaacaaggugaauaguauuaucgaaaagaugaacguacaguuuaccuccguggggaaagaguucaaugaccuggaaaagaggaucgagaacuuaaauaaaaaggucgaugacggcuuccuggacguguggacauacaacgccgaacuccuuguucuguuggagaaugagcggacucuagauuuucaugacuucaacgugaaaaaccuguaugaaaaggucaaaagccaacuccgcaauaacgcuaaggagauuggaaauggcugcuuugaguucuaccacaagugugauaacgaaugcauggaaaaugugaaaaacgggaccuauaauuaccccaaguauucugaggagucaaaacugaaccgagaaaagaucgacggaguaaaacuugagaguauugguguucaucagauacuggccaucuacagcacaguggcauccucuuugguccuccuggugucguuaggcgccauuagcuuuuggaugugcuccaaugggucacugcaguguagaaucugcaucuga

SEQ ID NO: 138474 - RNA, 1701 nt, Artificial Sequence
  derived and/or modified CDS sequence (opt3) from hemagglutinin__InfluenzaA__AGU01877
augaaggccauccuggugguccuccuuuacaccuucgcuacagcaaacgccgacacucugugcauuggcuaucacgcgaauaacagcacggauaccguugacacaguguuggagaaaaauguaacugugacccauuccgucaacuuacuggaagauaagcacaaugggaaacuauguaagcucagaggaguggcuccccugcaucuugguaaaugcaacauagccggcuggauccuggggaauccugagugugaaucuuugucaacagcaaguagcugguccuacauuguugagaccucuucgucagacaacggaacuugcuauccaggcgauuuuaucaauuacgaagaacucagggagcagcugagcaguguguccucuuucgaacgguuugagauuuucccgaagacaagcuccuggcccaaccacgacucaaauaagggugucaccgccgcuuguccucaugcaggggccaaaaguuuuuauaagaaccugaucuggcucgugaaaaagggaaauagcuacccaaaauuaucuaaguccuauauaaacgauaagggcaaagaaguacugguucuuuggggcauccaccaccccucaacgacuaccgaccaacagagcuuguaccagaaugcugaugccuacguguucgucgggacaagucgcuauucuaagaaauuuaagccugagauugcgauccgaccaaaagugcgugaccaggagggaagaaugaacuacuauuggacucugauugaacccggugauaagaucaccuucgaggcaacaggcaaccuaguggucccuagguacgccuuugcuauggaacggaaugccggguccggaauaauuaucagcgacaccccaguucaugauugcaacacgacuugucaaacaccggagggcgcaauuaauaccucgcuccccuuccagaacauccacccuaucacuauugguaaaugcccaaaguaugugaagucuacaaaacugcgccuugcuaccgggcugagaaauguacccuccauacagucaaggggauuguuuggcgccaucgcgggcuucauugaagggggauggacggguaugguggacggcugguacggguaucaucaccagaacgagcaaggaaguggcuacgccgcagaccucaagagcacccagaaugcuaucgauaaaauaacaaacaaggucaauuccgugauugagaaaaugaacacucaguuuaccgccguugguaaggaguucaaucaccuggagaagcggaucgaaaacuuaaauaaaaagguggacgauggguuccuggacaucuggacauacaacgcugagcuccuuguccuguuggaaaaugagcgcacucuagauuaucaugacucuaacgugaaaaaccuguacgagaagguacgaaaucagcucaaaaacaaugccaaggaaauuggcaacggauguuuugaguucuaucacaagugcgauaauaccuguauggaaagcguuaaaaacggcacauacgacuauccuaaguacucagaggaagcaaaacugaauagagagaagaucgauggggugaaacuugagaguaccaggauuuaucaaauacuggccaucuacuccacugucgcuagcucuuuggugcucgucgugucacugggagcgauuaguuuuuggaugugcagcaacgguuccuuacagugccggaucuguaucuga

SEQ ID NO: 138475 - RNA, 1701 nt, Artificial Sequence
  derived and/or modified CDS sequence (opt3) from hemagglutinin__InfluenzaA__AGU01878
augaaggccauccugguggucaugcucuacacccuugcuacagcaaacgccgacacucugugcauuggcuaucacgcgaauaacagcacggauaccguugacacaguguuggagaaaaauguaacugugacccauuccgucaacuuacuggaagauaagcacgacgggaaacuauguaagcucagaggaguggcuccccugcaucuugguaaaugcaauauagccggcuggauccuggggaacccugagugugaaucuuugucaacagcaaguagcugguccuacauuguugagaccucuggaucggauaauggcacuugcuauccaggugacuucaucgauuacgaggaacucagggagcagcugucaagcgugaguuccuuugaacgguucgagauuuuuccgaagacaucuagcuggcccaaccacgacuccaauaagggggucaccgccgcuuguccucaugcaggagccaaaggcuucuauaagaaccugaucuggcucgugaaaaagggcaauucauacccaaaauuaaguauaagcuauaucaacgauaaggggaaggaaguacugguucuuugggguauucaccaccccucuacgacugcugaccaacaguccuuguaccagaaugccgauaccuacguguuugucggaacaucacgcuauagcaaaaaguucaaaccugagaucgcgauucgaccaaaggugcgugaccaggagggcagaaugaacuacuauuggacucugguggaacccggggauaaaaucaccuuugaggcaacaggaaaucuagucguuccuagguacgccuucgcuauggaacggaacgccggcagugguauaauuaucucugacaccccagugcaugacugcaacacgacuugucaaacaccgaagggggcaauuaauaccucccuccccuuucagaacauccacccuaucacuauuggaaaaugcccaaaguauguaaagagcacaaaacugcgccuugcuaccggccugagaaaugugcccucgauacagucuaggggcuuguucggggccaucgcgggauuuauugaggguggcuggacggggauggucgauggaugguacggcuaucaucaccagaacgaacaagguuccggguacgccgcagaccucaagucaacccagaaugcuaucgauaaaauaacaaacaaggugaauaguguuauugagaaaaugaacacucaguucaccgccgugggcaaggaguuuaaucaccuggaaaagcggaucgagaacuuaaauaaaaaggucgacgauggauuccuggacaucuggacauacaacgcugaacuccuugugcuguuggagaaugaacgcacucuagauuaucaugacagcaacguaaagaaucuguacgagaagguucgaaaccagcucaaaaacaaugccaaggagauuggcaacggguguuucgaauuuuaucacaagugcgauaauaccuguauggaguccgugaaaaacggaacauacgacuauccuaaguacucugaagaggcaaaacugaauagagaagagaucgauggugucaaacuugagagcaccaggauuuaucaaauacuggccaucuacucaacugcugcgaguuccuuggugcucgucgugagccugggcgcaauuucuuucuggaugugcucaaacgggaguuuacagugccggaucuguaucuga

SEQ ID NO: 138476 - RNA, 1701 nt, Artificial Sequence
  derived and/or modified CDS sequence (opt3) from hemagglutinin__InfluenzaA__AGU01879
augaaggccauccugguggucaugcucuacaccuucgcuacagcaaacgccgacacucuuugcauuggcuaucacgcgaauaacagcacggauaccguugacacagugcuggagaaaaauguaacugugacccauuccgucaacuuguuagaagauaagcacaaugagaaacuguguaagcuaagagggguggcuccccuccaucugggaaaaugcaacauagccgguuggauccuuggcaauccugaaugugagucucugucaacagcaaguagcugguccuacauuguugaaaccucugggucggacaacggaacuugcuauccaggcgauuuuaucgacuacgaggaguugagggaacagcucucaagcgugaguuccuucgagcgguuugaaauuuucccgaagacaucuagcuggcccaaucacgauuccaacaagggugucaccgccgcuuguccucaagcaggggccaaaggauuuuauaagaaucugaucuggcuggugaaaaagggcaacucauacccaaaacucaguaagagcuauauaaaugacaagggcaaagagguauuaguucugugggggauccaucaccccucuacgacugcugaucagcagucccuuuaccagaacgccgacaccuacguguucgucggaacaucacgcuauagcaagaaauuuaagccugagauugcgauccgaccaaaagugcgugaucaagaagguagaaugaauuacuauuggacuuugguggagcccggcgacaagauuaccuucgaagcaacagggaaccuggucguuccuagguacgccuuugcuauggagcggaacgccggaaguggcaucauaauuucugauaccccagugcacgacugcaauacgacuugucagacaccgaaaggugcaaucaacaccucccuacccuuccagaauauucauccuaucacuaucgggaagugcccaaaguauguaaaaagcacaaagcuccgccuggcuaccggacuuagaaacgugcccucgauucagucuaggggccuguuuggcgccauagcgggguucaucgaaggagguuggacgggcauggucgacgggugguacggauaucaccaucaaaaugagcagggcuccgguuacgccgcagauuugaaaucaacccagaacgcuauugacaagaucacaaauaaagugaacaguguuauagagaagaugaauacucaguuuaccgccguggggaaggaguucaaccaccucgaaaaacggauugaaaaucugaacaagaaagucgaugacggcuucuuagauaucuggacauacaaugcugagcugcucgugcuucuggaaaacgagcgcacuuuggacuaucacgauagcaauguaaagaaccuauacgagaaaguucgaaaccaacugaagaauaacgccaaggaaaucggaaauggcuguuuugaguucuaucauaaaugcgacaacaccuguauggaauccgugaagaaugggacauacgauuauccuaaauacucugaggaagcaaagcucaacagagaggagauugacggagucaaacuggaaagcaccaggaucuaucagauucuugccauauacucaacuguggcuaguucccuggucuuggugguuagccucggugcgaucucuuuuuggaugugcucaaauggcagucugcagugccggauuuguaucuga

SEQ ID NO: 138477 - RNA, 1701 nt, Artificial Sequence
  derived and/or modified CDS sequence (opt3) from hemagglutinin__InfluenzaA__AGU01881
augaaggccauccuggugguccuccuuuacaccuucgcuacagcaaacgccgacacucugugcauuggcuaucacgcgaauaacagcacggauaccguugacacaguguuggagaaaaauguaacugugacccauuccgucaacuuacuggaagauaagcacaaugggaaacuauguaagcucagaggagugacaccccugcaucuugguaaaugcaacauagcuggcuggauccuggggaauccugagugugaaucuuugucaaccgccaguagcugguccuacauuguugagacuucuucgucagacaacggaacaugcuauccaggcgauuuuaucaauuacgaagaacucagggagcagcugagcaguguguccucuuucgaacgguuugagauguucccgaagaccagcuccuggcccaaccacgacucaaauaagggugucacggcagccuguccucaagcuggggcaaaaaguuuuuauaagaaccugauuuggcucgugaaaaagggaaauagcuacccaaaauuaucuaaguccuauaucaacgauaagggcaaagaaguacugguucuuuggggcauacaucaccccucaacuaccgccgaccagcagagcuuguaccagaaugcugaugccuacguguucgucgggacaagucgcuauucuaagaaauuuaagccugagaucgcgauucgaccaaaagugcgugaccaagagggaagaaugaacuacuauuggacucugaucgaacccggugauaagauuaccuucgaggcaacaggcaaccuaguggucccuagguacgccuuugcuauggaacggaaugccggguccggaaucauaauuagcgacaccccaguucacgauugcaacacgacuugucagacaccggagggcgcaaucaauaccucgcuccccuuccagaacauucauccuaucacuaucgguaaaugcccaaaguaugugaagucuacaaaacugcgccuugcuaccgggcugagaaauguacccuccauucagucaaggggauuguuuggcgccauagcgggcuucaucgaagggggauggacggguaugguggacggcugguacggguaucaccaucaaaacgagcagggaaguggcuacgccgcagaccucaagagcacccagaaugcuauugauaaaaucacaaacaaggucaauuccgugauagagaaaaugaacacucaguuuaccgccguugguaaggaguucaaucaccuggagaagcggauugaaaacuuaaauaaaaagguggacgauggguuccuggacaucuggacauacaacgcugagcuccuuguccuguuggaaaaugagcgcacucuagauuaucacgacucuaacgugaaaaaccuguacgagaagguacgaaaucaacucaaaaacaaugccaaggaaaucggcaacggauguuuugaguucuaucauaagugcgauaauaccuguauggaaagcguuaaaaacggcacauacgacuauccuaaguacucagaggaagcaaaacugaauagagagaagauugauggggugaaacuugagaguaccaggaucuaucagauucuggccauauacuccacugucgcuagcucuuuggugcucgucgugucacugggagcgaucaguuuuuggaugugcagcaacgguuccuuacagugccggauuuguaucuga

SEQ ID NO: 138478 - RNA, 1701 nt, Artificial Sequence
  derived and/or modified CDS sequence (opt3) from hemagglutinin__InfluenzaA__AGU01883
augaaggccauccugguggucaugcucuacaccuucgcuacagcaaacgccgacacucuuugcauuggcuaucacgcgaauaacagcacggauaccguugacacagugcuggagaaaaauguaacugugacccauuccgucaacuuguuagaagauaagcacaaugggaaacuguguaagcuaagaggaguggcuccccuccaucuggguaaaugcaacauagccggcuggauccuugggaauccugagugugaaucucugucaacagcaaguagcugguccuacauuguugagaccucuggaucggacaacggcacuugcuauccaggugauuuuaucgacuacgaagaguugagggagcagcucucaagcgugaguuccuucgaacgguuugagauuuucccgaagacaucuagcuggcccaaucacgauuccaacaagggggucaccgccgcuuguccucaugcaggagccaaaggcuuuuauaagaaucugaucuggcuggugaaaaagggcaacucauacccaaaacucaguauaagcuauaucaauaacaaggaaaaggagguauuaguucugugggggauucaccaccccucuacgacugcugaccaacagucccuuuaccagaaugccgauaccuacguguucgucggaacaucacgcuauagcaaaaaguuuaaaccugagaucgcgauucgaccaaaggugcgugaccaggaagguagaaugaacuacuauuggacuuugguggagcccggcgauaaaaucaccuucgaagcaacagggaaccuggucguuccuagguacgccuuugcuauggagcggaaugccggaaguggcauaauuaucucugacaccccagugcaugauugcaacacgacuugucaaacaccgaagggugcaauuaauaccucccuacccuuccagaacauccacccuaucacuauugggaaaugcccaaaguauguaaagagcacaaaacuccgccuggcuaccggacuuagaaaugugcccucgauacagucuaggggccuguuuggcgccaucgcgggguucauugaaggagguuggacgggcauggucgacgggugguacggauaucaucaccagaacgagcaaggcuccgguuacgccgcagacuugaagucaacccagaaugcuaucgauaaaauaacaaacaaggugaauaguguuauugagaaaaugaacacucaguuuaccgccguggggaaggaguucaaucaccucgaaaagcggaucgaaaaccugaauaaaaaggucgacgauggcuucuuagacaucuggacauacaacgcugagcugcucgugcuucuggaaaaugagcgcacuuuggauuaucaugacagcaacguuaaaaaccuauacgagaagguacgaaaucagcugaaaaacaaugccaaggaaauuggaaacggcuguuuugaguucuaucacaagugcgauaauaccuguauggaauccgugaaaaacgggacauacgacuauccuaaguacucugaggaagcaaaacucaauagagaggagaucgauggagucaagcuggaaagcaccaggauuuaucaaauacuugccaucuacucaacugcugcgaguucccugguguuggucgugagccucggugcaauuucuuuuuggaugugcucaaacggcagucugcagugccggaucuguaucuga

SEQ ID NO: 138479 - RNA, 1701 nt, Artificial Sequence; identical to SEQ ID NO: 138108
  derived and/or modified CDS sequence (opt3) from hemagglutinin__InfluenzaA__AGU01884

SEQ ID NO: 138480 - RNA, 1701 nt, Artificial Sequence
  derived and/or modified CDS sequence (opt3) from hemagglutinin__InfluenzaA__AGU01885
augaaggccauccugguggucaugcucuacaccuucgcuacagcaaacgccgacacucuuugcauuggcuaucacgcgaauaacagcacggauaccguugacacagugcuggagaaaaauguaacugugacccauuccgucaacuuguuagaagauaagcacaaugagaaacuguguaagcuaagagggguggcuccccuccaucugggaaaaugcaacauagccgguuggauccuuggcaauccugaaugugagucucugucaacagcaaguagcugguccuacauuguugaaaccucugggucggacaacggaacuugcuauccaggcgauuuuaucgacuacgaggaguugagggaacagcucucaagcgugaguuccuucgagcgguuugaaauuuucccgaagacaucuagcuggcccaaucacgauuccaacaagggugucaccgccgcuuguccucaagcaggggccaaaggauuuuauaagaaucugaucuggcuggugaaaaagggcaacucauacccaaaacucaguaagagcuauauaaaugacaagggcaaagagguauuaguucugugggggauccaucaccccucuacgacugcugaucagcagucccuuuaccagaacgccgacaccuacguguucgucggaacaucacgcuauagcaagaaauuuaagccugagauugcgauccgaccaaaagugcgugaucaagaagguagaaugaauuacuauuggacuuugguggagcccggcgacaagauuaccuucgaagcaacagggaaccuggucguuccuagguacgccuuugcuauggagcggaacgccggaaguggcaucauaauuucugauaccccagugcacgacugcaauacgacuugucagacaccgaaaggugcaaucaacaccucccuacccuuccagaauguacauccuauuacuaucgggaagugcccaaaguaugugaaaagcacaaagcuccgccuggcuaccggacuuagaaacguccccucgauccagucuaggggccuguuuggcgccauugcgggguucauagaaggagguuggacgggcaugguggacgggugguacggauaucaccaucaaaaugagcagggcuccgguuacgccgcagauuugaaaucaacccagaacgcuaucgacaagauuacaaauaaaguuaacagugugaucgagaagaugaauacucaguuuaccgccgucgggaaggaguucaaccaccucgaaaaacggauagaaaaucugaacaagaaaguggaugacggcuucuuagauauuuggacauacaaugcugagcugcucguacuucuggaaaacgagcgcacuuuggacuaucacgauagcaauguuaagaaccuauacgagaaagugcgaaaccaacugaagaauaacgccaaggaaaucggaaauggcuguuuugaguucuaucauaaaugcgacaacaccuguauggaauccgucaagaaugggacauacgauuauccuaaauacucugaggaagcaaagcucaacagagaggagaucgacggagugaaacuggaaagcaccaggauuuaucagauccuugccauuuacucaacugucgcuaguucccugguguugguugugagccucggugcgauaucuuuuuggaugugcucaaauggcagucugcagugccggaucuguauuuga

SEQ ID NO: 138481 - RNA, 1701 nt, Artificial Sequence
  derived and/or modified CDS sequence (opt3) from hemagglutinin__InfluenzaA__AGU01887
augaaggccauccuggugguccuccuuuacaccuucgcuacagcaaacgccgacacucugugcauuggcuaucacgcgaauaacagcacggauaccguugacacaguguuggagaaaaauguaacugugacccauuccgucaacuuacuggaagauaagcacaaugggaaacuauguaagcucagaggaguggcuccccugcaucuugguaaaugcaacauagccggcuggauccuggggaauccugagugugaaucuuugucaacagcaaguagcugguccuacauuguugagaccucuucgucagacaacggaacuugcuauccaggcgauuuuaucaauuacgaagaacucagggagcagcugagcaguguguccucuuucgaacgguuugagauuuucccgaagacaagcuccuggcccaaccacgacucaaauaagggugucaccgccgcuuguccucaugcaggggccaaaaguuuuuauaagaaccugaucuggcucgugaaaaagggaaauagcuacccaaaauuaucuaaguccuauauaaacgauaagggcaaagaaguacugguucuuuggggcauccaccaccccucaacgacugcugaccaacagagcuuguaccagaaugccgaugcguacguguucgucgggaccagucgcuauucuaagaaauuuaagccugagauugcaauccgaccaaaagugcgugaccaggagggaagaaugaacuacuauuggacacugauugaacccggugauaagaucacuuucgaggccaccggcaaccuaguggucccuagguacgcuuuugccguugaacggaaugcaggguccggaauaauuaucagcgacacaccagugcauaacugcaauaccacgugucaaacuccggagggcgcuauuaacacaucgcuccccuuccagaauauccacccuaucaccauugguaaaugcccaaaguauguaaagucuacuaaacugcgccuugccacagggcugagaaacgugcccuccauacagucaaggggauuguuuggcgcgaucgccggcuucauugaagggggauggaccgguauggucgauggcugguacggguaucaucaccagaaugagcaaggaaguggcuacgcagcugaccucaagagcacgcagaacgccaucgacaaaauaaccaauaaggugaacuccguuauugagaaaaugaauacacaguuuacugcuguggguaaggaguucaaccaccuggagaagcggaucgaaaauuuaaacaaaaaggucgaugacggguuccuggauaucuggaccuacaaugccgagcuccuugugcuguuggaaaacgagcgcacacuagacuaucaugauucuaacguuaaaaaucuguacgagaagguacgaaaccagcucaaaaauaacgcaaaggaaauuggcaauggauguuuugaguucuaucacaagugcgacaacacuuguauggaaagcgugaaaaauggcaccuacgauuauccuaaguacucagaggaagccaaacugaacagagagaagaucgacggggucaaacuugagaguacaaggauuuaucaaauacuggcuaucuacuccaccguggcgagcucuuugguccucgugguuucacugggagcaauuaguuuuuggaugugcagcaaugguuccuuacagugccggaucuguaucuga

SEQ ID NO: 138482 - RNA, 1701 nt, Artificial Sequence
  derived and/or modified CDS sequence (opt3) from hemagglutinin__InfluenzaA__AGU01888
augaaggccauccugguggucaugcucuacaccuucgcuacagcaaacgccgacacucuuugcauuggcuaucacgcgaauaacagcacggauaccguugacacagugcuggagaaaaauguaacugugacccauuccgucaacuuguuagaagauaagcacaaugggaaacuguguaagcuaagaggaguggcuccccuccaucuggguaaaugcaacauagccggcuggauccuugggaauccugagugugaaucucugucaacagcaaguagcugguccuacauuguugagaccucuggaucggacaacggcacuugcuauccaggugauuuuaucgacuacgaagaguugagggagcagcucucaagcgugaguuccuucgaacgguuugagauuuucccgaagacaucuagcuggcccaaucacgauuccaacaagggggucaccgccgcuuguccucaagcaggagccaaaggcuuuuauaagaaucugaucuggcuggugaaaaagggcaacucauacccaaaacucaguaagagcuauauaaaugacaaggggaaagaaguauuaguucuguggggaauccaucaccccucuacgacugcugaucagcagucccuuuaccagaacgccgacaccuacguguucgucgguacaucacgcuauagcaagaaauuuaagccugagauugcgauccgaccaaaagugcgugaucaagagggcagaaugaauuacuauuggacuuugguggaacccggggacaagauuaccuucgaggcaacaggaaaccuggucguuccuagguacgccuuugcuauggaacggaacgccggcagugguaucauaauuucugauaccccagugcacgacugcaauacgacuugucagacaccgaaaggggcaaucaacaccucccuacccuuccagaauauucauccuaucacuaucggaaagugcccaaaguauguaaaaagcacaaagcuccgccuggcuaccggccuuagaaacgugcccucgauucagucuaggggccuguuuggggccauagcgggauucaucgaggguggcuggacggggauggucgacggaugguacggcuaucaccaucaaaaugaacaggguuccggguacgccgcagauuugaaaucaacccagaacgcuauugacaagaucacaaauaaagugaacaguguuauagagaagaugaauacucgguuuaccgccgugggcaaggaguucaaccaccucgaaaaacgcauugagaaucugaacaagaaagucgaugacggauucuuagauaucuggacauacaaugcugaacugcucgugcuucuggagaacgaacgaacuuuggacuaucacgauagcaauguaaagaaccuauacgagaaaguuagaaaccagcugaagaauaacgccaaggagaucggcaauggguguuuugaguucuaucauaaaugcgacaacaccuguauggaauccgugaagaauggaacauacgauuauccuaaauacucugaagaggcaaagcucaacagggaagagauugacggugucaaacuggagagcacccggaucuaucaaauucuugccauauacucaacuguggcuaguucccuggucuuggugguuagccucggcgcgaucucuuuuuggaugugcucaaaugggagucugcagugccguauuuguaucuga

SEQ ID NO: 138483 - RNA, 1701 nt, Artificial Sequence; identical to SEQ ID NO: 138474
  derived and/or modified CDS sequence (opt3) from hemagglutinin__InfluenzaA__AGU01889

SEQ ID NO: 138484 - RNA, 1701 nt, Artificial Sequence
  derived and/or modified CDS sequence (opt3) from hemagglutinin__InfluenzaA__AGU01890
augaaggccauccugguggucaugcucuacaccuucgcuacagcaaacgccgacacucuuugcauuggcuaucacgcgaauaacagcacggauaccguugacacagugcuggagaaaaauguaacugugacccauuccgucaacuuguuagaagauaagcacaaugggaaacuguguaagcuaagaggaguggcuccccuccaucuggguaaaugcaacauagccggcuggauccuugggaauccugagugugaaucucugucaacagcaaguagcugguccuacauuguugagaccucuggaucggacaacggcacuugcuauccaggugauuuuaucgacuacgaagaguugagggagcagcucucaagcgugaguuccuucgaacgguuugagauuuucccgaagacaucuagcuggcccaaucacgauuccaacaagggggucaccgccgcuuguccucaagcaggagccaaaggcuuuuauaagaaucugaucuggcuggugaaaaagggcaacucauacccaaaacucaguaagagcuauauaaaugacaaggggaaagaaguauuaguucuguggggaauccaucaccccucuacgacugcugaucagcagucccuuuaccagaacgccgacaccuacguguucgucgguacaucacgcuauagcaagaaauuuaagccugagauugcgauccgaccaaaagugcgugaucaagagggcagaaugaauuacuauuggacuuugguggaacccggggacaagauuaccuucgaggcaacaggaaaccuggucguuccuagguacgccuuugcuauggaacggaacgccggcagugguaucauaauuucugauaccccagugcacgacugcaauacgacuugucagacaccgaaaggggcaaucaacaccucccuacccuuccagaauauucauccuaucacuaucggaaagugcccaaaguauguaaaaagcacaaagcuccgccuggcuaccggccuuagaaacgugcccucgauucagucuaggggccuguuuggggccauagcgggauucaucgaggguggcuggacggggauggucgacggaugguacggcuaucaccaucaaaaugaacaggguuccggguacgccgcagauuugaaaucaacccagaacgcuauugacaagaucacaaauaaagugaacaguguuauagagaagaugaauacucaguuuaccgccgugggcaaggaguucaaccaccucgaaaaacggauugagaaucugaacaagaaagucgaugacggauucuuagauaucuggacauacaaugcugaacugcucgugcuucuggagaacgaacgcacuuuggacuaucacgauagcaauguaaagaaccuauacgagaaaguucgaaaccaacugaagaauaacgccaaggagaucggcaauggguguuuugaguucuaucauaaaugcgacaacaccuguauggaauccgugaagaauggaacauacgauuauccuaaauacucugaagaggcaaagcucaacagagaagagauugacggugucaaacuggagagcaccaggaucuaucagauucuugccauauacucaacuguggcuaguucccuggucuuggugguuagccucggcgcgaucucuuuuuggaugugcucaaaugggagucugcagugccggauuuguaucuga

SEQ ID NO: 138485 - RNA, 1701 nt, Artificial Sequence
  derived and/or modified CDS sequence (opt3) from hemagglutinin__InfluenzaA__AGU92645
augaaggccauccuggugguccuccuuuacaccuucgcuacagcaaacgccgacacucugugcauuggcuaucacgcgaauaacagcacggauaccguugacacaguguuggagaaaaauguaacugugacccauuccgucaacuuacuggaagauaagcacaaugggaaacuauguaagcucagaggaguggcuccccugcaucuugguaaaugcaacauagccggcuggauccuggggaauccugagugugaaacauugucuaccgcaucaaguuggagcuacauuguugagacuuccucuucggacaacggaacaugcuauccaggcgauuuuaucgacuacgaagaacucagggagcagcugucaagcgugaguuccuucgaacgguuugagauuuucccgaagaccucuagcuggcccaaucacgauuccaacaagggugucacggccgcuuguccucaugcaggggccaaaggauuuuauaagaaucugaucuggcucgugaaaaagggcaacucauacccaaaauuaaguaagagcuauauaaaugacaagggcaaagaaguacugguucuuugggggauccaccaccccucuacuaccgcugaucaacaguccuuguaccagaacgccgacacauacguguucgucggaacuucacgcuauagcaagaaauuuaagccugagauugagacccgaccaaaagugcgugaucaggaagguagaaugaauuacuauuggacacugguggagcccggcgacaagaucaccuucgaagcgacggggaaccuagucguuccuagguacgcauuugccauggagcgggaugcuggaaguggcauuaucauaucugacacuccagugcaugacugcaacacaaccugucaaacuccgaaaggugccauuaauacaucccuccccuuccagaacauccacccuauuaccaucgggaagugcccaaaguauguaaaaagcacgaagcugcgccuugcaaccggacugagaaaugugcccucgauccagucuaggggcuuguuuggcgcuauugccggguucauagaaggagguuggacaggcauggucgaugggugguacggauaucaucaccagaacgagcaaggcuccgguuacgcggccgaccucaaaucaacucagaaugcaaucgauaagauuaccaacaaagugaauaguguuaucgagaagaugaacacacaguuuacugcuguggggaaggaguucaaucaccuggagaaacggauagaaaacuuaaauaagaaagucgacgauggcuuccuggacauuuggaccuacaacgccgagcuccuugugcuguuggaaaaugagcgcacacuagauuaucaugacagcaacguaaagaaucuguacgagaaaguucgaaaccagcucaagaacaaugcuaaggaaaucggaaacggcuguuuugaguucuaucacaaaugcgauaauaccuguauggaauccgugaagaacgggacuuacgacuauccuaaauacucugaggaagccaagcugaauagagaggagaucgauggagucaaacuugaaagcacgaggauuuaucaaauccuggcaauuuacucaacagccgcuaguuccuuggugcucgucgugagccugggugcgauaucuuuuuggaugugcucaaacggcaguuuacagugccggaucuguauuuga

SEQ ID NO: 138486 - RNA, 1701 nt, Artificial Sequence
  derived and/or modified CDS sequence (opt3) from hemagglutinin__InfluenzaA__AGU92667
augaaggccauccuggugguccuccuuuacaccuucgcuacagcaaacgccgacacucugugcauuggcuaucacgcgaauaacagcacggauaccguugacacaguguuggagaaaaauguaacugugacccauuccgucaacuuacuggaagauaagcacaaugggaaacuauguaagcucagaggaguggcuccccugcaucuugguaaaugcaacauagccggcuggauccuggggaauccugagugugaaacauugucuaccgcaucaaguuggagcuacauuguugagacuuccucuucggacaacggaacaugcuauccaggcgauuuuaucgacuacgaagaacucagggagcagcugucaagcgugaguuccuucgaacgguuugagauuuucccgaagaccucuagcuggcccaaucacgauuccaacaagggugucacggccgcuuguccucaugcaggggccaaaggauuuuauaagaaucugaucuggcucgugaaaaagggcaacucauacccaaaauuaaguaagagcuauauaaaugacaagggcaaagaaguacugguucuuugggggauccaccaccccucuacuaccgcugaucaacaguccuuguaccagaacgccgacacauacguguucgucggaacuucacgcuauagcaagaaauuuaagccugagauugcgacccgaccaaaagugcgugaucaggaggguagaaugaauuacuauuggacacugguggaacccggcgacaagaucaccuucgaggcaacggggaaccuagucguuccuagguacgccuuugcuauggaacgggaugccggaaguggcauuaucauaucugacacuccagugcaugacugcaacacaaccugucaaacuccgaaaggugcaauuaauacaucccuccccuuccagaacauccacccuauuaccaucgggaagugcccaaaguauguaaaaagcacgaagcugcgccuugcuaccggacugagaaaugugcccucgauccagucuaggggcuuguuuggcgccauugcgggguucauagagggagguuggacaggcauggucgaugggugguacggauaucaucaccagaacgaacaaggcuccgguuacgccgcagaccucaaaucaacucagaaugcuaucgauaagauuaccaacaaagugaauaguguuaucgagaagaugaacacacaguuuacugccguggggaaggaguucaaucaccuggaaaaacggauagagaacuuaaauaagaaagucgacgauggcuuccuggacauuuggaccuacaacgcugaacuccuugugcuguuggagaaugaacgcgcccuagauuaucaugacagcaacguaaagaaucuguacgagaaaguucgaaaccagcucaagaacaaugcaaaggagaucggaaacggcuguuuugaguucuaucacaaaugcgauaauacauguauggaguccgugaagaacgggaccuacgacuauccuaaauacucugaagaggccaagcugaauagagaagagaucgauggagucaaacuugagagcacuaggauuuaucaaauccuggcuauuuacucaacggcggcaaguuccuuggugcucgucgugagccugggugccauaucuuuuuggaugugcucaaacggcaguuuacagugccggaucuguauuuga

SEQ ID NO: 138487 - RNA, 1701 nt, Artificial Sequence
  derived and/or modified CDS sequence (opt3) from hemagglutinin__InfluenzaA__AGU92678
augaaggccauccuggugguccuccuuuacaccuucgcuacagcaaacgccgacacucugugcauuggccaccaugcgaauaacagcacggauaccguugacacaguguuggagaaaaauguaacugugacccacuccgucaacuuacuggaagauaagcauaaugggaaacuauguaagcucagaggaguggcuccccugcaccuugguaaaugcaacauagccggcuggauccuggggaauccugagugugaaacauugucuaccgcaucaaguuggagcuauauuguugagacuuccucuucggacaacggaacaugcuacccaggcgauuuuaucgacuaugaagaacucagggagcagcugucaagcgugaguuccuucgaacgguuugagauuuucccgaagaccucuagcuggcccaaucaugauuccaacaagggugucacggccgcuuguccucacgcaggggccaaaggauuuuacaagaaucugaucuggcucgugaaaaagggcaacucauauccaaaauuaaguaagagcuacauaaaugacaagggcaaagaaguacugguucuuugggggauccaccaucccucuacuaccgcugaucaacaguccuuguaucagaacgccgacacauacguguucgucggaacuucacgcuacagcaagaaauuuaagccugagauugcgacccgaccaaaagugcgugaucaggaggguagaaugaauuauuacuggacacugguggaacccggcgacaagaucaccuucgaggcaacggggaaccuagucguuccuagguaugccuuugcuauggaacgggaugccggaaguggcauuaucauaucugacacuccagugcacgacugcaacacaaccugucaaacuccgaaaggugcaauuaauacaucccuccccuuccagaacauccauccuauuaccaucgggaagugcccaaaguacguaaaaagcacgaagcugcgccuugcuaccggacugagaaaugugcccucgauccagucuaggggcuuguuuggcgccauugcgggguucauagagggagguuggacaggcauggucgaugggugguauggauaccaccaccagaacgaacaaggcuccgguuaugccgcagaccucaaaucaacucagaaugcuaucgauaagauuaccaacaaagugaauaguguuaucgagaagaugaacacacaguuuacugccguggggaaggaguucaaucaucuggaaaaacggauagagaacuuaaauaagaaagucgacgauggcuuccuggacauuuggaccuacaacgcugaacuccuugugcuguuggagaaugaacgcacacuagauuaccacgacagcaacguaaagaaucuguaugagaaaguucgaaaccagcucaagaacaaugccaaggagaucggaaacggcuguuuugaguucuaccauaaaugcgauaauaccuguauggaguccgugaagaacgggacuuaugacuacccuaaauauucugaagaggcaaagcugaauagagaagagaucgauggagucaaacuugagagcacgaggauuuaccaaauccuggccauuuauucaacagcugcgaguuccuuggugcucgucgugagccugggugcaauaucuuuuuggaugugcucaaacggcaguuuacagugccggaucuguauuuga

SEQ ID NO: 138488 - RNA, 1701 nt, Artificial Sequence
  derived and/or modified CDS sequence (opt3) from hemagglutinin__InfluenzaA__AGU92711
augaaggccauccuggugguccuccuuuacaccuucgcuacagcaaacgccgacacucugugcauuggcuaucacgcgaauaacagcacggauaccguugacacaguguuggagaaaaauguaacugugacccauuccgucaacuuacuggaagauaagcacaaugggaaacuauguaagcucagaggaguggcuccccugcaucuugguaaaugcaacauagccggcuggauccuggggaauccugagugugaaucuuugucaacagcaaguagcugguccuacauuguugagaccucuucgucagacaacggaacuugcuauccaggcgauuuuaucgacuacgaggagcucagggagcagcugagcaguguguccucuuucgaacgguuugagauuuucccgaagacaagcuccuggcccaaucacgauucaaacaagggugucaccgccgcuuguccucaugcaggggccaaaaguuuuuauaagaaucugaucuggcucgugaaacaaggaaacagcuacccaaaguuaucuaaauccuauauaaaugacaagggcaaggaaguacugguucuuuggggcauccaccaccccucaacgagcgcugaucagcagaguuuguaccagaacgccgacgcguacguguucgucgggucuucccgcuauagcaaaaaguuuaaaccugagauugcaauccgaccaaaggugcgugaucaagagggaagaaugaauuacuauuggacucugguggaacccggugacaaaauuaccuucgaggccacaggcaaccuagucguuccuagguacgcuuuugccauggaacggaacgcagggucgggaaucauaauuucugauacuccagugcaugacugcaauaccacaugucagaccccgaagggcgcuaucaacacgucccuccccuuccagaauauucacccuaucacuaucgguaaaugcccaaaguauguaaagucaacaaaacugcgccuugccaccgggcugagaaacgugcccaguauucagagcaggggauuguuuggcgcgauagccggcuucaucgaagggggauggacugguauggucgacggcugguacggguaucaucaccaaaaugaacagggauccggcuacgcagcugaucucaagucuacacagaacgccauugacgagaucaccaauaaagugaacagcguuauagagaagaugaauacgcaguuuaccgcuguggguaaagaguucaaccaccuggaaaagcggauugaaaauuuaaacaagaaagucgaugacggguuccuggauaucuggacauacaaugccgagcuccuugugcuguuggaaaacgagcgcacucuagacuaucaugauucaaauguaaagaaccuguacgagaaaguucgaagucaacucaagaacaaugcaaaagaaaucggcaacggauguuuugaguucuaucacaagugcgacaauaccuguauggaauccgugaagaacggcacauacgauuauccuaaauacagcgaggaagccaagcugaauagagaggagauugacggggucaaacuugaaucuacuaggaucuaucagauucuggcuauauacucaaccguggcgaguagcuugguccucgugguuucccugggagcaaucucuuuuuggaugugcucgaacgguagcuuacagugccggauuuguaucuga

SEQ ID NO: 138489 - RNA, 1701 nt, Artificial Sequence
  derived and/or modified CDS sequence (opt3) from hemagglutinin__InfluenzaA__AGU92722
augaaggccauccuggugguccuccuuuacaccuucgcuacagcaaacgccgacacucugugcauuggcuaucacgcgaauaacagcacggauaccguugacacaguguuggagaaaaauguaacugugacccauuccgucaacuuacuggaagauaagcacaaugggaaacuauguaagcucagaggaguggcuccccugcaucuugguaaaugcaacauagccggcuggauccuggggaauccugagugugaaucuuugucaacagcaaguagcugguccuacauuguugagaccucuucgucagacaacggaacuugcuauccaggcgauuuuaucgacuacgaggagcucagggagcagcugagcaguguguccucuuucgaacgguuugagauuuucccgaagacaagcuccuggcccaaucacgauucagacaagggugucaccgccgcuuguccucaugcaggggccaaaaguuuuuauaagaaccugaucuggcucgugaaaaagggaaauagcuacccaaaauuaucuaaguccuauauaaacgauaagggcaaagaaguacugguucuuuggggcauccaccaccccucaacgagcgcugaccaacagaguuuguaccagaaugccgaugcguacguguucgucgggucuucccgcuauagcaagaaauuuaagccugagauugcaauccgaccaaaagugcgugaccaggagggaagaaugaacuacuauuggacucugguggaacccggugauaagauuaccuucgaggccacaggcaaucuagucguuccuagguacgcuuuugccauggaacggaacgcagggucgggaaucauaauuucugacacuccagugcaugacugcaacaccacaugucaaaccccgaaaggcgcuaucaauacgucccuccccuuccagaacauucacccuaucacuaucgguaagugcccaaaguauguaaaaucaacaaagcugcgccuugccaccgggcugagaaaugugcccaguauucagagcaggggauuguuuggcgcgauagccggcuucaucgaagggggauggacugguauggucgauggcugguacggguaucaucaccagaacgaacaaggauccggcuacgcagcugaccucaaaucuacacagaaugccauugaugagaucaccaacaaggugaauagcguuauagagaaaaugaacacgcaguuuaccgcuguggguaaggaguucaaucaccuggaaaagcggauugaaaacuuaaauaaaaaggucgacgauggguuccuggacaucuggacauacaacgccgagcuccuugugcuguuggaaaaugagcgcacucuagauuaucaugacucaaacguaaagaaucuguacgagaagguucgaagucagcucaaaaacaacgcaaaggaaaucggcaauggauguuuugaguucuaucacaagugcgauaacaccuguauggaauccgugaaaaauggcacauacgacuauccuaaguacagcgaggaagccaaacugaacagagaggagauugauggggucaaacuugaaucuacuaggaucuaucaaauucuggcuauauacucaaccguggcgaguagcuugguccucgugguuucccugggagcaaucucuuuuuggaugugcucgaaugguagcuuacagugccggauuuguaucuga

SEQ ID NO: 138490 - RNA, 1701 nt, Artificial Sequence; identical to SEQ ID NO: 138489
  derived and/or modified CDS sequence (opt3) from hemagglutinin__InfluenzaA__AGU92733

SEQ ID NO: 138491 - RNA, 1701 nt, Artificial Sequence
  derived and/or modified CDS sequence (opt3) from hemagglutinin__InfluenzaA__AGU92744
augaaggccauccuggugguccuccuuuacaccuucgcuacagcaaacgccgacacucugugcauuggcuaucacgcgaauaacagcacggauaccguugacacaguguuggagaaaaauguaacugugacccauuccgucaacuuacuggaagauaagcacaaugggaaacuauguaagcucagaggaguggcuccccugcaucuugguaaaugcaacauagccggcuggauccuggggaauccugagugugaaucuuugucaacagcaaguagcugguccuacauuguugagaccucuucgucagacaacggaacuugcuauccaggcgauuuuaucgacuacgaggagcucagggagcagcugagcaguguguccucuuucgaacgguuugagauuuucccgaagacaagcuccuggcccaaucacgauucagacaagggugucaccgccgcuuguccucaugcaggggccaaaaguuuuuauaagaaccugaucuggcucgugaaaaagggaaauagcuacccaaaauuaucuaaguccuauauaaacgauaagggcaaagaaguacugguucuuuggggcauccaccaccccucaacgagcgcugaccaacagaguuuguaccagaaugccgaugcguacguguucgucgggucuucccgcuauagcaagaaauuuaagccugagauugcaauccgaccaaaagugcgugaccaggagggaagaaugaacuacuauuggacucugguggaacccggugauaagauuaccuucgaggccacaggcaaucuagucguuccuagguacgcuuuugccauggaacggaacgcagggucgggaaucauaauuucugacacuccagugcaugacugcaacaccacaugucaaaccccgaaaggcgcuaucaauacgucccuccccuuccagaacauucacccuaucacuaucgguaagugcccaaaguauguaaaaucaacaaagcugcgccuugccaccgggcugagaaaugugcccaguauucagagcaggggauuguuuggcgcgauagccggcuucaucgaagggggauggacugguauggucgauggcugguacggguaucaucaccagaacgaacaaggauccggcuacgcagcugaccucaaaucuacacagaaugccauugaugagaucaccaacaaggugaauagcguuauagagaaaaugaacacgcaguuuaccgcuguggguaaggaguucaaucaccuggaaaagcggauugaaaacuuaaauaaaaaggucgacgauggguuccuggacaucuggacauacaacgccgagcuccuugugcuguuggaaaaugagcgcacucuagauuaucaugacucaaacguaaagaaucuguacgagaagguucgaagucagcucaaaaacaacgcaaaggaaaucggcaauggauguuuugaguucuaucacaagugcgauaacaccuguauggaauccgugaaaaauggcgccuacgacuauccuaaguacagcgaggaagcuaaacugaacagagaggagauugauggggucaaacuugaaucuacaaggaucuaucaaauucuggcgauauacucaacuguggcaaguagcuugguccucgugguuucccugggagccaucucuuuuuggaugugcucgaaugguagcuuacagugccggauuuguaucuga

SEQ ID NO: 138492 - RNA, 1701 nt, Artificial Sequence
  derived and/or modified CDS sequence (opt3) from hemagglutinin__InfluenzaA__AGU92755
augaaggccauccuggugguccuccuuuacaccuucgcuacagcaaacgccgacacucugugcauuggcuaucacgcgaauaacagcacggauaccguugacacaguguuggagaaaaauguaacugugacccauuccgucaacuuacuggaagauaagcacaaugggaaacuauguaagcucagaggaguggcuccccugcaucuugguaaaugcaacauagccggcuggauccuggggaauccugagugugaaucuuugucaacagcaaguagcugguccuacauuguugagaccucuucgucagacaacggaacuugcuauccaggcgauuuuaucgacuacgaagaacucagggagcagcugagcaguguguccucuuucgaacgguuugagauuuucccgaagacaagcuccuggcccaaucacgauucaaacaagggugucaccgccgcuuguccucaugcaggggccaaaaguuuuuauaagaaucugaucuggcucgugaaaaagggaaacagcuacccaaaauuaucuaaguccuauauaaaugacaagggcaaagaaguacugguucuuuggggcauccaccaccccucaacgagcgcugaucaacagaguuuguaccagaacgccgacgcguacguguucgucgggucuucccgcuauagcaaggaguuuaaaccugagauugcaauccgaccaaaggugcgugaucaggaaggaagaaugaauuacuauuggacucugguggagcccggugacaaaauuaccuucgaagccacaggcaaccuagucguuccuagguacgcuuuugccauggagcggaacgcagggucgggaaucauaauuucugauacuccagugcaugacugcaauaccacaugucaaaccccgaagggcgcuaucaacacgucccuccccuuccagaauauucacccuaucacuaucgguaaaugcccaaaguauguaaagucaacaaaacugcgccuugccaccgggcugagaaacgugcccaguauucagagcaggggauuguuuggcgcgauagccggcuucaucgaagggggauggacugguauggucgacggcugguacggguaucaucaccagaaugagcaaggauccggcuacgcagcugaucucaagucuacacagaacgccauugacgagaucaccaauaaagugaacagcguuauagaaaagaugaauacgcaguuuaccgcuguggguaaagaguucaaccaccuggaaaagcggauugagaauuuaaacaagaaagucgaugacggguuccuggauaucuggacauacaaugccgaacuccuugugcuguuggagaacgagcgcacucuagacuaucaugauucaaauguaaagaaccuguacgaaaaaguucgaagucagcucaagaacaaugcaaaagagaucggcaacggauguuuugaguucuaucacaagugcgacaauaccuguauggaguccgugaagaacggcacauacgauuauccuaaauacagcgaagaggccaagcugaauagagaggaaauugacggggucaaacuugagucuacuaggaucuaucaaauucuggcuauauacucaaccguggcgaguagcuugguccucgugguuucccugggagcaaucucuuuuuggaugugcucgaacgguagcuuacagugccggauuuguaucuga

SEQ ID NO: 138493 - RNA, 1701 nt, Artificial Sequence
  derived and/or modified CDS sequence (opt3) from hemagglutinin__InfluenzaA__AGU92766
augaaggccauccuggugguccuccuuuacaccuucgcuacagcaaacgccgacacucugugcauuggcuaucacgcgaauaacagcacggauaccguugacacaguguuggagaaaaauguaacugugacccauuccgucaacuuacuggaagauaagcacaaugggaaacuauguaagcucagaggaguggcuccccugcaucuugguaaaugcaacauagccggcuggauccuggggaauccugagugugaaacauugucuaccgcaucaaguuggagcuacauuguugagacuuccucuucggacaacggaacaugcuauccaggcgauuuuaucgacuacgaagaacucagggagcagcugucaagcgugaguuccuucgaacgguuugagauuuucccgaagaccucuagcuggcccaaucacgaauccaacaagggugucacggccgcuuguccucaugcaggggccaaaggauuuuauaagaaucugaucuggcucgugaaaaagggcaacucauacccaaaauuaaguaagagcuauauaaaugauaagggcaaagagguacugguucuuugggggauccaccaccccucuacuaccgcugaccaacaguccuuguaccagaacgccgaugcguacguguucgucggaacaucacgcuauagcaagaaauuuaagccugagauugcaacucgaccaaaagugcgugaccaggaagguagaaugaauuacuauuggacccugguggagcccggcgauaagaucacauucgaagccaccgggaaccuagucguuccuagguacgcuuuugccauggagcgggacgcaggaaguggcauuaucauaucugauacgccagugcaugacugcaacacuacaugucaaaccccgaaaggugcuauuaauacuucccuccccuuccagaacauccacccuauuacaaucgggaagugcccaaaguauguaaaaagcaccaagcugcgccuugccacgggacugagaaaugugcccucgauccagucuaggggcuuguuuggcgcgauugccggguucauagaaggagguuggaccggcauggucgacgggugguacggauaucaucaccagaacgagcaaggcuccgguuacgcagcugaucucaaaucaacacagaaugccaucgacaagauuacuaacaaagugaauaguguuaucgagaagaugaacacccaguuuacagcuguggggaaggaguucaaucaccuggagaaacggauagaaaacuuaaauaagaaagucgaugacggcuuccuggauauuuggacuuacaacgccgagcuccuugugcuguuggaaaaugagcgcacccuagacuaucaugauagcaacguaaagaaucuguacgagaaaguucgaaaccagcucaagaacaaugcaaaggaaaucggaaacggcuguuuugaguucuaucacaaaugcgacaauacauguauggaauccgugaagaacgggaccuacgauuauccuaaauacucugaggaagccaagcugaauagagaggagaucgacggagucaaacuugaaagcacuaggauuuaucaaauccuggcuauuuacucaacggcggcaaguuccuuggugcucgucgugagccugggugccauaucuuuuuggaugugcucaaacggcaguuuacagugccggaucuguauuuga

SEQ ID NO: 138494 - RNA, 1701 nt, Artificial Sequence
  derived and/or modified CDS sequence (opt3) from hemagglutinin__InfluenzaA__AGU92777
augaaggccauccuggugguccuccuuuacaccuucgcuacagcaaacgccgacacucugugcauuggcuaucacgcgaauaacagcacggauaccguugacacaguguuggagaaaaauguaacugugacccauuccgucaacuuacuggaagauaagcacaaugggaaacuauguaagcucagaggaguggcuccccugcaucuugguaaaugcaacauagccggcuggauccuggggaauccugagugugaaacauugucuaccgcaucaaguuggagcuacauuguugagacuuccucuucggacaacggaacaugcuauccaggcgauuuuaucgacuacgaagaacucagggagcagcugucaagcgugaguuccuucgaacgguuugagauuuucccgaagaccucuagcuggcccaaucacgaauccaacaagggugucacggccgcuuguccucaugcaggggccaaaggauuuuauaagaaucugaucuggcucgugaaaaagggcaacucauacccaaaauuaaguaagagcuauauaaaugauaagggcaaagagguacugguucuuugggggauccaccaccccucuacuaccgcugaccaacaguccauuuaccagaacgccgauacauacguguucgucggaacuucacgcuauagcaagaaauuuaagccugagaucgcgacccgaccaaaagugcgugaccaggaagguagaaugaauuacuauuggacauugguggagcccggcgauaagauuaccuucgaagcaacggggaaccuggucguuccuagguacgccuuugcuauggagcgggacgccggaaguggcaucauaauuucugauacuccagugcaugacugcaacacaaccugucaaacuccgaaaggugcaaucaauacaucccuacccuuccagaacauucacccuaucaccaucgggaagugcccaaaguauguaaaaagcacgaagcuccgccuggcuaccggacuuagaaaugugcccucgauucagucuaggggccuguuuggcgccauagcgggguucaucgaaggagguuggacaggcauggucgacgggugguacggauaucaucaccagaacgagcaaggcuccgguuacgccgcagauuugaaaucaacucagaaugcuauugacaagaucaccaacaaagugaauaguguuauagagaagaugaacacacaguuuacugccguggggaaggaguucaaucaccucgagaaacggauugaaaaccugaauaagaaagucgaugacggcuucuuagauaucuggaccuacaacgcugagcugcucgugcuucuggaaaaugagcgcacauuggacuaucaugauagcaacguaaagaaucuauacgagaaaguucgaaaccagcugaagaacaaugccaaggaaaucggaaacggcuguuuugaguucuaucacaaaugcgacaauaccuguauggaauccgugaagaacgggacuuacgauuauccuaaauacucugaggaagcaaagcucaauagagaggagauugacggagucaaacuggaaagcacgaggaucuaucaaauucuugccauauacucaacagcugcgaguucccugguguuggucgugagccucggugcaaucucuuuuuggaugugcucaaacggcagucugcagugccggauuuguaucuga

SEQ ID NO: 138495 - RNA, 1701 nt, Artificial Sequence
  derived and/or modified CDS sequence (opt3) from hemagglutinin__InfluenzaA__AGU92788
augaaggccauccuggugguccuccuuuacaccuucgcuacagcaaacgccgacacucugugcauuggcuaucacgcgaauaacagcacggauaccguugacacaguguuggagaaaaauguaacugugacccauuccgucaacuuacuggaagauaagcacaaugggaaacuauguaagcucagaggaguggcuccccugcaucuugguaaaugcaacauagccggcuggauccuggggaauccugagugugaaacauugucuaccgcaucaaguuggagcuacauuguugagacuuccucuucggacaacggaacaugcuauccaggcgauuuuaucgacuacgaagaacucagggagcagcugucaagcgugaguuccuucgaacgguuugagauuuucccgaagaccucuagcuggcccaaucacgauuccgacaagggugucacggccgcuuguccucaugcaggggccaaaggauuuuauaagaaccugaucuggcucgugaaaaagggcaauucauacccaaaauuaaguaagagcuauauaaacgauaagggcaaagaaguacugguucuuugggggauccaccaccccucuacuaccgcugaccaacaguccuuguaccagaaugccgaugcguacguguucgucggaacaucacgcuauagcaagaaauuuaagccugagauugcaacucgaccaaaagugcgugacagagaggguaggaugaacuacuauuggacccugguggaacccggcgauaagaucacauucgaggccaccgggaaucuagucguuccucgguacgcuuuugccauggaacgcgacgcaggaaguggcauuaucauaucugacacgccagugcaugauugcaacacuacaugucagaccccgaaaggugcuauuaacacuucccuccccuuccaaaauauccacccuauuacaaucgggaagugcccaaaguauguaaaaagcaccaagcugagacuugccacgggacugaggaacgugcccucgauccagucucggggcuuguuuggcgcgauugccggguucauagagggagguuggaccggcaugcucgacgggugguacggauaucaucaccagaaugaacagggcuccgguuacgcagcugaucugaaaucaacacaaaacgccaucgacaagauuacuaauaaagucaacagugugaucgagaagaugaauacccaguuuacagcuguugggaaggaguucaaccacuuagaaaaacgcauagagaaucugaacaagaaaguggaugacggcuuccucgauauuuggacuuacaaugccgaacuucuggucuugcuagagaacgaacgaacccuggacuaucaugauagcaaugugaagaaccucuacgagaaaguaagaaaucagcugaagaacaacgcaaaggagaucggaaauggcuguuuugaguucuaucacaaaugcgacaacacauguauggaguccguuaagaaugggaccuacgauuauccuaaauacucugaagaggccaaacuuaacagggaagagaucgacggagugaagcuggagagcacucggauuuaucagaucuuggcuauuuacucaacggcggcaaguucccucguccugguggucagcuuaggugccauaucuuuuuggaugugcucaaauggcagucugcaaugccguaucuguauuuga

SEQ ID NO: 138496 - RNA, 1701 nt, Artificial Sequence
  derived and/or modified CDS sequence (opt3) from hemagglutinin__InfluenzaA__AGU92799
augaaggccauccuggugguccuccuuuacaccuucgcuacagcaaacgccgacacucugugcauuggcuaucacgcgaauaacagcacggauaccguugacacaguguuggagaaaaauguaacugugacccauuccgucaacuuacuggaagauaagcacaaugggaaacuauguaagcucagaggaguggcuccccugcaucuugguaaaugcaacauagccggcuggauccuggggaauccugagugugaaacauugucuaccgcaucaaguuggagcuacauuguugagacuuccucuucggacaacggaacaugcuauccaggcgauuuuaucgacuacgaagaacucagggagcagcugucaagcgugaguuccuucgaacgguuugagauuuucccgaagaccucuagcuggcccgaucacgacuccaauaagggugucacggccgcuuguccucaugcaggggccaaaggauuuuauaagaaccugaucuggcucgugaaaaagggcaauucauacccaaaauuaaguaagagcuauauaaacgauaagggcaaagaaguacugguucuuugggggauccaccaccccucuacuaccgcugaccaacaguccuuguaccagaaugccgaugcguacguguucgucggaacaucacgcuauagcaagaaauuuaagccugagauugcaacucgaccaaaagugcgugacagagaggguaggaugaacuacuauuggacccugguggaacccggcgauaagaucacauucgaggccaccgggaaucuagucguuccucgguacgcuuuugccauggaacgcgacgcaggaaguggcauuaucauaucugacacgccagugcaugauugcaacacuacaugucagaccccgaaaggugcuauuaacacuucccuccccuuccaaaauauccacccuauuacaaucgggaagugcccaaaguauguaaaaagcaccaagcugagacuugccacgggacugaggaacgugcccucgauccagucucggggcuuguuuggcgcgauugccggguucauagagggagguuggaccggcauggucgacgggugguacggauaucaucaccagaaugaacagggcuccgguuacgcagcugaucucaaaucaacacaaaacgccaucgacaagauuacuaauaaagugaacaguguuaucgagaagaugaauacccaguuuacagcuguggggaaggaguucaaccaccuggaaaaacgcauagagaauuuaaacaagaaagucgaugacggcuuccuggauauuuggacuuacaaugccgaacuccuugugcuguuggagaacgaacgaacccuagacuaucaugauagcaauguaaagaaccuguacgagaaaguuagaaaucagcucaagaacaacgcaaaggagaucggaaauggcuguuuugaguucuaucacaaaugcgacaacacauguauggaguccgugaagaaugggaccuacgauuauccuaaauacucugaagaggccaagcugaacagggaagagaucgacggagucaaacuugagagcacucggauuuaucagauccuggcuauuuacucaacggcggcaaguuccuuggugcucgucgugagccugggugccauaucuuuuuggaugugcucaaauggcaguuuacaaugccguaucuguauuuga

SEQ ID NO: 138497 - RNA, 1701 nt, Artificial Sequence
  derived and/or modified CDS sequence (opt3) from hemagglutinin__InfluenzaA__AGU92821
augaaggccauccuggugguccuccuuuacaccuucgcuacagcaaacgccgacacucugugcauuggcuaucacgcgaauaacagcacggauaccguugacacaguguuggagaaaaauguaacugugacccauuccgucaacuuacuggaagauaagcacaaugggaaacuauguaagcucagaggaguggcuccccugcaucuugguaaaugcaacauagccggcuggauccuggggaauccugagugugaaacauugucuaccgcaucaaguuggagcuacauuguugagacuuccucuucggacaacggaacaugcuauccaggcgauuuuaucgacuacgaagaacucagggagcagcugucaagcgugaguuccuucgaacgguuugagauuuucccgaagaccucuagcuggcccaaucacgauuccaacaagggugucacggccgcuuguccucaugcaggggccaaaggauuuuauaagaaucugaucuggcucgugaaaaagggcaacucauacccaaaauuaaguaagagcuauauaaaugacaagggcaaagaaguacugguucuuugggggauccaccaccccucuacuaccgcugaucaacaguccuuguaccagaacgccgacacauacguguucgucggaacuucacgcuauagcaagauguuuaaaccugagauugcgacccgaccaaaggugcgugauagagaggguaggaugaauuacuauuggacacugguggaacccggcgacaaaaucaccuucgaggcaacggggaaccuagucguuccucgguacgccuuugcuauggaacgcgaugccggaaguggcauuaucauaucugacacuccagugcaugacugcaacacaaccugucagacuccgaagggugcaauuaauacaucccuccccuuccaaaacauccacccuauuaccaucgggaaaugcccaaaguauguaaagagcacgaaacugagacuugcuaccggacugaggaaugugcccucgauccagucucggggcuuguuuggcgccauugcgggguucauagagggagguuggacaggcauggucgaugggugguacggauaucaucaccagaacgaacagggcuccgguuacgccgcagaccucaagucaacucaaaaugcuaucgauaaaauuaccaacaaggugaauaguguuaucgagaaaaugaacacacaguuuacugccguggggaaggaguucaaucaccuggaaaagcgcauagagaacuuaaauaaaaaggucgacgauggcuuccuggacauuuggaccuacaacgcugaacuccuugugcuguuggagaaugaacgaacacuagauuaucaugacagcaacguaaagaaucuguacgagaagguuagaaaccagcucaaaaacaaugccaaggagaucggaaacggcuguuuugaguucuaucacaagugcgauaauaccuguauggaguccgugaaaaacgggacuuacgacuauccuaaguacucugaagaggcaaaacugaauagggaagagaucgauggagucaaacuugagagcacgcggauuuaucagauccuggccauuuacucaacagcugcgaguuccuuggugcucgucgugagccugggugcaauaucuuuuuggaugugcucaaacggcaguuuacaaugccguaucuguauuuga

SEQ ID NO: 138498 - RNA, 1701 nt, Artificial Sequence
  derived and/or modified CDS sequence (opt3) from hemagglutinin__InfluenzaA__AGU92843
augaaggccauccuggugguccuccuuuacaccuucgcuacagcaaacgccgacacucugugcauuggcuaucacgcgaauaacagcacggauaccguugacacaguguuggagaaaaauguaacugugacccauuccgucaacuuacuggaagauaagcacaaugggaaacuauguaagcucagaggaguggcuccccugcaucuugguaaaugcaacauagccggcuggauccuggggaauccugagugugaaucuuugucaacagcaaguagcugguccuacauuguugagaccucuucgucagacaacggaacuugcuauccaggcgauuuuaucgacuacgaggagcucagggagcagcugagcaguguguccucuuucgaacgguuugagauuuucccgaagacaagcuccuggcccaaucacgauucaaacaagggugucaccgccgcuuguccucaugcaggggccaaaaguuuuuauaagaaucugaucuggcucgugaaaaagggagacagcuacccaaaauuaucuaaguccuauauaaacgauaagggcaaagaaguacugguucuuuggggcauccaccaccccucaacgagcgcugaccaacagaguuuguaccagaaugccgaugcguacguguucgucgggucuucccgcuauagcaagaaauuuaagccugagauugcaauccgaccaaaagugcgugacagagagggaaggaugaacuacuauuggacucugguggaacccggugauaagauuaccuucgaggccacaggcaaucuagucguuccucgguacgcuuuugccauggaacgcaacgcagggucgggaaucauaauuucugacacuccagugcaugacugcaacaccacaugucagaccccgaaaggcgcuaucaauacgucccuccccuuccaaaacauucacccuaucacuaucgguaagugcccaaaguauguaaaaucaacaaagcugagacuugccaccgggcugaggaaugugcccaguauucagagccggggauuguuuggcgcgauagccggcuucaucgaagggggauggacugguauggucgauggcugguacggguaucaucaccagaacgaacagggauccggcuacgcagcugaccucaaaucuacacaaaaugccauugaugagaucaccaacaaggugaauagcguuauagagaaaaugaacacgcaguuuaccgcuguggguaaggaguucaaucaccuggaaaagcgcauugaaaacuuaaauaaaaaggucgacgauggguuccuggacaucuggacauacaacgccgagcuccuugugcuguuggaaaaugagcgaacucuagauuaucaugacucaaacguaaagaaucuguacgagaagguuagaagucagcucaaaaacaacgcaaaggaaaucggcaauggauguuuugaguucuaucacaagugcgauaacaccuguauggaauccgugaaaaauggcacauacgacuauccuaaguacagcgaggaagccaaacugaacagggaggagauugauggggucaaacuugaaucuacucggaucuaucagauucuggcuauauacucaaccguggcgaguagcuugguccucgugguuucccugggagcaaucucuuuuuggaugugcucgaaugguagcuuacaaugccguauuuguaucuga

SEQ ID NO: 138499 - RNA, 1710 nt, Artificial Sequence
  derived and/or modified CDS sequence (opt3) from hemagglutinin__InfluenzaA__AGU92854
augaaggccauccuggugguccuccuuuacaccuucgcuacagcaaacgccgacacucugugcauuggcuaucacgcgaauaacagcacggauaccguugacacaguguuggagaaaaauguaacugugacccauuccgucaacuuacuggaagauaagcacaaugggaaacuauguaagcucagaggaguggcuccccugcaucuugguaaaugcaacauagccggcuggauccuggggaauccugagugugaaucuuugucaacagcaaguagcugguccuacauuguugagaccucuucgucagacaacggaacuugcuauccaggcgauuuuaucgacuacgaggagcucagggagcagcugagcaguguguccucuuucgaacgguuugagauuuucccgaagacaagcuccuggcccaaucacgauucagacaagggugucaccgccgcuuguccucaugcaggggccaaaaguuuuuauaagaaccugaucuggcucgugaaaaagggaaauagcuacccaaaauuaucuaaguccuauauaaacgauaagggcaaagaaguacugguucuuuggggcauccaccaccccucaacgagcgcugaccaacagaguuuguaccagaaugccgaugcguacguguucgucgggucuucccgcuauagcaagaaauuuaagccugagauugcaauccgaccaaaagugcgugacagagagggaaggaugaacuacuauuggacucugguggaacccggugauaagauuaccuucgaggccacaggcaaucuagucguuccucgguacgcuuuugccauggaacgcaacgcagggucgggaaucauaauuucugacacuccagugcaugacugcaacaccacaugucagaccccgaaaggcgcuaucaauacgucccucacuucacugcccuuccaaaacauucacccuaucacaaucgguaagugcccaaaguauguaaaaaguaccaaacuuagacuggccacuggguugaggaaugugcccagcauucagucccggggacucuuuggcgcgauagccggcuucaucgaagggggauggacagguauggucgauggcugguacggguaucaucaccagaacgaacagggaucuggcuacgcagcugaccugaaaagcacccaaaaugccauugaugagaucacgaacaagguuaauucagugauagagaaaaugaacacccaguuuacagcuguggguaaggaguucaaucacuuagaaaagcgcauugaaaaccugaauaaaaaggucgacgauggguuccucgacaucuggacuuacaacgccgagcuucugguguugcuagaaaaugagcgaacccuggauuaucaugacaguaacguaaagaaucucuacgagaagguuagaucccagcugaaaaacaacgcaaaggaaaucggcaauggauguuuugaguucuaucacaagugcgauaacacauguauggaaagcgugaaaaauggcacuuacgacuauccuaaguacucugaggaagccaaacuuaacagggaggagauugauggggucaagcuggaaucaacccggaucuaucagauuuuggcuauauacaguacaguggcgagcucccucguccuggugguuucuuuaggagcaaucucguuuuggaugugcagcaaugguucccugcaaugccguauuuguaucuga

SEQ ID NO: 138500 - RNA, 1701 nt, Artificial Sequence
  derived and/or modified CDS sequence (opt3) from hemagglutinin__InfluenzaA__AGU92887
augaaggccauccuggugguccuccuuuacaccuucgcuacagcaaacgccgacacucugugcauuggcuaucacgcgaauaacagcacggauaccguugacacaguguuggagaaaaauguaacugugacccauuccgucaacuuacuggaagauaagcacaaugggaaacuauguaagcucagaggaguggcuccccugcaucuugguaaaugcaacauagccggcuggauccuggggaauccugagugugaaucuuugucaacagcaaguagcugguccuacauuguugagaccucuucgucagacaacggaacuugcuauccaggcgauuuuaucgacuacgaggagcucagggagcagcugagcaguguguccucuuucgaacgguuugagauuuucccgaagacaagcuccuggcccaaucacgauucaaacaagggugucaccgccgcuuguccucaugcaggggccaaaaguuuuuauaagaaucugaucuggcucgugaaaaagggaaacagcuacccaaaauuaucuaaguccuauauaaaugacaagggcaaagaaguacugguucuuuggggcauccaccaccccucaacgagcgaugaccaacagaguuuguaccagaacgcugaugccuacguguucgucgggucuucccgcuauagcaagaaauuuaagccugagauugcgauccgaccaaaagugcgugacagagagggaaggaugaauuacuauuggacucugguggaacccggugauaagauuaccuucgaggcaacaggcaaccuagucguuccucgguacgccuuugcuauggaacgcaacgccgggucgggaaucauaauuucugacacuccagugcaugacugcaauaccacaugucagaccccgaaaggcgcaaucaacacgucccuccccuuccaaaauauucacccuaucacuaucgguaagugcccaaaguauguaaaaucaacaaagcugagacuugcuaccgggcugaggaacgugcccaguauucagagccggggauuguuuggcgccauagcgggcuucaucgaagggggauggacugguauggucgauggcugguacggguaucaucaccagaaugaacagggauccggcuacgccgcagaccucaaaucuacacaaaacgcuauugaugagaucaccaauaaggugaacagcguuauagagaaaaugaauacgcaguuuaccgccguggguaaggaguucaaccaccuggaaaagcgcauugaaaauuuaaacaaaaaggucgacgauggguuccuggacaucuggacauacaaugcugagcuccuugugcuguuggaaaacgagcgaacucuagauuaucaugacucaaauguaaagaaccuguacgagaagguuagaagucagcucaaaaacaaugccaaggaaaucggcaacggauguuuugaguucuaucacaagugcgauaauaccuguauggaauccgugaaaaacggcacauacgacuauccuaaguacagcgaggaagcaaaacugaauagggaggagauugauggggucaaacuugaaucuacucggaucuaucagauucuggccauauacucaaccguggcuaguagcuugguccucgugguuucccugggagcgaucucuuuuuggaugugcucgaacgguagcuuacaaugccguauuuguaucuga

SEQ ID NO: 138501 - RNA, 1701 nt, Artificial Sequence; identical to SEQ ID NO: 138485
  derived and/or modified CDS sequence (opt3) from hemagglutinin__InfluenzaA__AGU92898

SEQ ID NO: 138502 - RNA, 1701 nt, Artificial Sequence; identical to SEQ ID NO: 138486
  derived and/or modified CDS sequence (opt3) from hemagglutinin__InfluenzaA__AGU92909

SEQ ID NO: 138503 - RNA, 1701 nt, Artificial Sequence; identical to SEQ ID NO: 138488
  derived and/or modified CDS sequence (opt3) from hemagglutinin__InfluenzaA__AGU92931

SEQ ID NO: 138504 - RNA, 1701 nt, Artificial Sequence; identical to SEQ ID NO: 138489
  derived and/or modified CDS sequence (opt3) from hemagglutinin__InfluenzaA__AGU92942

SEQ ID NO: 138505 - RNA, 1701 nt, Artificial Sequence; identical to SEQ ID NO: 138489
  derived and/or modified CDS sequence (opt3) from hemagglutinin__InfluenzaA__AGU92953

SEQ ID NO: 138506 - RNA, 1701 nt, Artificial Sequence
  derived and/or modified CDS sequence (opt3) from hemagglutinin__InfluenzaA__AGU92964
augaaggccauccuggugguccuccuuuacaccuucgcuacagcaaacgccgacacucugugcauuggcuaucacgcgaauaacagcacggauaccguugacacaguguuggagaaaaauguaacugugacccauuccgucaacuuacuggaagauaagcacaaugggaaacuauguaagcucagaggaguggcuccccugcaucuugguaaaugcaacauagccggcuggauccuggggaauccugagugugaaacauugucuaccgcaucaaguuggagcuacauuguugagacuuccucuucggacaacggaacaugcuauccaggcgauuuuaucgacuacgaagaacucagggagcagcugucaagcgugaguuccuucgaacgguuugagauuuucccgaagaccucuagcuggcccaaucacgauuccaacaagggugucacggccgcuuguccucaugcaggggccaaaggauuuuauaagaaucugaucuggcucgugaaaaagggcaacucauacccaaaauuaaguaagagcuauauaaaugacaagggcaaagaaguacugguucuuugggggauccaccaccccucuacuaccgcugaucaacaguccuuguaccagaacgccgacgcguacguguucgucggaacaucacgcuauagcaagaaauuuaagccugagauugcaacucgaccaaaagugcgugauagagaggguaggaugaauuacuauuggacccugguggaacccggcgacaagaucacauucgaggccaccgggaaccuagucguuccucgguacgcuuuugccauggaacgcgaugcaggaaguggcauuaucauaucugacacgccagugcaugacugcaacacuacaugucagaccccgaaaggugcuauuaauacuucccuccccuuccaaaacauccacccuauuacaaucgggaagugcccaaaguauguaaaaagcaccaagcugagacuugccacgggacugaggaaugugcccucgauccagucucggggcuuguuuggcgcgauugccggguucauagagggagguuggaccggcaugcucgaugggugguacggauaucaucaccagaacgaacagggcuccgguuacgcagcugaccugaaaucaacacaaaaugccaucgauaagauuacuaacaaagucaauagugugaucgagaagaugaacacccaguuuacagcuguugggaaggaguucaaucacuuagaaaaacgcauagagaaccugaauaagaaaguggacgauggcuuccucgacauuuggacuuacaacgccgaacuucuggucuugcuagagaaugaacgaacccuggauuaucaugacagcaacgugaagaaucucuacgagaaaguaagaaaccagcugaagaacaaugcaaaggagaucggaaacggcuguuuugaguucuaucacaaaugcgauaauacauguauggaguccguuaagaacgggaccuacgacuauccuaaauacucugaagaggccaaacuuaauagggaagagaucgauggagugaagcuggagagcacucggauuuaucagaucuuggcuauuuacucaacggcggcaaguucccucguccugguggucagcuuaggugccauaucuuuuuggaugugcucaaacggcagucugcaaugccguaucuguauuuga

SEQ ID NO: 138507 - RNA, 1701 nt, Artificial Sequence
  derived and/or modified CDS sequence (opt3) from hemagglutinin__InfluenzaA__AGU92975
augaaggccauccuggugguccuccuuuacaccuucgcuacagcaaacgccgacacucugugcauuggcuaucacgcgaauaacagcacggauaccguugacacaguguuggagaaaaauguaacugugacccauuccgucaacuuacuggaagauaagcacaaugggaaacuauguaagcucagaggaguggcuccccugcaucuugguaaaugcaacauagccggcuggauccuggggaauccugagugugaaacauugucuaccgcaucaaguuggagcuacauuguugagacuuccucuucggacaacggaacaugcuauccaggcgauuuuaucgacuacgaagaacucagggagcagcugucaagcgugaguuccuucgaacgguuugagauuuucccgaagaccucuagcuggcccaaucacgauuccaacaagggugucacggccgcuuguccucaugcaggggccaaaggauuuuauaagaaucugaucuggcucgugaaaaaggaaaacucauacccaaaauuaaguaagagcuauauaaaugacaagggcaaagagguacugguucuuuggggcauccaccaccccucuacuaccgcugaucaacaguccuuguaccagaacgccgacacauacguguucgucgggacuucacgcuauagcaagaaauuuaagccugagauugcgacccgaccaaaagugcgugauagagaaggaaggaugaauuacuauuggacacugguggagcccggugacaagaucaccuucgaagcaacgggcaaccuagucguuccucgguacgccuuugcuauggagcgcgaugccgggaguggaauuaucauaucugacacuccagugcaugacugcaacacaaccugucagacuccgaaaggcgcaauuaauacaucccuccccuuccaaaacauccacccuauuaccaucgguaagugcccaaaguauguaaaaagcacgaagcugagacuugcuaccgggcugaggaaugugcccucgauccagucucggggauuguuuggcgccauugcgggcuucauagaagggggauggacagguauggucgauggcugguacggguaucaucaccagaacgagcagggauccggcuacgccgcagaccucaaaucaacucaaaaugcuaucgauaagauuaccaacaaagugaauaguguuaucgagaagaugaacacacaguuuacugccguggguaaggaguucaaucaccuggagaaacgcauagaaaacuuaaauaagaaagucgacgauggguuccuggacauuuggaccuacaacgcugagcuccuugugcuguuggaaaaugagcgaacacuagauuaucaugacagcaacguaaagaaucuguacgagaaaguuagaaaccagcucaagaacaaugccaaggaaaucggcaacggauguuuugaguucuaucacaaaugcgauaauaccuguauggaauccgugaagaacggcacuuacgacuauccuaaauacucugaggaagcaaagcugaauagggaggagaucgauggggucaaacuugaaagcacgcggauuuaucagauccuggccauuuacucaacagcugcgaguuccuuggugcucgucgugagccugggagcaauaucuuuuuggaugugcucaaacgguaguuuacaaugccguaucuguauuuga

SEQ ID NO: 138508 - RNA, 1701 nt, Artificial Sequence; identical to SEQ ID NO: 138498
  derived and/or modified CDS sequence (opt3) from hemagglutinin__InfluenzaA__AGU92986

SEQ ID NO: 138509 - RNA, 1701 nt, Artificial Sequence
  derived and/or modified CDS sequence (opt3) from hemagglutinin__InfluenzaA__AGU92997
augaaggccauccuggugguccuccuuuacaccuucgcuacagcaaacgccgacacucugugcauuggcuaucacgcgaauaacagcacggauaccguugacacaguguuggagaaaaauguaacugugacccauuccgucaacuuacuggaagauaagcacaaugggaaacuauguaagcucagaggaguggcuccccugcaucuugguaaaugcaacauagccggcuggauccuggggaauccugagugugaaucuuugucaacagcaaguagcugguccuacauuguugagaccucuucgucagacaacggaacuugcuauccaggcgauuuuaucgacuacgaggagcucagggagcagcugagcaguguguccucuuucgaacgguuugagauuuucccgaagacaagcuccuggcccaaucacgauucaaacaagggugucaccgccgcuuguccucaugcaggggccaaaaguuuuuauaagaaucugaucuggcucgugaaaaagggaaacagcuacccaaaauuaucuaaguccuauauaaaugacaagggcaaagaaguacugguucuuuggggcauccaccaccccucaacgagcgcugaucaacagaguuuguaccagaacgccgacgcguacguguucgucgggucuucccgcuauagcaagauguuuaaaccugagauugcaauccgaccaaaggugcgugauagagagggaaggaugaauuacuauuggacucugguggaacccggugacaaaauuaccuucgaggccacaggcaaccuagucguuccucgguacgcuuuugccauggaacgcaacgcagggucgggaaucauaauuucugauacuccagugcaugacugcaauaccacaugucagaccccgaagggcgcuaucaacacgucccuccccuuccaaaauauucacccuaucacuaucgguaaaugcccaaaguauguaaagucaacaaaacugagacuugccaccgggcugaggaacgugcccaguauucagagccggggauuguuuggcgcgauagccggcuucaucgaagggggauggacugguauggucgacggcugguacggguaucaucaccagaaugaacagggauccggcuacgcagcugaucucaagucuacacaaaacgccauugacgagaucaccaauaaagugaacagcguuauagagaagaugaauacgcaguuuaccgcuguggguaaagaguucaaccaccuggaaaagcgcauugaaaauuuaaacaagaaagucgaugacggguuccuggauaucuggacauacaaugccgagcuccuugugcuguuggaaaacgagcgaacucuagacuaucaugauucaaauguaaagaaccuguacgagaaaguuagaagucagcucaagaacaaugcaaaagaaaucggcaacggauguuuugaguucuaucacaagugcgacaauaccuguauggaauccgugaagaacggcacauacgauuauccuaaauacagcgaggaagccaagcugaauagggaggagauugacggggucaaacuugaaucuacucggaucuaucagauucuggcuauauacucaaccguggcgaguagcuugguccucgugguuucccugggagcaaucucuuuuuggaugugcucgaacgguagcuuacaaugccguauuuguaucuga

SEQ ID NO: 138510 - RNA, 1701 nt, Artificial Sequence; identical to SEQ ID NO: 138500
  derived and/or modified CDS sequence (opt3) from hemagglutinin__InfluenzaA__AGU93008

SEQ ID NO: 138511 - RNA, 1698 nt, Artificial Sequence; identical to SEQ ID NO: 134602
  derived and/or modified CDS sequence (opt3) from hemagglutinin__InfluenzaA__AGU93019

SEQ ID NO: 138512 - RNA, 1701 nt, Artificial Sequence; identical to SEQ ID NO: 135098
  derived and/or modified CDS sequence (opt3) from hemagglutinin__InfluenzaA__AGU93031

SEQ ID NO: 138513 - RNA, 1701 nt, Artificial Sequence
  derived and/or modified CDS sequence (opt3) from hemagglutinin__InfluenzaA__AGU93042
augaaggccauccuggugguccuccuuuacaccuucgcuacagcaaacgccgacacucugugcauuggcuaucacgcgaauaacagcacggauaccguugacacaguguuggagaaaaauguaacugugacccauuccgucaacuuacuggaagauaagcacaaugggaaacuauguaagcucagaggaguggcuccccugcaucuugguaaaugcaacauagccggcuggauccuggggaauccugagugugaaacauugucuaccgcaaacucauggaguuacauuguugagacuagcuccucugacaauggaacaugcuauccaggcgauuuuaucgacuacgaagaacucagggagcagcugucgucagugagcaguuucgaacgguuugagauuuucccgaagaccuccucuuggcccaaccacgauagcaauaagggugucacggccgcuuguccucaugcaggggccaaaggauuuuauaagaaccugaucuggcucgugaaaaagggcaauuccuacccaaaauuaucaaagaguuauauaaacgacaagggcaaagaaguacugguucuuugggggauccaccaccccagcacuaccgcugaucaacagucuuuguaccagaaugccgacacauacguguucgucggaacuucccgcuauucaaagaaauuuaagccugagauugcgauccgaccaaaagugcgugaucaggaggguagaaugaacuacuauuggacccugguggaacccggcgacaagauuacauucgaggcaaccgggaaccuagucguuccuagguacgccuuugcuauggaacgggaugccggaagcggcaucauaauuagugacacgccagugcaugacugcaauacuacaugucaaaccccgaaaggugcaaucaacacuucucuccccuuccagaauauucacccuaucacaaucgggaagugcccaaaguauguaaaauccaccaagcugcgccuugcuacgggacugagaaacgugcccagcauucagucgaggggcuuguuuggcgccauagcgggguucaucgagggagguuggaccggcauggucgaugggugguacggauaucaucaccagaaugaacaaggcucugguuacgccgcagaccucaaauccacacagaacgcuauugauaagaucacuaauaaagugaacucaguuauagagaagaugaauauucaguuuaccgccguggggaaggaguucaaccaccuggaaaaacggaucgagaauuuaaacaagaaagucgacgauggcuuccuggacaucuggacauacaaugcugaacuccuugugcuguuggagaacgaacgcacucuagauuaucaugacaguaauguaaagaaccuguacgagaaaguucgaaaccagcucaagaauaacgccaaggagauuggaaauggcuguuuugaguucuaucacaaaugcgauaacaccuguauggagagcgugaagaaugggacauacgacuauccuaaauacuccgaagaggcaaagcugaacagagaagagaucgauggagucaaacuugagucuaccaggauuuaucaaauacuggccaucuacagcacugcugcgucaaguuuggugcucgucgugucccugggugcaauuagcuuuuggaugugcucuaauggcucauuacagugccggaucuguaucuga

SEQ ID NO: 138514 - RNA, 1701 nt, Artificial Sequence
  derived and/or modified CDS sequence (opt3) from hemagglutinin__InfluenzaA__AGU93053
augaaggccauccuggugguccuccuuuacaccuucgcuacagcaaacgccgacacucugugcauuggcuaucacgcgaauaacagcacggauaccguugacacaguguuggagaaaaauguaacugugacccauuccgucaacuuacuggaagauaagcacaaugggaaacuauguaagcucagaggaguggcuccccugcaucuugguaaaugcaacauagccggcuggauccuggggaauccugagugugaaacauugucuaccgcaucaaguuggagcuacauuguugagacuuccucuucggacaacggaacaugcuauccaggcgauuuuaucgacuacgaagaacucagggagcagcugucaagcgugaguuccuucgaacgguuugagauuuucccgaagaccucuagcuggcccaaucacgauuccaacaagggugucacggccgcuuguccucaugcaggggccaaaggauuuuauaagaaucugaucuggcucgugaaaaagggcaacucauacccaaaauuaaguaagagcuauauaaaugacaagggcaaagaaguacugguucuuugggggauccaccaccccucuacuaccgcugaucaacaguccuuguaccagaacgccgacacauacguguucgucggaacuucacgcuauagcaagaaauuuaagccugagauugcgacccgaccaaaagugcgugaucaggaggguagaaugaauuacuauuggacacugguggaacccggcgacaagaucaccuucgaggcaacggggaaccuagucguuccuagguacgccuuugcuauggaacgggaugccggaaguggcauuaucauaucugacacuccagugcaugacugcaacacaaccugucaaacuccgaaaggugcaauuaauacaucccuccccuuccagaacauccacccuauuaccaucgggaagugcccaaaguauguaaaaagcacgaagcugcgccuugcuaccggacugagaaaugugcccucgauccagucuaggggcuuguuuggcgccauugcgggguucauagagggagguuggacaggcauggucgaugggugguacggauaucaucaccagaacgaacaaggcuccgguuacgccgcagaccucaaaucaacucagaaugcuaucgauaagauuaccaacaaagugaauaguguuaucgagaagaugaacacacaguuuacugccguggggaaggaguucaaucaccuggaaaaacggauagagaacuuaaauaagaaagucgacgauggcuuccuggacauuuggaccuacaacgcugaacuccuugugcuguuggagaaugaacgcacacuagauuaucaugacagcaacguaaagaaucuguacgagaaaguucgaaaccagcucaagaacaaugccaaggagaucggaaacggcuguuuugaguucuaucacaaaugcgauaauaccuguauggaguccgugaagaacgggacuuacgacuauccuaaauacucugaagaggcaaagcugaauagagaagagaucgauggagucaaacuugagagcacgaggauuuaucaaauccuggccauuuacucaacagcugcgaguuccuuggugcucgucgugagccugggugcaauaucuuuuuggaugugcucaaacggcaguuuacagugccggaucuguauuuga

SEQ ID NO: 138515 - RNA, 1701 nt, Artificial Sequence
  derived and/or modified CDS sequence (opt3) from hemagglutinin__InfluenzaA__AGV99014
augaagaccaucauugcccugagcuacauacucugccuuguguucgcucagaaacugcccggcaacgacaauuccacagcaacuuuguguuuagggcaccaugccgucccuaacggaacgaucguuaagaccauuacaaaugauagaaucgaggugacuaacgcgaccgaacugguacaaaauucuucaauuggugagaucugcgacaguccacaccagauacuagauggcgaaaacuguacacucaucgacgcucugcuuggggauccgcagugcgacggauuucagaauaaaaagugggaucuguucguggagaggagcaaagccuauuccaacuguuaccccuaugacgucccugauuacgcaucuuugcggucgcucguggccucaagcggcacccuggaauuuaauaacgagaguuucaauuggacugguguuacacaaaacgggaccuccucugcuugcauucgccgaagcaauaacuccuuuuucucacgucugaauuggcucacgcauaguaacuuuaaguauccagcauuaaacgugacuaugcccaauaacgagcaguucgacaagcuguacaucuggggaguccaccauccuggcaccgauaaagaccagauuuuucuuuaugcccagagcucuggcagaaucacaguguccacuaagaggucacaacaggcuguaauaccaaauauugggagccggccccgcaucagaaacauuccuaguaggaucucuaucuacuggaccauuguuaaaccaggagauauauugcugaucaauuccacagguaaccuaauugccccgcggggcuacuucaagauccgcagcgggaaaucgucuauaaugcgauccgacgcgcccauuggaaaguguaagucagaaugcaucaccccuaauggcaguaucccaaacgacaaacccuuucagaaugugaacagaauuacguauggugcauguccuagguacgucaagcagagcacucucaaacuggccacagggaugcggaaugugccagagaagcaaacccguggaaucuucggcgcuauugccggcuuuauagaaaacgggugggagggaaugauggaugguugguauggcuuccgccaccaaaauuccgaggggagaggacaggcagcugaccuuaaaucuacucaggccgcgaucgaucagauuaacggcaagcugaauagguugaucgguaaaacaaacgaaaaguuccaccagaucgagaaggaauuuagcgagguggaagggcggauucaggaccucgagaaauacgucgaggauaccaagauagaccuguggucauauaacgccgaauuacugguugcacucgagaaucaacauacgaucgaucuuaccgacagugaaaugaacaaacuguucgagaagacuaaaaagcaguugcgagaaaaugcugaggauaugggcaacggaugcuuuaagauuuaccacaaaugugacaaugccugcaucggcuccauucgcaacgggacauaugaucaugacguguacagagacgaggcucuaaauaacagguuccagaucaagggaguagaacugaaaagcgguuacaaggauuggauacucuggaucucuuuugccauuucaugcuuccugcuuuguguggcacuguugggcuuuaucaugugggccugccagaaagggaauauucgguguaacaucugcauauga

SEQ ID NO: 138516 - RNA, 1701 nt, Artificial Sequence; identical to SEQ ID NO: 138042
  derived and/or modified CDS sequence (opt3) from hemagglutinin__InfluenzaA__AGV99037

SEQ ID NO: 138517 - RNA, 1701 nt, Artificial Sequence
  derived and/or modified CDS sequence (opt3) from hemagglutinin__InfluenzaA__AGV99049
augaagaccaucauugcccugagcuacauacucugccuuguguucgcucagaaacugcccggcaacgacaauuccacagcaacuuuguguuuagggcaccaugccgucccuaacggaacgguugugaagaccaucacaaaugauagaauugagguaacuaacgcgaccgaacuggugcaaaauucuucaaucggugagauuugcgacaguccacaccagauccuagauggcgaaaacuguacacucauagacgcucugcuuggggauccgcagugcgacggauuucagaauaaaaagugggaucuguucgucgagaggagcaaagccuauuccaacuguuaccccuaugacgugccugauuacgcaucuuugcggucgcucguugccucaagcggcacccuggaauuuaauaacgagaguuucaauuggacuggugugacacaaaacgggaccuccucugcuugcauccgccgaagcaauaacuccuuuuucucacgucugaauuggcucacgcauuuaaacuuuaaguauccagcacugaacgucacuaugcccaauaacgagcaguucgacaaacuuuacauuuggggagugcaccauccuggcaccgauaaagaccagaucuuuuuguaugcccagaguagcggcagaauuacaguaucuacuaagaggucccaacaggcuguuaucccaaauauagggucacggccccgcauuagaaacaucccuagcaggauuaguaucuacuggaccaucgugaaaccaggagauauucugcuaauaaauucuacagguaaccucaucgccccgcggggcuacuucaagauucgcuccgggaaaagcucgaucaugcgaucugacgcgcccauaggaaaguguaaguccgaaugcauuaccccuaauggcucaaucccaaacgacaaacccuuucagaaugucaacagaaucacguauggugcauguccuagguacgugaagcagaguacucugaaacuugccacagggaugcggaaugugccagagaagcaaacccguggaauuuucggcgcuaucgccggcuuuauugaaaacgggugggagggaauggucgaugguugguauggcuuccgccaccagaauagcgaggggagaggacaggcagcugaccugaaauccacucaagccgcgauagaucagaucaacggcaaguugaauaggcucauugguaaaacaaacgggaaguuccaccagaucgaaaaggaguuuucugaaguugagggccggauccaggaccuggaaaaauacguggaggauaccaagauugacuuauggagcuauaacgccgagcugcucguagcacuugaaaaucaacauacgauagaucugaccgacucagagaugaacaaauuguucgaaaagacaaagaagcagcuacgagagaaugcugaagauaugggaaacggcugcuuuaagaucuaccacaaaugugacaaugccugcauugggaguauccgcaacggaacuuaugaucaugacguguacagagacgaggcucugaauaacagguuccagauuaagggugucgagcucaaauccggcuacaaggauuggauccuguggaucagcuuugccauaucuugcuuccuucugugugugguuuugcucggguuuauuaugugggcaugccagaaaggaaauauccgguguaacauuugcaucuga

SEQ ID NO: 138518 - RNA, 1701 nt, Artificial Sequence
  derived and/or modified CDS sequence (opt3) from hemagglutinin__InfluenzaA__AGV99073
augaagaccaucauugcccugagcuacauacucugccuuguguucgcucagaaaauccccggcaacgacaauuccacagcaacucuguguuuggggcaccaugccgucccuaacggaacgauuguuaagaccaucacaaaugauagaauugaggugacuaacgcgaccgaauuaguacaaaauucuucaaucggugagauaugcgacaguccacaccagauccuggauggcgaaaacuguacacuaauugacgcucuccugggggauccgcagugcgacggauuucagaauaaaaagugggaucuuuucguggagaggagcaaagccuauuccaacuguuaccccuaugacgucccugauuacgcaucucugcggucguugguggccucaagcggcacccucgaauuuaauaacgagaguuucaauuggacugguguuacacaaaacgggaccuccucugcuugcauccgcggaagcaauuccucauuuuucagucgacugaacuggcugacgcaucucaauuuuaaguauccagcauuaaacgugacuaugcccaacaaugagcaguucgacaagcuguacauuuggggcguccaccauccuggcaccgauaaagaccagaucuuucuuuaugcccagagcucugggcguauaacaguguccacuaagagaucacaacaggcuguaauuccaaacaucggaagcaggccccggauucgcaauaucccuaguagaaucucuauuuacuggaccauaguuaaaccaggugauaucuugcugauuaacuccacaggcaaucuaaucgccccgaggggguacuucaagauacggagcggaaaaucgucuauuaugcgcuccgacgcgcccaucggcaaguguaagucagaaugcaucaccccuaacgguaguauuccaaaugacaaacccuuucagaacgugaaucgaaucacguauggggcauguccuagauacgucaagcagagcacucucaaacuggccacaggaaugaggaacgugccagagaagcaaacccggggcauuuucggcgcuauagccggguuuaucgaaaauggaugggaggguaugguggauggcugguauggguuccgucaccagaacuccgagggacgcggccaggcagcugaccuuaaaucuacucaagccgcgauugaucagaucaaugguaagcugaacagauugaucgggaaaacaaaugaaaaguuccaccagauugagaaggaauuuagcgaggucgaaggcaggauacaggaccucgagaaauacguugaggauaccaagaucgaccuguggucauauaacgccgaauuacugguggcacucgagaaccaacauacgauugaucuuaccgacagugaaaugaauaaacuguucgagaagacuaaaaagcaguugcgggaaaacgcugaggauaugggaaauggcugcuuuaagaucuaccacaaaugugacaacgccugcauuggguccauccgaaauggaacauaugaucaugacguauaccgcgacgaggcucuaaacaauagauuccagauaaaggguguggaacugaaacccggcuacaaggauuggauccucuggauuagcuuugccaucucuugcuuccugcuuugugucgcacuguugggguuuauuaugugggccugccagaaaggaaacaucagguguaauauaugcauuuga

SEQ ID NO: 138519 - RNA, 1701 nt, Artificial Sequence; identical to SEQ ID NO: 137906
  derived and/or modified CDS sequence (opt3) from hemagglutinin__InfluenzaA__AGV99085

SEQ ID NO: 138520 - RNA, 1701 nt, Artificial Sequence
  derived and/or modified CDS sequence (opt3) from hemagglutinin__InfluenzaA__AGV99097
augaagaccaucauugcccugagcuacauacucugccuuguguucgcucagaaacugcccggcaacgacaauuccacagcaacuuuguguuuagggcaccaugccgucccuaacggaacgaucguuaagaccauuacaaaugauagaaucgaggugacuaacgcgaccgaacugguacaaaauucuucaauuggugagaucugcgacaguccacaccagauacuagauggcgaaaacuguacacucaucgacgcucugcuuggggauccgcagugcgacggauuucagaauaaaaagugggaucuguucguggagaggagcaaagccuauuccaacuguuaccccuaugacgucccugauuacgcaucuuugcggucgcucguggccucaagcggcacccuggaauuuaauaacgagaguuucaauuggacugguguuacacaaaacgggaccuccucugcuugcauucgccgaagcaauuccucauuuuucagucgucugaacuggcucacgcauuuaaauuuuaaguauccagcacugaacgugacuaugcccaacaaugagcaguucgacaaacuuuacaucuggggaguccaccauccuggcaccgauaaagaccagaucuuuuuguaugcccagagcucuggcagaauuacaguguccacuaagaggucacaacaggcuguaauaccaaacauugggagccggccccgcaucagaaauauuccuaguaggaucucuaucuacuggaccauuguuaaaccaggagauauacugcuaaucaacuccacagguaaucucauugccccgcggggcuacuucaagauccgcagcgggaaaucgucuauaaugcgauccgacgcgcccauuggaaaguguaagucagaaugcaucaccccuaacggcaguaucccaaaugacaaacccuuucagaacgugaauagaauuacguauggugcauguccuagguacgucaagcagagcacucugaaacuugccacagggaugcggaacgugccagagaagcaaacccguggaaucuucggcgcuauugccggcuuuauagaaaaugggugggagggaaugguggaugguugguauggcuuccgccaccagaacuccgaggggagaggacaggcagcugaccugaaaucuacucaagccgcgaucgaucagauuaauggcaaguugaacaggcucaucgguaaaacaaaugaaaaguuccaccagaucgagaaggaauuuagcgaggucgaagggcggauucaggaccuggagaaauacguugaggauaccaagauagacuuauggucauauaacgccgaaauccugguggcacucgagaaccaacauacgauugaucuuaccgacagugaaaugaauaaacuguucgagaagacaaagaagcaguugcgagaaaacgcugaggauaugggcaauggaugcuuuaagaucuaccacaaaugugacaacgccugcauuggcuccauccgcaaugggacuuaugaucaugacguauacagagacgaggcucuaaacaauagguuccagauaaagggaguggaacugaaaagcgguuacaaggauuggauccucuggauuucuuuugccaucucaugcuuccugcuuugugucgcacuguugggcuuuauuaugugggccugccagaaagggaacauccgguguaauauaugcauuuga

SEQ ID NO: 138521 - RNA, 1701 nt, Artificial Sequence
  derived and/or modified CDS sequence (opt3) from hemagglutinin__InfluenzaA__AGV99121
augaagaccaucauugcccugagcuacauacucugccuuguguucgcucagaaacugcccggcaacgacaauuccacagcaacuuuguguuuagggcaccaugccgucccuaacggaacgaucguuaagaccauuacaaaugauagaaucgaggugacuaacgcgaccgaacugguacaaaauucuucaauuggugagaucugcgacaguccacaccagauacuagauggcgaaaacuguacacucaucgacgcucugcuuggggauccgcagugcgacgauuuucagaauaaaaagugggaccuguucguggagaggagcaaagccuauuccaacuguuaccccuaugaugucccugacuacgcaucuuugcggucgcucguggccucaagcggaacccuggaauuuaauaacgagaguuucaauugggcuggcguuacucaaaacgguacauccucugcaugcauucgcgggagcaauuccucauuuuucagucgacugaacuggcucacccauuuaaauuuuaaguauccagcccugaacgugacgaugcccaacaaugagcaguucgauaaguuguacaucuggggaguccaccauccuggcacugacaaagaucagauuuuucuuuaugcucagagcucuggccguaucaccguguccacaaagagaucacaacaggccguaauaccaaacauugggagcaggccccggauccgcaauauuccuaguagaaucucuaucuacuggacuauuguuaaaccaggagacauacugcuaaucaacuccaccgguaaucucauugcgccgaggggcuacuucaagauccggagcgggaaaucgucuauaaugcgcuccgacgcacccauuggaaaguguaagucagaaugcaucacaccuaacggcaguaucccaaaugauaaacccuuucagaacgugaaucgaauuaccuauggugccuguccuagauacgucaagcagagcacgcugaaacuugcuacugggaugaggaacgugccagagaagcaaacacggggaaucuucggcgccauugcaggcuuuauagaaaaugggugggagggaaugguggacgguugguauggcuuccgucaccagaacuccgaggggcgcggacaggcugccgaucugaaaucuacccaagcggccaucgaccagauuaauggcaaguugaacagacucaucgguaaaacuaaugaaaaguuccaccagaucgagaaggaauuuagcgaggucgaagggaggauucaggaucuggagaaauacguugaggacacaaagauagauuuauggucauauaacgcagaacugcucguggcucuugagaaccaacauaccaucgaccugacggauagugaaaugaauaaauuguucgagaagaccaaaaagcagcuacgggaaaacgccgaggacaugggcaauggaugcuuuaagauuuaccacaaaugugauaacgcuugcaucggcuccauucgaaaugggacauaugaccaugacguauaccgcgaugaggcccugaacaauagauuccagaucaagggaguggaacucaaaagcgguuacaaggacuggauacuguggaucucuuuugcaauuucaugcuuccuucugugugucgccuugcucggcuuuaucaugugggcuugccagaaagggaacauuagguguaauaucugcauauga

SEQ ID NO: 138522 - RNA, 1701 nt, Artificial Sequence; identical to SEQ ID NO: 138521
  derived and/or modified CDS sequence (opt3) from hemagglutinin__InfluenzaA__AGV99133

SEQ ID NO: 138523 - RNA, 1701 nt, Artificial Sequence; identical to SEQ ID NO: 138515
  derived and/or modified CDS sequence (opt3) from hemagglutinin__InfluenzaA__AGV99145

SEQ ID NO: 138524 - RNA, 1701 nt, Artificial Sequence
  derived and/or modified CDS sequence (opt3) from hemagglutinin__InfluenzaA__AGV99157
augaagaccaucauugcccugagcuacauacucugccuuguguucgcucagaaacugcccggcaacgacaauuccacagcaacuuuguguuuagggcaccaugccgucccuaacggaacgaucguuaagaccauuacaaaugauagaaucgaggugacuaacgcgaccgaacugguacaaaauucuucaauuggugagaucugcgacaguccacaccagauacuagauggcgaaaacuguacacucaucgacgcucugcuuggggauccgcagugcgacggauuucagaauaaaaagugggaucuguucauugagaggagcaaagccuauuccaacuguuaccccuaugacgugccugauuacgcaucuuugcggucgcucgucgccucaagcggcacccuggaauuuaauaacgagaguuucaauuggacuggugugacacaaaacgggaccuccucugcuugcauccgccgaagcaauaacuccuuuuucucacgucugaauuggcucacgcauaguaacuuuaaguauccagcauuaaacguuacuaugcccaauaacgagcaguucgacaagcuguacauuuggggagugcaccauccuggcaccgauaaagaccagaucuuucuuuaugcccagagcucuggcagaauaacagucuccacuaagaggucacaacaggcugugauuccaaauaucgggagccggccccgcauuagaaacaucccuaguaggaucucuauuuacuggaccauaguaaaaccaggagauaucuugcugauuaauuccacagguaaccuaaucgccccgcggggcuacuucaagauacgcagcgggaaaucgucuauuaugcgauccgacacccccaucggaaaguguaagucagaaugcaucacgccuaauggcaguauuccaaacgacaaacccuuucagaauguuaacagaaucacuuauggugcguguccuagguacgugaagcagagcacacucaaacuggcaaccgggaugcggaaugucccagagaagcaaacucguggaauuuucggcgccauagcuggcuuuaucgaaaacgggugggagggaaugauggaugguugguauggcuuccgccaccaaaauuccgaggggagaggacaggccgcagaccuuaaaucuacacaggcugccauugaucagaucaacggcaagcugaauagguugaucgguaaaaccaacgaaaaguuccaccagauugagaaggaauuuagcgagguggaagggcggauacaggaccucgagaaauacguggaggauacgaagaucgaccuguggucauauaacgcggaauuacuggucgcccucgagaaucaacauaccauugaucuuacagacagugaaaugaacaaacuguucgagaagacuaaaaagcaguugcgagaaaaugcagaggauaugggcaacggaugcuuuaagaucuaccacaaaugugacaaugcuugcauuggcuccauccgcaacgggaccuaugaucaugacguuuacagagacgaggcccuaaauaacagguuccagauaaagggaguggaacugaaaagcgguuacaaggauuggauccucuggauuucuuuugcuaucucaugcuuccugcuuuguguagcccuguugggcuuuauuaugugggcaugccagaaagggaauauccgguguaacauaugcauuuga

SEQ ID NO: 138525 - RNA, 1701 nt, Artificial Sequence; identical to SEQ ID NO: 138042
  derived and/or modified CDS sequence (opt3) from hemagglutinin__InfluenzaA__AGV99169

SEQ ID NO: 138526 - RNA, 1701 nt, Artificial Sequence; identical to SEQ ID NO: 138515
  derived and/or modified CDS sequence (opt3) from hemagglutinin__InfluenzaA__AGV99181

SEQ ID NO: 138527 - RNA, 1701 nt, Artificial Sequence
  derived and/or modified CDS sequence (opt3) from hemagglutinin__InfluenzaA__AGV99193
augaagaccaucauugcccugagcuacauacucugccuuguguucgcucagaaacugcccggcaacgacaauuccacagcaacuuuguguuuagggcaccaugccgucccuaacggaacgaucguuaagaccauuacaaaugauagaaucgaggugacuaacgcgaccgaacugguacaaaauucuucaauuggugagaucugcgacaguccacaccagauacuagauggcgaaaacuguacacucaucgacgcucugcuuggggauccgcagugcgacggauuucagaauaaaaagugggaucuguucguggagaggagcaaagccuauuccaacuguuaccccuaugacgucccugauuacgcaucuuugcggucgcucguggccucaagcggcacccuggaauuuaauaacgagaguuucaauuggacugguguuacacaaaacgggaccuccucugcuugcauucgccgaagcaauaacuccuuuuucucacgucugaauuggcucacgcauaguaacuuuaaguauccagcauuaaacgugacuaugcccaauaacgagcaguucgacaagcuguacaucuggggaguccaccauccuggcaccgauaaagaccagauuuuucuuuaugcccagagcucuggcagaaucacaguguccacuaagaggucacaacaggcuguaauaccaaauauugggagccggccccgcaucagaaacauuccuaguaggaucucuaucuacuggaccauuguuaaaccaggagauauauugcugaucaauuccacagguaaccuaauugccccgcggggcuacuucaagauccgcagcgggaaaucgucuauaaugcgauccgacacccccauuggaaaguguaagucagaaugcaucacgccuaauggcaguaucccaaacgacaaacccuuucagaaugugaacagaauuacuuauggugcguguccuagguacgucaagcagagcacacucaaacuggcaaccgggaugcggaaugugccagagaagcaaacucguggaaucuucggcgccauugcuggcuuuauagaaaacgggugggagggaaugauggaugguugguauggcuuccgccaccaaaauuccgaggggagaggacaggccgcagaccuuaaaucuacacaggcugccaucgaucagauuaacggcaagcugaauagguugaucgguaaaaccaacgaaaaguuccaccagaucgagaaggaauuuagcgagguggaagggcggauucaggaccucgagaaauacgucgaggauacgaagauagaccuguggucauauaacgcggaauuacugguugcccucgagaaucaacauaccaucgaucuuacagacagugaaaugaacaaacuguucgagaagacuaaaaagcaguugcgagaaaaugcagaggauaugggcaacggaugcuuuaagauuuaccacaaaugugacaaugcuugcaucggcuccauucgcaacgggaccuaugaucaugacguguacagagacgaggcccuaaauaacagguuccagaucaagggaguagaacugaaaagcgguuacaaggauuggauacucuggaucucuuuugcuauuucaugcuuccugcuuuguguggcccuguugggcuuuaucaugugggcaugccagaaagggaauauucgguguaacaucugcauauga

SEQ ID NO: 138528 - RNA, 1701 nt, Artificial Sequence; identical to SEQ ID NO: 137916
  derived and/or modified CDS sequence (opt3) from hemagglutinin__InfluenzaA__AGV99956

SEQ ID NO: 138529 - RNA, 1701 nt, Artificial Sequence
  derived and/or modified CDS sequence (opt3) from hemagglutinin__InfluenzaA__AGV99986
augaagaccaucauugcccugagcuacauacucugccuuguguucgcucagaaacugcccggcaacgacaauuccacagcaacuuuguguuuagggcaccaugccgucccuaacggaacgaucguuaagaccauuacaaaugauagaaucgaggugacuaacgcgaccgaacugguacaaaauucuucaauuggugagaucugcgacaguccacaccagauacuagauggcgaaaacuguacacucaucgacgcucugcuuggggauccgcagugcgacggauuucagaauaaaaagugggaucuguucguggagaggagcaaagccuauuccaacuguuaccccuaugacgucccugauuacgcaucuuugcggucgcucauugccucaagcggcacccuggaauuuaauaacgagaguuucaauuggacuggugugacacaaaacgggaccuccucugcuugcauccgccgaagcaauaacuccuuuuucucacgucugaauuggcucacgcauaguaacuuuaaguauccagcauuaaacguuacuaugcccaauaacgagcaguucgacaagcuguacauuuggggagugcaccauccuggcaccgauaaagaccagaucuuucuuuaugcccagagcucuggcagaauaacagucuccacuaagaggucacaacaggcugugauuccaaauaucgggagccggccccgcauuagaaacaucccuaguaggaucucuauuuacuggaccauaguaaaaccaggagauaucuugcugauuaauuccacagguaaccuaaucgccccgcggggcuacuucaagauacgcagcgggaaaucgucuauuaugcgauccgacgcgcccaucggaaaguguaagucagaaugcaucaccccuaauggcaguauuccaaacgacaaacccuuucagaauguuaacagaaucacguauggugcauguccuagguacgugaagcagagcacucucaaacuggccacagggaugcggaaugucccagagaagcaaacccguggaauuuucggcgcuauagccggcuuuaucgaaaacgggugggagggaaugauggaugguugguauggcuuccgccaccaaaauuccgaggggagaggacaggcagcugaccuuaaaucuacucaggccgcgauugaucagaucaacggcaagcugaauagguugaucgguaaaacaaacgaaaaguuccaccagauugagaaggaauuuagcgagguggaagggcggauacaggaccucgagaaauacguggaggauaccaagaucgaccuguggucauauaacgccgaauuacuggucgcacucgagaaucaacauacgauugaucuuaccgacagugaaaugaacaaacuguucgagaagacuaaaaagcaguugcgagaaaaugcugaggauaugggcaacggaugcuuuaagaucuaccacaaaugugacaaugccugcauuggcuccauccgcaacgggacauaugaucaugacguuuacagagacgaggcucuaaauaacagguuccagauaaagggaguggaacugaaaagcgguuacaaggauuggauccucuggauuucuuuugccaucucaugcuuccugcuuuguguagcacuguugggcuuuauuaugugggccugccagaaagggaauauccgguguaacauaugcauuuga

SEQ ID NO: 138530 - RNA, 1701 nt, Artificial Sequence
  derived and/or modified CDS sequence (opt3) from hemagglutinin__InfluenzaA__AGW00065
augaagaccaucauugcccugagcuacauacucugccuuguguucgcucagaaacugcccggcaacgacaauuccacagcaacuuuguguuuagggcaccaugccgucccuaacggaacgaucguuaagaccauuacaaaugauagaaucgaggugacuaacgcgaccgaacugguacaaaauucuucaauuggugagaucugcgacaguccacaccagauacuagauggcgaaaacuguacacucaucgacgcucugcuuggggauccgcagugcgacggauuucagaauaaaaagugggaucuguucguggagaggagcaaagccuauuccaacuguuaccccuaugacgucccugauuacaccucuuugcggucgcucguggcaucaagcggcacucuggaauuuaauaacgagaguuucaauuggacagguguuacccaaaacgggacguccucugccugcauucgccgaagcaauuccucauuuuucagucgucugaacuggcucacucauuuaaauuuuaaguauccagcucugaacgugaccaugcccaacaaugagcaguucgacaaguuguacaucuggggaguccaccauccuggcacagauaaagaccagauuuuucuuuaugcacagagcucuggcagaaucacuguguccaccaagaggucacaacaggccguaauaccaaacauugggagccggccccgcaucagaaauauuccuaguaggaucucuaucuacuggacaauuguuaaaccaggagauauacugcuaaucaacuccaccgguaaucucauugcuccgcggggcuacuucaagauccgcagcgggaaaucgucuauaaugcgauccgacgcccccauuggaaaguguaagucagaaugcaucacgccuaacggcaguaucccaaaugacaaacccuuucagaacgugaauagaauuacuuauggugcguguccuagguacgucaagcagagcacacugaaacuugcaaccgggaugcggaacgugccagagaagcaaacucguggaaucuucggcgccauugcuggcuuuauagaaaaugggugggagggaaugguggaugguugguauggcuuccgccaccagaacuccgaggggagaggacaggccgcagaccugaaaucuacacaagcugccaucgaucagauuaauggcaaguugaacaggcucaucgguaaaaccaaugaaaaguuccaccagaucgagaaggaauuuagcgaggucgaagggcggauucaggaccuggagaaauacguugaggauacgaagauagacuuauggucauauaacgcggaacugcucguggcccuugagaaccaacauaccaucgaucugacagacagugaaaugaauaaauuguucgagaagacuaaaaagcagcuacgagaaaacgcagaggauaugggcaauggaugcuuuaagauuuaccacaaaugugacaacgcuugcaucggcuccauucgcaaugggaccuaugaucaugacguauacagagacgaggcccugaacaauagguuccagaucaagggaguggaacucaaaagcgguuacaaggauuggauacuguggaucucuuuugcuauuucaugcuuccuucugugugucgccuugcucggcuuuaucaugugggcaugccagaaagggaacauucgguguaauaucugcauauga

SEQ ID NO: 138531 - RNA, 1701 nt, Artificial Sequence; identical to SEQ ID NO: 138042
  derived and/or modified CDS sequence (opt3) from hemagglutinin__InfluenzaA__AGW00077

SEQ ID NO: 138532 - RNA, 1701 nt, Artificial Sequence; identical to SEQ ID NO: 137906
  derived and/or modified CDS sequence (opt3) from hemagglutinin__InfluenzaA__AGW00089

SEQ ID NO: 138533 - RNA, 1701 nt, Artificial Sequence; identical to SEQ ID NO: 138042
  derived and/or modified CDS sequence (opt3) from hemagglutinin__InfluenzaA__AGW00101

SEQ ID NO: 138534 - RNA, 1701 nt, Artificial Sequence
  derived and/or modified CDS sequence (opt3) from hemagglutinin__InfluenzaA__AGW00113
augaagaccaucauugcccugagcuacauacucugccuuguguucgcucagaaacugcccggcaacgacaauuccacagcaacuuuguguuuagggcaccaugccgucccuaacggaacgaucguuaagaccauuacaaaugauagaaucgaggugacuaacgcgaccgaacugguacaaaauucuucaauuggugagaucugcgacaguccacaccagauacuagauggcgaaaacuguacacucaucgacgcucugcuuggggauccgcagugcgacggauuucagaauaaaaagugggaucuguucguggagaggagcaaagccuauuccaacuguuaccccuaugacgucccugauuacgcaucuuugcggucgcucguggccucaagcggcacccuggaauuuaauaacgagaguuucaauugggcugguguuacucaaaacgggacauccucugcaugcauucgcggaagcaauuccucauuuuucagucgacugaacuggcucacccauuuaaauuuuaaguauccagcccugaacgugacgaugcccaacaaugagcaguucgacaaacuuuacaucuggggcguccaccauccuggcacugauaaagaccagaccuuuuuguaugcucagagcucugggcguauuacaguguccacuaagagaucacaacaggccguaaucccaaacauaggaagcaggccccggauucgcaauaucccuaguagaauuucuaucuacuggaccaucguuaaaccaggugauauucugcuaauaaacuccacaggcaaucucaucgcgccgaggggguacuucaagauucggagcggaaaaucgucuaucaugcgcuccgacgcacccauaggcaaguguaagucagaaugcauuaccccuaacgguaguaucccaaaugacaaacccuuucagaacgugaaucgaaucacguauggggccuguccuagauacgucaagcagagcacucugaaacuugcuacaggaaugaggaacgugccagagaagcaaacccggggcauuuucggcgccaucgcaggguuuauugaaaauggaugggaggguaugguggauggcugguauggguuccgucaccagaacuccgagggacgcggccaggcugccgaccugaaaucuacucaagcggccauagaucagaucaaugguaaguugaacagacucauugggaaaacaaaugaaaaguuccaccagaucgagaaggaauuuagcgaggucgaaggcaggauccaggaccuggagaaauacguugaggauaccaagauugacuuauggucauauaacgcagaacugcucguggcucuugagaaccaacauacgauagaucugaccgacagugaaaugaauaaauuguucgagaagacaaagaagcagcuacgggaaaacgccgaggauaugggaaauggcugcuuuaagaucuaccacaaaugugacaacgcuugcauuggguccauccgaaauggaacuuaugaucaugacguauaccgcgacgaggcccugaacaauagauuccagauuaaggguguggaacucaaaagcggcuacaaggauuggauccuguggauaucuuuugcaaucucaugcuuccuucugugugucgccuugcucggguuuauuaugugggcuugccagaaaggaaacaucagguguaauauuugcaucuga

SEQ ID NO: 138535 - RNA, 1701 nt, Artificial Sequence; identical to SEQ ID NO: 138042
  derived and/or modified CDS sequence (opt3) from hemagglutinin__InfluenzaA__AGW00125

SEQ ID NO: 138536 - RNA, 1701 nt, Artificial Sequence; identical to SEQ ID NO: 138042
  derived and/or modified CDS sequence (opt3) from hemagglutinin__InfluenzaA__AGW00137

SEQ ID NO: 138537 - RNA, 1701 nt, Artificial Sequence; identical to SEQ ID NO: 138042
  derived and/or modified CDS sequence (opt3) from hemagglutinin__InfluenzaA__AGW00149

SEQ ID NO: 138538 - RNA, 1701 nt, Artificial Sequence; identical to SEQ ID NO: 138042
  derived and/or modified CDS sequence (opt3) from hemagglutinin__InfluenzaA__AGW00161

SEQ ID NO: 138539 - RNA, 1701 nt, Artificial Sequence; identical to SEQ ID NO: 138042
  derived and/or modified CDS sequence (opt3) from hemagglutinin__InfluenzaA__AGW00173

SEQ ID NO: 138540 - RNA, 1701 nt, Artificial Sequence
  derived and/or modified CDS sequence (opt3) from hemagglutinin__InfluenzaA__AGW00185
augaagaccaucauugcccugagcuacauacucugccuuguguucgcucagaaacugcccggcaacgacaauuccacagcaacuuuguguuuagggcaccaugccgucccuaacggaacgaucguuaagaccauuacaaaugauagaaucgaggugacuaacgcgaccgaacugguacaaaauucuucaauuggugagaucugcgacaguccacaccagauacuagauggcgaaaacuguacacucaucgacgcucugcuuggggauccgcagugcgacggauuucagaauaaaaagugggaucuguucauugagaggagcaaagccuauuccaacuguuaccccuaugacgugccugauuacgcaucuuugcggucgcucgucgccucaagcggcacccuggaauuuaauaacgagaguuucaauuggacuggugugacacaaaacgggaccuccucugcuugcauccgccgaagcaauaacuccuuuuucucacgucugaauuggcucacgcauaguaacuuuaaguauccagcauuaaacguuacuaugcccaauaacgagcaguucgacaagcuguacauuuggggagugcaccauccuggcaccgauaaagaccagaucuuucuuuaugcccagagcucuggcagaauaacagucuccacuaagaggucacaacaggcugugauuccaaauaucgggagccggccccgcauuagaaacaucccuaguaggaucucuauuuacuggaccauaguaaaaccaggagauaucuugcugauuaauuccacagguaaccuaaucgccccgcggggcuacuucaagauacgcagcgggaaaucgucuauuaugcgauccgacgcgcccaucggaaaguguaagucagaaugcaucaccccuaauggcaguauuccaaacgacaaacccuuucagaauguuaacagaaucacguauggugcauguccuagguacgugaagcagagcacucucaaacuggccacagggaugcggaaugucccagagaagcaaacccguggaauuuucggcgcuauagccggcuuuaucgaaaacgggugggagggaaugauggaugguugguauggcuuccgccaccaaaauuccgaggggagaggacaggcagcugaccuuaaaucuacucaggccgcgauugaucagaucaacggcaagcugaauagguugaucgguaaaacaaacgaaaaguuccaccagauugagaaggaauuuagcgagguggaagggcggauacaggaccucgagaaauacguggaggauaccaagaucgaccuguggucauauaacgccgaauuacuggucgcacucgagaaucaacauacgauugaucuuaccgacagugaaaugaacaaacuguucgagaagacuaaaaagcaguugcgagaaaaugcugaggauaugggcaacggaugcuuuaagaucuaccacaaaugugacaaugccugcauuggcuccauccgcaacgggacauaugaucaugacguuuacagagacgaggcucuaaauaacagguuccagauaaagggaguggaacugaaaagcgguuacaaggauuggauccucuggauuucuuuugccaucucaugcuuccugcuuuguguagcacuguugggcuuuauuaugugggccugccagaaagggaauauccgguguaacauaugcauuuga

SEQ ID NO: 138541 - RNA, 1701 nt, Artificial Sequence; identical to SEQ ID NO: 138042
  derived and/or modified CDS sequence (opt3) from hemagglutinin__InfluenzaA__AGW00709

SEQ ID NO: 138542 - RNA, 1701 nt, Artificial Sequence; identical to SEQ ID NO: 138042
  derived and/or modified CDS sequence (opt3) from hemagglutinin__InfluenzaA__AGW00721

SEQ ID NO: 138543 - RNA, 1701 nt, Artificial Sequence; identical to SEQ ID NO: 138042
  derived and/or modified CDS sequence (opt3) from hemagglutinin__InfluenzaA__AGW00733

SEQ ID NO: 138544 - RNA, 1701 nt, Artificial Sequence; identical to SEQ ID NO: 138042
  derived and/or modified CDS sequence (opt3) from hemagglutinin__InfluenzaA__AGW00745

SEQ ID NO: 138545 - RNA, 1701 nt, Artificial Sequence
  derived and/or modified CDS sequence (opt3) from hemagglutinin__InfluenzaA__AGW00757
augaagaccaucauugcccugagcuacauacucugccuuguguucgcucagaaacugcccggcaacgacaauuccacagcaacuuuguguuuagggcaccaugccgucccuaacggaacgaucguuaagaccauuacaaaugauagaaucgaggugacuaacgcgaccgaacugguacaaaauucuucaauuggugagaucugcgacaguccacaccagauacuagauggcgaaaacuguacacucaucgacgcucugcuuggggauccgcagugcgacggauuucagaauaaaaagugggaucuguucguggagaggagcaaagccuauuccaacuguuaccccuaugacgucccugauuacgcaucuuugcggucgcucguggccucaagcggcacccuggaauuuaauaacgagaguuucaauugggcugguguuacucaaaacgggacauccucugcaugcauucgcggaagcaauuccucauuuuucagucgacugaacuggcucacccauuuaaauuuuaaguauccagcccugaacgugacgaugcccaacaaugagcaguucgacaaguuguacaucuggggcguccaccauccuggcacugauaaagaccagauuuuucuuuaugcucagagcucugggcguaucaccguguccacaaagagaucacaacaggccguaauaccaaacauuggaagcaggccccggauccgcaauauuccuaguagaaucucuaucuacuggacuauuguuaaaccaggugauauacugcuaaucaacuccaccggcaaucucauugcgccgaggggguacuucaagauccggagcggaaaaucgucuauaaugcgcuccgacgcacccauuggcaaguguaagucagaaugcaucacaccuaacgguaguaucccaaaugacaaacccuuucagaaccugaaucgaauuaccuauggggccuguccuagauacgugaagcagagcacgcuuaaacuggcuacuggaaugaggaacgucccagagaagcaaacacggggcaucuucggcgccauugcaggguuuauagaaaauggaugggaggguaugguggauggcugguauggguuccgucaccagaacuccgagggacgcggccaggcugccgacuugaaaucuacccaagcggccaucgaucagauuaaugguaagcucaacagacugaucgggaaaacuaaugaaaaguuccaccagaucgagaaggaauuuagcgagguggaaggcaggauucaggacuuagagaaauacgucgaggauacaaagauagaccuguggucauauaacgcagaacuccuuguugcucuggagaaccaacauaccaucgauuugacggacagugaaaugaauaaacuauucgagaagaccaaaaagcagcugcgggaaaacgccgaggauaugggaaauggcugcuuuaagauuuaccacaaaugugacaacgcuugcaucggguccauucgaaauggaacauaugaucaugacguguaccgcgacgaggcccucaacaauagauuccagaucaaggguguagaacugaaaagcggcuacaaggauuggauacuuuggaucucuuuugcaauuucaugcuuccuguuguguguggcccuccugggguuuaucaugugggcuugccagaaaggaaacauuagguguaauaucugcauauga

SEQ ID NO: 138546 - RNA, 1701 nt, Artificial Sequence; identical to SEQ ID NO: 138045
  derived and/or modified CDS sequence (opt3) from hemagglutinin__InfluenzaA__AGW00769

SEQ ID NO: 138547 - RNA, 1701 nt, Artificial Sequence; identical to SEQ ID NO: 137931
  derived and/or modified CDS sequence (opt3) from hemagglutinin__InfluenzaA__AGW00781

SEQ ID NO: 138548 - RNA, 1701 nt, Artificial Sequence; identical to SEQ ID NO: 138530
  derived and/or modified CDS sequence (opt3) from hemagglutinin__InfluenzaA__AGW00793

SEQ ID NO: 138549 - RNA, 1701 nt, Artificial Sequence; identical to SEQ ID NO: 138042
  derived and/or modified CDS sequence (opt3) from hemagglutinin__InfluenzaA__AGW00805

SEQ ID NO: 138550 - RNA, 1701 nt, Artificial Sequence; identical to SEQ ID NO: 137883
  derived and/or modified CDS sequence (opt3) from hemagglutinin__InfluenzaA__AGW00817

SEQ ID NO: 138551 - RNA, 1701 nt, Artificial Sequence; identical to SEQ ID NO: 138529
  derived and/or modified CDS sequence (opt3) from hemagglutinin__InfluenzaA__AGW00829

SEQ ID NO: 138552 - RNA, 1701 nt, Artificial Sequence
  derived and/or modified CDS sequence (opt3) from hemagglutinin__InfluenzaA__AGW00841
augaagaccaucauugcccugagcuacauacucugccuuguguucgcucagaaacugcccggcaacgacaauuccacagcaacuuuguguuuagggcaccaugccgucccuaacggaacgaucguuaagaccauuacaaaugguagaaucgaggugacuaacgcgaccgaacugguacaaaauucuucaauuggcgagaucugcgauaguccacaccagauacuagacggggaaaacuguacacucaucgaugcucugcuuggagacccgcagugcgauggcuuucagaauaaaaagugggaccuguucguggagaggagcaaagccuauuccaacuguuaccccuaugaugucccugacuacgcaucuuugcggucgcucguggccucaagcgguacccuggaauuuaauaacgagaguuucaauugggcugggguuacucaaaacggaacauccucugcaugcauucgcggcagcaauuccucauuuuucagucgacugaacuggcucacccauuuaaauuuuaaguauccagcccugaacgugacgaugcccaacaaugagcaguucgauaaguuguacaucuggggcguccaccauccugggacugacaaagaucagauuuuucuuuaugcucagagcucuggacguaucaccguguccacaaagagaucacaacaggccguaauaccaaacauugguagcaggccccggauccgcaauauuccuaguagaaucucuaucuacuggacuauuguuaaaccaggcgacauacugcuaaucaacuccaccgggaaucucauugcgccgaggggauacuucaagauccggagcggcaaaucgucuauaaugcgcuccgaugcacccauugguaaguguaagucagaaugcaucacaccuaacgggaguaucccaaaugacaaacccuuucagaacgugaaucgaauuaccuauggagccuguccuagauacgucaagcagagcacgcugaaacuugcuacuggcaugaggaacgugccagagaagcaaacacggggcaucuucggggccauugcaggauuuauagaaaaugguugggagggcaugguggacgggugguauggauuccgucaccagaacuccgagggccgcggucaggcugccgaucugaaaucuacccaagcggccaucgaccagauuaaugggaaguugaacagacucaucggcaaaacuaaugaaaaguuccaccagaucgagaaggaauuuagcgaggucgaaggaaggauucaggaucuggagaaauacguugaggacacaaagauagauuuauggucauauaacgcagaacugcucguggcucuugagaaccaacauaccaucgaccugacggauagugaaaugaauaaauuguucgagaagaccaaaaagcagcuacgggaaaacgccgaggacaugggcaaugggugcuuuaagauuuaccacaaaugugauaacgcuugcaucggauccauucgaaaugguacauaugaccaugauguauaccgcgacgaggcccugaacaauagauuccagaucaagggcguggaacucaaaagcggguacaaggacuggauacuguggaucucuuuugcaauuucaugcuuccuucugugugucgccuugcucggauuuaucaugugggcuugccagaaaggcaacauuagguguaauaucugcauauga

SEQ ID NO: 138553 - RNA, 1701 nt, Artificial Sequence
  derived and/or modified CDS sequence (opt3) from hemagglutinin__InfluenzaA__AGW00853
augaagaccaucauugcccugagcuacauacucugccuuguguucgcucagaaacugcccggcaacgacaauuccacagcaacuuuguguuuagggcaccaugccgucccuaacggaacgaucguuaagaccauuacaaaugauagaaucgaggugacuaacgcgaccgaacugguacaaaauucuucaauuggugagaucugcgacaguccacaccagauacuagauggcgaaaacuguacacucaucgacgcucugcuuggggauccgcagugcgacggauuucagaauaaaaagugggaucuguucguggagaggagcaaagccuauuccaacuguuaccccuaugacgucccugauuacgcaucuuugcggucgcucguggccucaagcggcacccuggaauuuaauaacgagaguuucaauuggacugguguuacacaaaacgggaccuccucugcuugcauucgccgaagcaauuccucauuuuucagucgucugaacuggcucacgcauuuaaauuuuaaguauccagcacugaacgugacuaugcccaacaaugagcaguucgacaaacuuuacaucuggggaguccaccauccuggcaccgauaaagaccagaucuuuuuguaugcccagccaagcggcagaauuacagugucuacuaagaggucccaacaggcuguaauacccaacauugggucacggccucgcaucagaaauauuccaagcaggaucaguaucuacuggaccauuguuaaaccgggagauauacugcuaaucaacucuacagguaaucucauugcgccccggggcuacuucaagauccgcuccgggaaaagcucgauaaugcgaucugacgccccuauuggaaaguguaaguccgaaugcaucaccccaaacggcucaauccccaaugacaaaccuuuucagaacgugaauagaauuacguauggugcauguccaagguacgucaagcagaguacucugaaacuugccacagggaugcggaacgugcccgagaagcaaacccguggaaucuucggcgcuauugccggcuuuauagaaaaugggugggagggaaugguggaugguugguauggcuuccgccaccagaacagcgaggggagaggacaggcagcugaccugaaauccacucaagccgcgaucgaucagauuaauggcaaguugaacaggcucaucgguaaaacaaaugaaaaguuccaccagaucgagaaggaauuuucugaggucgaagggcggauucaggaccuggagaaauacguugaggauaccaagauagacuuauggagcuauaacgccgaacugcucguggcacuugagaaccaacauacgaucgaucugaccgacucagaaaugaauaaauuguucgagaagacaaagaagcagcuacgagaaaacgcugaggauaugggcaauggaugcuuuaagauuuaccacaaaugugacaacgccugcaucggcaguauucgcaaugggacuuaugaucauaacguauacagagacgaggcucugaauaacagguuccagaucaagggaguggaacucaaauccgguuacaaggacuggauacuguggaucagcuuugccauuucuugcuuccuucugugugucgcauugcucggcuuuaucaugugggccugccagaaagggaauauucgguguaacaucugcauauga

SEQ ID NO: 138554 - RNA, 1701 nt, Artificial Sequence; identical to SEQ ID NO: 137906
  derived and/or modified CDS sequence (opt3) from hemagglutinin__InfluenzaA__AGW00865

SEQ ID NO: 138555 - RNA, 1701 nt, Artificial Sequence
  derived and/or modified CDS sequence (opt3) from hemagglutinin__InfluenzaA__AGW00877
augaagaccaucauugcccugagcuacauacucugccuuguguucgcucaggagcugcccggcaacgacgauuccacagcaacuuuguguuuagggcaccaugccgucccuaauggaacgaucguuaaaaccauuacaaacgaccaaaucgaagugacuaaugcgaccgagcugguacagucuucaaguacaggugaaauuugcaacagcccacaccagauccuagauggcgagaauuguacccucauagacgcucugcuuggggauccgcagugcgacggauuucaaaacaagaaaugggaucuguucguggaaagauccaaggcccauucuaauuguuaucccuacgacgucccugauuaugcaucguugaggucacucguggccagcaguggcacucuggaguuuaacaaugaguccuucaacuggacagguguuacccagaaugggacgucuagcgcuugcauccggcgcuccaacaauucauuuuucagucgacugaacuggcucacucacuuaaauuuuaaauacccagcacugaacgugaccaugcccaacaaugaacaguucgacaaacuuuauauuuggggaguccaucacccuggcacagauaaggaccagaucuuuuuguacgcccaagcuagcggccguauuacugugucuaccaagagaucccagcaggccguaaucccaaacauaggguucaggccccggguucgcaauauuccuucaagagugagcaucuauuggacaauugucaagccaggagauauccugcuaaucaacaguaccgguaaucucauugcgccgaggggcuacuuuaaaauacggucugggaaguccagcaucaugcgcucggacgcacccauuggaaaauguaacucugccugcaucacgccuaauggcuccauaccaaacgacaagcccuuccagaaugugaaccgaauuacuuacggugcuuguccuagauaugugaagcaaaauacacugaaacuugccaccgggaugaggaacgucccagagaagcagacucggggaaucuuuggcgcaaucgcuggcuucauugaaaaugggugggagggaaugguugaugguugguacggcuuccgucaccagaacucagaggggcgcggacaagccgcggaccugaaaaguacacaggccgcaaucgaucagauuaauggcaaguugaacagacucauagguaaaaccaacgaaaaguuucaucagaucgagaaagaguucagcgaaguggaagggaggauucaagaccuggagaaguauguagaggauacgaagaucgacuuaugguccuacaaugcugaacugcucguggcccuugagaaccagcacaccaucgaucugacagacucugaaaugaauaaauuguuugagaagacuaaaaagcagcuacgggaaaacgcugaggauaugggcaauggaugcuucaaaauuuaucauaagugugacaacgccugcauaggcagcauccgaaaugggaccuacgaucacgacgucuaucgcgacgaggcacugaacaauagauuucagauuaagggaguggaacucaaaucagguuacaaggauuggauccuguggauuaguuucgccaucuccugcuuucuucuguguguugcuuugcucggcuucauaaugugggcgugccaaaaagggaacaucagguguaauauuugcaucuga

SEQ ID NO: 138556 - RNA, 1701 nt, Artificial Sequence
  derived and/or modified CDS sequence (opt3) from hemagglutinin__InfluenzaA__AGW00889
augaagaccaucauugcccugagcuacauacucugccuuguguucgcucagaaacugcccggcaacgacaauuccacagcaacuuuguguuuagggcaccaugccgucccuaacggaacgaucguuaagaccauuacaaaugauagaaucgaggugacuaacgcgaccgaacugguacaaaauucuucaauuggugagaucugcgacaguccacaccagauacuagauggcgaaaacuguacacucaucgacgcucugcuuggggauccgcagugcgacggauuucagaauaaaaagugggaucuguucguggagaggagcaaagccuauuccaacuguuaccccuaugacgucccugauuacgcaucuuugcggucgcucguggccucaagcggcacccuggaauuuaauaacgagaguuucaauuggacugguguuacacaaaacgggaccuccucugcuugcauucgccgaagcaauuccucauuuuucagucgucugaacuggcucacgcauuuaaauuuuaaguauccagcacugaacgugacuaugcccaacaaugagcaguucgacaaacuuuacaucuggggaguccaccauccuggcaccgauaaagaccagaucuuuuuguaugcccagagcucuggcagaauuacaguguccacuaagaggucacaacaggcuguaauaccaaacauugggagccggccccgcaucagaaauauuccuaguaggaucucuaucuacuggaccauuguuaaaccaggagauauacugcuaaucaacuccacagguaaucucauugccccgcggggcuacuucaagauccgcagcgggaaaucgucuauaaugcgauccgacgcgcccauuggaaaguguaagucagaaugcaucaccccuaacggcaguaucccaaaugacaaacccuuucagaacgugaauagaauuacguauggugcauguccuagguacgucaagcagagcacucugaaacuugccacagggaugcggaacgugccagagaagcaaacccguggaaucuucggcgcuauugccggcuuuauagaaaaugggugggagggaaugguggaugguugguauggcuuccgccaccagaacuccgaggggagaggacaggcagcugaccugaaaucuacucaagccgcgaucgaucagauuaauggcaaguugaacaggcucaucgguaaaacaaaugaaaaguuccaccagaucgagaaggaauuuagcgaggucgaagggcggauucaggaccuggagaaauacguugaggauaccaagauagacuuauggucauauaacgccgaacugcucguggcacuugagaaccaacauacgaucgaucugaccgacagugaaaugaauaaauuguucgagaagacaaagaagcagcuacgagaaaacgcugaggauaugggcaauggaugcuuuaagauuuaccacaaaugugacaacgccugcaucggcuccauucgcaaugggacuuaugaucauaacguauacagagacgaggcucugaauaacagguuccagaucaagggaguggaacucaaaagcgguuacaaggacuggguccuguggauaucuuuugccaucucaugcuuccuucuguguguggcauugcucggcuuuauuaugugggccugccagaaagggaauauccgguguaacauuugcaucuga

SEQ ID NO: 138557 - RNA, 1701 nt, Artificial Sequence; identical to SEQ ID NO: 137906
  derived and/or modified CDS sequence (opt3) from hemagglutinin__InfluenzaA__AGW00901

SEQ ID NO: 138558 - RNA, 1701 nt, Artificial Sequence; identical to SEQ ID NO: 137906
  derived and/or modified CDS sequence (opt3) from hemagglutinin__InfluenzaA__AGW00913

SEQ ID NO: 138559 - RNA, 1701 nt, Artificial Sequence; identical to SEQ ID NO: 138042
  derived and/or modified CDS sequence (opt3) from hemagglutinin__InfluenzaA__AGW00931

SEQ ID NO: 138560 - RNA, 1701 nt, Artificial Sequence; identical to SEQ ID NO: 138042
  derived and/or modified CDS sequence (opt3) from hemagglutinin__InfluenzaA__AGW01244

SEQ ID NO: 138561 - RNA, 1701 nt, Artificial Sequence; identical to SEQ ID NO: 137916
  derived and/or modified CDS sequence (opt3) from hemagglutinin__InfluenzaA__AGW01256

SEQ ID NO: 138562 - RNA, 1701 nt, Artificial Sequence
  derived and/or modified CDS sequence (opt3) from hemagglutinin__InfluenzaA__AGW01295
augaagaccaucauugcccugagcuacauacucugccuuguguucgcucagaaacugcccggcaacgacaauuccacagcaacuuuguguuuagggcaccaugccgucccuaacggaacgaucguuaagaccauuacaaaugauagaaucgaggugacuaacgcgaccgaacugguacaaaauucuucaauuggugagaucugcgacaguccacaccagauacuagauggcgaaaacuguacacucaucgacgcucugcuuggggauccgcagugcgacggauuucagaauaaaaagugggaucuguucguggagaggagcaaagccuauuccaacuguuaccccuaugacgucccugauuacgcaucuuugcggucgcucguggccucaagcggcacccuggaauuuaauaacgagaguuucaauuggacugguguuacacaaaacgggaccuccucugcuugcauucgccgaagcaauuccucauuuuucagucgucugaacuggcucacgcauuuaaauuuuaaguauccagcacugaacgugacuaugcccaacaaugagcaguucgacaaacuuuacaucuggggaguccaccauccuggcaccgauaaagaccagaucuuuuuguaugcccagagcucuggcagaauuacaguguccacuaagaggucacaacaggcuguaauaccaaacauugggagccggccccgcaucagaaauauuccuaguaggaucucuaucuacuggaccauuguuaaaccaggagauauacugcuaaucaacuccacagguaaucucauugccccgcggggcuacuucaagauccgcagcgggaaaucgucuauaaugcgauccgacgcgcccauuggaaaguguaagucagaaugcaucaccccuaacggcaguaucccaaaugacaaacccuuucagaacgugaauagaauuacguauggugcauguccuagguacgucaagcagagcacucugaaacuugccacagggaugcggaacgugccagagaagcaaacccguggaaucuucggcgcuauugccggcuuuauagaaaaugggugggagggaaugguggaugguugguauggcuuccgccaccagaacuccgaggggagaggacaggcagcugaccugaaaucuacucaagccgcgaucgaucagauuaauggcaaguugaacaggcucaucgguaaaacaaaugaaaaguuccaccagaucgagaaggaauuuagcgaggucgaagggcggauucaggaccuggagaaauacguugaggauaccaagauagacuuauggucauauaacgccgaaauccugguggcacucgagaaccaacauacgauugaucuuaccgacagugaaaugaauaaacuguucgagaagacaaagaagcaguugcgagaaaacgcugaggauaugggcaauggaugcuuuaagaucuaccacaaaugugacaacgccugcauuggcuccauccgcaaugggacuuaugaucauaacguauacagagacgaggcucuaaauaacagguuccagauaaagggaguggaacugaaaagcgguuacaaggacuggauccucuggauuucuuuugccaucucaugcuuccugcuuugugucgcacuguugggcuuuauuaugugggccugccagaaagggaauauccgguguaacauaugcauuuga

SEQ ID NO: 138563 - RNA, 1701 nt, Artificial Sequence; identical to SEQ ID NO: 137906
  derived and/or modified CDS sequence (opt3) from hemagglutinin__InfluenzaA__AGW01307

SEQ ID NO: 138564 - RNA, 1701 nt, Artificial Sequence
  derived and/or modified CDS sequence (opt3) from hemagglutinin__InfluenzaA__AGW01319
augaagaccaucauugcccugagcuacauacucugccuuguguucgcucaggagcugcccggcaacgacgauuccacagcaacuuuguguuuagggcaccaugccgucccuaauggaacgaucguuaaaaccauuacaaacgaccaaaucgaagugacuaaugcgaccgagcugguacagucuucaaguacaggugaaauuugcaacagcccacaccagauccuagauggcgagaauuguacccucauagacgcucugcuuggggauccgcagugcgacggauuucaaaacaagaaaugggaucuguucguggaaagauccaaggcccauucuaauuguuaucccuacgacgucccugauuaugcaucguugaggucacucguggccagcaguggcacucuggaguuuaacaaugaguccuucaacuggacagguguuacccaggacgggacgucuagcgcuugcauccggcgcuccaauaacucauuuuucagucgacugaauuggcucacucacuuaaacuuuaaauacccagcacugaaugugaccaugcccaacaacgaacaguucgauaaacuuuauauuuggggaguccaucacccuggcacagacaaggaucagaucuuuuuguacgcccaagcuagcggccguauuacugugucuaccaagagaucccagcaggccguaaucccaaauauagggucaaggccccggguucgcaacauuccuagcagagugaguaucuauuggacaauugucaagccaggagacauccugcuaaucaauucuaccgguaaccucauugcgccgaggggcuacuucaaaauacgguccggaaagagcucgaucaugcgcucugacgcacccauugggaaauguaauuccgccugcaucacgccuaacggcucaauaccaaaugauaagcccuuucagaacgugaaucgaauuacuuacggugcuuguccuagauaugugaagcaaaacacacugaaacuugccaccgggaugaggaaugucccagagaagcagacucggggaaucuucggcgcaaucgcuggcuuuauugaaaacgggugggagggaaugguugacgguugguacggcuuccgucaccagaauagugaggggcgcggacaagccgcggaucugaaaagcacacaggccgcaaucgaccagauuaacggcaaguugaauaaacucauagguaagaccaacgaaaaauuccaucagaucgagaaggaauuuuccgagguggaagggaggauucaagaucuggagaaguauguagaggacacgaaaaucgauuuauggucuuacaacgcugaacugcucguggcccuugagaaucagcacaccaucgaccugacagauagcgaaaugaacaaguuguucgagaaaacuaagaaacagcuaagagaaaaugcugaggacaugggcaacggaugcuuuaagauuuaucauaagugugauaaugccugcauaggcucaauccggaacgggaccuacgaccacgacgucuaucgagaugaggcacugaauaaccgcuuccagauuaaaggaguggaacucaagagugguuacaaagacuggauccuguggauuuccuuugccaucagcugcuuccuucuguguguugcuuugcucggcuuuauaaugugggcgugccaaaaggggaauaucagauguaacauuugcaucuga

SEQ ID NO: 138565 - RNA, 1701 nt, Artificial Sequence
  derived and/or modified CDS sequence (opt3) from hemagglutinin__InfluenzaA__AGW01331
augaagaccaucauugcccugagcuacauacucugccuuguguucgcucagaaacugcccggcaacgacaauuccacagcaacuuuguguuuagggcaccaugccgucccuaacggaacgaucguuaagaccauuacaaaugauagaaucgaggugacuaacgcgaccgaacugguacaaaauucuucaauuggugagaucugcgacaguccacaccagauacuagauggcgaaaacuguacacucaucgacgcucugcuuggggauccgcagugcgacggauuucagaauaaaaagugggaucuguucguggagaggagcaaagccuauuccaacuguuaccccuaugacgucccugauuacgcaucuuugcggucgcucguggccucaagcggcacccuggaauuuaauaacgagaguuucaauugggcugguguuacucaaaacgggacauccucugcaugcauucgcggaagcaauuccucauuuuucagucgacugaacuggcucacccauuuaaauuuuaaguauccagcccugaacgugacgaugcccaacaaugagcaguucgacaaguuguacaucuggggcguccaccauccuggcacugauaaagaccagauuuuucuuuaugcucagagcucugggcguaucaccguguccacaaagagaucacaacaggccguaauaccaaacauuggaagcaggccccggauccgcaauauuccuaguagaaucucuaucuacuggacuauuguuaaaccaggugauauacugcuaaucaacuccaccggcaaucucauugcgccgaggggguacuucaagauccggagcggaaaaucgucuauaaugcgcuccgacgcacccauuggcaaguguaagucagaaugcaucacaccuaacgguaguaucccaaaugacaaacccuuucagaacgugaaucgaauuaccuauggggccuguccuagauacgucaagcagagcacgcugaaacuugcuacuggaaugaggaacgugccagagaagcaaacacggggcaucuucggcgccauugcaggguuuauagaaaauggaugggaggguaugguggauggcugguauggguuccgucaccagaacuccgagggacgcggccaggcugccgaccugaaaucuacccaagcggccaucgaucagauuaaugguaaguugaacagacucaucgggaaaacuaaugaaaaguuccaccagaucgagaaggaauuuagcgaggucgaaggcaggauucaggaccuggagaaauacguugaggauacaaagauagacuuauggucauauaacgcagaacugcucguggcucuugagaaccaacauaccaucgaucugacggacagugaaaugaauaaauuguucgagaagaccaaaaagcagcuacgggaaaacgccgaggauaugggaaauggcugcuuuaagauuuaccacaaaugugacaacgcuugcaucggguccauucgaaauggaacauaugagcaugauguauaccgcgacgaagcccugaacaauagauuccagaucaaggguguggagcucaaaagcggcuacaaggacuggauacuguggaucucuuuugcaauuucaugcuuccuucugugugucgccuugcucggguuuaucaugugggcuugccagaaaggaaacauuagguguaauaucugcauauga

SEQ ID NO: 138566 - RNA, 1701 nt, Artificial Sequence; identical to SEQ ID NO: 138042
  derived and/or modified CDS sequence (opt3) from hemagglutinin__InfluenzaA__AGW01343

SEQ ID NO: 138567 - RNA, 1701 nt, Artificial Sequence; identical to SEQ ID NO: 138045
  derived and/or modified CDS sequence (opt3) from hemagglutinin__InfluenzaA__AGW01355

SEQ ID NO: 138568 - RNA, 1701 nt, Artificial Sequence; identical to SEQ ID NO: 137916
  derived and/or modified CDS sequence (opt3) from hemagglutinin__InfluenzaA__AGW01367

SEQ ID NO: 138569 - RNA, 1701 nt, Artificial Sequence; identical to SEQ ID NO: 138042
  derived and/or modified CDS sequence (opt3) from hemagglutinin__InfluenzaA__AGW01391

SEQ ID NO: 138570 - RNA, 1701 nt, Artificial Sequence
  derived and/or modified CDS sequence (opt3) from hemagglutinin__InfluenzaA__AGW01403
augaagaccaucauugcccugagcuacauacucugccuuaucuucgcucagaaacugcccggcaacgacaauuccacagcaacuuuguguuuagggcaccaugccgugccuaacggaacgauugucaagaccaucacaaaugaucaaauugagguuacuaacgcgaccgaacuggugcagucuucaaguacaggugagaucugcaauagcccacaccagauacuagacggcgaaaacuguacccucaucgaugcucugcuuggggacccgcagugcgauggauuucaaaauaaaaagugggaccuguucguagagagauccaaagcccauucuaacuguuaucccuacgaugugccugacuaugcaucguugaggucacucgucgccagcaguggcacucuggaauuuaauaacgaguccuucaauuggacaggugugacccagaacgggacgucuagcgcuugcauucggcgcuccaauaacucauuuuucagucgacugaauuggcucacucacuuaaacuuuaaguacccagcacugaacguuaccaugcccaauaacgagcaguucgauaaguuguauaucuggggagugcaucacccuggcacagacaaagaucagauuuuucuuuacgcccaagcugccggccguaucacugucagcaccaagagaucucagcaggcggugauaccaaauauuggguccaggccccggguacgcaacaucccuucaagaguuagcauuuauuggacaaucgugaaaccaggagacauccugcuaauuaauaguaccgguaaccucauagcaccgaggggcuacuucaagauccggucugggaaauccagcauuaugcgcucggaugcccccaucggaaaguguaauucugcuugcauaacgccuaacggcuccauuccaaaugacaagcccuuucagaacgucaaucgaaucacuuacggugccuguccuagauaugugaaacaaaacacacugaaacuugcaaccgggaugaggaaugugccagaaaaacagacucggggaaucuucggcgcuauugccggcuuuaucgagaacgggugggaaggaauggucgacgguugguacggcuuccgucaccaaaauucagaggggcgcggacaggcggccgaucugaagaguacacaggcagcuauugaccagauaaacggcaaauugaacagacucaucgguaagaccaaugagaaauuccaucagauugaaaaggaguuuagcgaaguugaggggaggauccaagaucuggaaaaguauguggaggacacgaaaaucgauuuaugguccuacaacgccgagcugcucguagcucuugaaaaucagcacaccauugaccugacagauucugagaugaacaaguuguucgaaaagacuaagaaacagcuacgggagaaugccgaagacaugggcaacggaugcuuuaagauauaucauaagugugauaaugcaugcaucggcagcauucgaaacgggaccuacgaccacuauguguaccgcgaugaggcccugaauaacagauuccagaucaaaggagucgagcucaagucagguuacaaagacuggauucuguggaucaguuuugcuacauccugcuuccuucuguguguggcguugcucggcuuuauaaugugggcaugccaaaaggggaauaucagguguaacauuugcaucuga

SEQ ID NO: 138571 - RNA, 1701 nt, Artificial Sequence; identical to SEQ ID NO: 137906
  derived and/or modified CDS sequence (opt3) from hemagglutinin__InfluenzaA__AGW01415

SEQ ID NO: 138572 - RNA, 1701 nt, Artificial Sequence; identical to SEQ ID NO: 137906
  derived and/or modified CDS sequence (opt3) from hemagglutinin__InfluenzaA__AGW01427

SEQ ID NO: 138573 - RNA, 1701 nt, Artificial Sequence; identical to SEQ ID NO: 137906
  derived and/or modified CDS sequence (opt3) from hemagglutinin__InfluenzaA__AGW01439

SEQ ID NO: 138574 - RNA, 1701 nt, Artificial Sequence
  derived and/or modified CDS sequence (opt3) from hemagglutinin__InfluenzaA__AGW01451
augaagaccaucauugcccugagcuacauacucugccuuguguucgcucagaaacugcccggcaacgacaauuccacagcaacuuuguguuuagggcaccaugccgucccuaacggaacgaucguuaagaccauuacaaaugauagaaucgaggugacuaacgcgaccgaacugguacaaaauucuucaauuggugagaucugcgacaguccacaccagauacuagauggcgaaaacuguacacucaucgacgcucugcuuggggauccgcagugcgacggauuucagaauaaaaagugggaucuguucguggagaggagcaaagccuauuccaacuguuaccccuaugacgucccugauuacgcaucuuugcggucgcucguggccucaagcggcacccuggaauuuaauaacgagaguuucaauugggcugguguuacucaaaacgggacauccucugcaugcauucgcggaagcaauuccucauuuuucagucgacugaacuggcucacccauuuaaauuuuaaguauccagcccugaacgugacgaugcccaacaaugagcaguucgacaaguuguacaucuggggcguccaccauccuggcacugauaaagaccagauuuuucuuuaugcucagagcucugggcguaucaccguguccacaaagagaucacaacaggccguaauaccaaacauuggaagcaggccccggauccgcaauauuccuaguagaaucucuaucuacuggacuauuguuaaaccaggugauauacugcuaaucaacuccaccggcaaucucauugcgccgaggggguacuucaagauccggagcggaaaaucgucuauaaugcgcuccgacgcacccauuggcaaguguaagucagaaugcaucacaccuaacgguaguaucccaaaugacaaacccuuucagaacgugaaucgaauuaccuauggggccuguccuagauacgucaagcagagcacgcugaaacuugcuacuggaaugaggaacgugccagagaagcaaacacggggcaucuucggcgccauugcaggguuuauagaaaauggaugggaggguaugauggauggcugguauggguuccgucaccagaacuccgagggacgcggccaggcugccgaccugaaaucuacccaagcggccaucgaucagauuaaugguaaguugaacagacucaucgggaaaacuaaugaaaaguuccaccagaucgagaaggaauuuagcgagguggaaggcaggauucaggaccuggagaaauacgucguugauacaaagauagacuuauggucauauaacgcagagcugcucguggcucuugaaaaccaacauaccaucgaucugacggacagugagaugaauaaauuguucgaaaagaccaaaaagcagcuacgggagaacgccgaagauaugggaaauggcugcuuuaagauuuaccacaaaugugacaacgcuugcaucggguccauucgaaauggaacauaugaucaugacguauaccgcgacgaggcccugaacaauagauuccagaucaaggguguggagcucaaaagcggcuacaaggauuggauacuguggaucucuuuugcaauuucaugcuuccuucugugugucgccuugcucggguuuaucaugugggcuugccagaaaggaaacauuagguguaauaucugcauauga

SEQ ID NO: 138575 - RNA, 1701 nt, Artificial Sequence; identical to SEQ ID NO: 138042
  derived and/or modified CDS sequence (opt3) from hemagglutinin__InfluenzaA__AGW01463

SEQ ID NO: 138576 - RNA, 1701 nt, Artificial Sequence; identical to SEQ ID NO: 138042
  derived and/or modified CDS sequence (opt3) from hemagglutinin__InfluenzaA__AGW01475

SEQ ID NO: 138577 - RNA, 1701 nt, Artificial Sequence
  derived and/or modified CDS sequence (opt3) from hemagglutinin__InfluenzaA__AGW01487
augaagaccaucauugcccugagcuacauacucugccuuguguucgcucagaaacugcccggcaacgacaauuccacagcaacuuuguguuuagggcaccaugccgucccuaacggaacgaucguuaagaccauuacaaaugauagaaucgaggugacuaacgcgaccgaacugguacaaaauucuucaauuggugagaucugcgacaguccacaccagauacuagauggcgaaaacuguacacucaucgacgcucugcuuggggauccgcagugcgacggauuucagaauaaaaagugggaucuguucguggagaggagcaaagccuauuccaacuguuaccccuaugacgucccugauuacgcaucuuugcggucgcucguggccucaagcggcacccuggaauuuaauaacgagaguuucaauuggacugguguuacacaaaacgggaccuccucugcuugcauucgccgaagcaauaacuccuuuuucucacgucugaauuggcucacgcauaguaacuuuaaguauccagcauuaaacgugacuaugcccaauaacgagcaguucgacaagcuguacaucuggggaguccaccauccuggcaccggcaaagaucagauuuuucuuuaugcccagagcucugggagaaucacaguguccacuaagaggucacaacaggcuguaauaccaaauauuggaagccggccccgcaucagaaacauuccuaguaggaucucuaucuacuggaccauuguuaaaccaggugacauauugcugaucaauuccacaggcaaccuaauugccccgcggggguacuucaagauccgcagcggaaaaucgucuauaaugcgauccgaugcgcccauuggcaaguguaagucagaaugcaucaccccuaaugguaguaucccaaacgacaaacccuuucagaaugugaacagaauuacguauggggcauguccuagguacgucaagcagagcacucucaaacuggccacaggaaugcggaaugugccagagaagcaaacccguggcaucuucggcgcuauugccggguuuauagaaaacggaugggaggguaugauggacggcugguauggguuccgccaccaaaauuccgagggaagaggccaggcagcugaucuuaaaucuacucaggccgcgaucgaccagauuaacgguaagcugaauagguugaucgggaaaacaaacgaaaaguuccaccagaucgagaaggaauuuagcgagguggaaggccggauucaggaucucgagaaauacgucgaggacaccaagauagaucuguggucauauaacgccgaauuacugguugcacucgagaaucaacauacgaucgaccuuaccgauagugaaaugaacaaacuguucgagaagacuaaaaagcaguugcgagaaaaugcugaggacaugggaaacggcugcuuuaagauuuaccacaaaugugauaaugccugcaucggguccauucgcaacggaacauaugaccaugauguguacagagacgaggcucuaaauaacagguuccagaucaaggguguagaacugaaaagcggcuacaaggacuggauacucuggaucucuuuugccauuucaugcuuccugcuuuguguggcacuguugggguuuaucaugugggccugccagaaaggaaauauucgguguaacaucugcauauga

SEQ ID NO: 138578 - RNA, 1701 nt, Artificial Sequence; identical to SEQ ID NO: 137906
  derived and/or modified CDS sequence (opt3) from hemagglutinin__InfluenzaA__AGW01499

SEQ ID NO: 138579 - RNA, 1701 nt, Artificial Sequence
  derived and/or modified CDS sequence (opt3) from hemagglutinin__InfluenzaA__AGW01511
augaagaccaucauugcccugagcuacauacucugccuuguguucgcucagaaacugcccggcaacgacaauuccacagcaacuuuguguuuagggcaccaugccgucccuaacggaacgaucguuaagaccauuacaaaugauagaaucgaggugacuaacgcgaccgaacugguacaaaauucuucaauuggugagaucugcgacaguccacaccagauacuagauggcgaaaacuguacacucaucgacgcucugcuuggggauccgcagugcgacggauuucagaauaaaaagugggaucuguucguggagaggagcaaagccuauuccaacuguuaccccuaugacgucccugauuacgcaucuuugcggucgcucguggccucaagcggcacccuggaauuuaauaacgagaguuucaauugggcugguguuacucaaaacgggacauccucugcaugcauucgcggaagcaauuccucauuuuucagucgacugaacuggcucacccauuuaaauuuuaaguauccagcccugaacgugacgaugcccaacaaugagcaguucgacaaguuguacaucuggggcguccaccauccuggcacugauaaagaccagauuuuucuuuaugcucagagcucugggcguaucaccguguccacaaagagaucacaacaggccguaauaccaaacauuggaagcaggccccggauccgcaauauuccuaguagaaucucuaucuacuggacuauuguuaaaccaggugauauacugcuaaucaacuccaccggcaaucucauugcgccgaggggguacuucaagauccggagcggaaaaucgucuauaaugcgcuccgacgcacccauuggcaaguguaagucagaaugcaucacaccuaacgguaguaucccaaaugacaaacccuuucagaacgugaaucgaauuaccuauggggccuguccuagauacgucaagcagagcacgcugaaacuugcuacuggaaugaggaacgugccagagaagcaaacacggggcaucuucggcgccauugcaggguuuauagaaaauggaugggaggguaugguggauggcugguauggguuccgucaccagaacuccgagggacgcggccaggcugccgaccugaaaucuacccaagcggccaucgaucagauuaaugguaaguugaacagacucaucgggaaaacuaaugaaaaguuccaccagaucgagaaggaauuuagcgaggucgaaggcaggauucaggaccuggagaaauacguugaggauacaaagauagacuuauggucauauaacgcagaacugcucguggcucuugagaaccaacauaccaucgaucugacggacagugaaaugaauaaauuguucgagaagaccaaaaagcagcuacgggaaaacgccgaggauaugggaaauggcugcuuuaagauuuaccacaaaugugacaacgcuugcaucggguccauucgaaauggaacauaugaucaugacguauaccgcgacgaggcccugaacaauagauuccagaucaaggguguggaacucaaaagcggcuacaaggauuggauacuguggaucucuuuugcaauuucaugcuuccuucugugugccgcuuugcucggguuuaucaugugggcgugccagaaaggaaacauuagguguaauaucugcauauga

SEQ ID NO: 138580 - RNA, 1701 nt, Artificial Sequence
  derived and/or modified CDS sequence (opt3) from hemagglutinin__InfluenzaA__AGW01535
augaagaccaucauugcccugagcuacauacucugccuuguguucgcucagaaacugcccggcaacgacaauuccacagcaacuuuguguuuagggcaccaugccgucccuaacggaacgaucguuaagaccauuacaaaugauagaaucgaggugacuaacgcgaccgaacugguacaaaauucuucaauuggugagaucugcgacaguccacaccagauacuagauggcgaaaacuguacacucaucgacgcucugcuuggggauccgcagugcgacggauuucagaauaaaaagugggaucuguucguggagaggagcaaagccuauuccaacuguuaccccuaugacgucccugauuacgcaucuuugcggucgcucguggccucaagcggcacccuggaauuuaauaaggagaguuucaacugggcugguguuacucaaaaugggacauccucugcaugcauucgcggaagcaacuccucauuuuucagucgacugaauuggcucacccauuuaaacuuuaaguauccagcccugaaugugacgaugcccaacaacgagcaguucgacaaacuuuacaucuggggcguccaccauccuggcacugauaaggaccagauuuuucuuuaugcucagagcucugggcguaucaccguguccacaaaaagaucacaacaggccguaauaccaaauauuggaagcaggccccggauccgcaacauuccuaguagaaucucuaucuacuggacuauuguuaagccaggugauauacugcuaaucaauuccaccggcaaccucauugcgccgaggggguacuucaaaauccggagcggaaagucgucuauaaugcgcuccgacgcacccauuggcaaguguaaaucagaaugcaucacaccuaaugguaguaucccaaacgacaagcccuuucagaaugugaaccgaauuaccuauggggccuguccuagauacgucaaacagagcacgcugaaguuggcuacuggaaugaggaaugugccagagaaacaaacacggggcaucuucggcgccauugcaggguuuauagaaaacggaugggaggguaugguggauggcugguauggguuccgucaccaaaauuccgagggacgcggccaggcugccgaccugaagucuacccaggcggccaucgaucagauuaacgguaaauugaauagacucaucgggaagacuaacgaaaaguuccaccagaucgagaaagaauuuagcgaggucgaaggcaggauucaggaccuggagaaguacguugaggauacaaaaauagacuuauggucauauaaugcagaacugcucguggcucuugagaaccaacauaccaucgaucugacggacagugaaaugaacaaguuguucgagaaaaccaagaagcagcuacgggaaaaugccgaggauaugggaaacggcugcuuuaaaauuuaccacaagugugacaaugcuugcaucggguccauucgaaacggaacauaugaucaugacguauaccgcgacgaggcccugaauaacagauuccagaucaaagguguggaacucaagagcggcuacaaagauuggauacuguggaucucuuuugcaauuucaugcuuccuucugugugucgccuugcucggguuuaucaugugggcuugccagaagggaaauauuagguguaacaucugcauauga

SEQ ID NO: 138581 - RNA, 1701 nt, Artificial Sequence; identical to SEQ ID NO: 137906
  derived and/or modified CDS sequence (opt3) from hemagglutinin__InfluenzaA__AGW01547

SEQ ID NO: 138582 - RNA, 1701 nt, Artificial Sequence; identical to SEQ ID NO: 138042
  derived and/or modified CDS sequence (opt3) from hemagglutinin__InfluenzaA__AGW01559

SEQ ID NO: 138583 - RNA, 1701 nt, Artificial Sequence; identical to SEQ ID NO: 138042
  derived and/or modified CDS sequence (opt3) from hemagglutinin__InfluenzaA__AGW01571

SEQ ID NO: 138584 - RNA, 1701 nt, Artificial Sequence; identical to SEQ ID NO: 138042
  derived and/or modified CDS sequence (opt3) from hemagglutinin__InfluenzaA__AGW01583

SEQ ID NO: 138585 - RNA, 1701 nt, Artificial Sequence; identical to SEQ ID NO: 138042
  derived and/or modified CDS sequence (opt3) from hemagglutinin__InfluenzaA__AGW01595

SEQ ID NO: 138586 - RNA, 1701 nt, Artificial Sequence
  derived and/or modified CDS sequence (opt3) from hemagglutinin__InfluenzaA__AGW01607
augaagaccaucauugcccugagcuacauacucugccuugugcuggcucagaaauugcccggcaacgacaauuccacagcaacuuuaugucuggggcaccaugccgucccuaacggaacgaucguuaagaccauuacaaaugauagaaucgaggugacuaacgcgaccgaacuuguacaaaauucuucaauuggugagaucugcgacaguccacaccagauacucgauggcgaaaacuguacacugaucgacgcucuacugggggauccgcagugcgacggauuccagaauaaaaagugggauuuguuuguggagaggagcaaagccuauuccaacuguuaccccuaugacgucccugauuacgcaucucuccggucgcugguggccucaagcggcacccuggaguucaauaacgaaaguuuuaauugggcugguguuacucaaaacgggacauccucugcaugcauucgcggaagcaauuccucauucuuuagucgacucaacugguuaacccaucugaauuucaaguauccagcccuuaacgugacgaugcccaacaaugagcaguuugacaaguuguacaucuggggcguccaccauccuggcacugauaaagaccagauuuuccuguaugcucagagcucugggcguaucaccguguccacaaagagaucacaacaggccguaauaccaaacauuggaagcaggccccggauccgcaauauuccuaguagaaucucuaucuacuggacuauuguuaaaccaggugauauacuacucaucaacuccaccggcaaucugauugcgccgaggggguacuuuaagauccggagcggaaaaucgucuauaaugcgcuccgacgcacccauuggcaaguguaagucagaaugcaucacaccuaacgguaguaucccaaaugacaaacccuuccagaacgugaaucgaauuaccuauggggccuguccuagauacgucaagcagagcacgcuuaaacuggcuacuggaaugaggaacgugccagagaagcaaacacggggcaucuuuggcgccauugcaggguucauagaaaauggaugggaggguaugguggauggcugguauggguuucgucaccagaacuccgagggacgcggccaggcugccgacuugaaaucuacccaagcggccaucgaucagauuaaugguaagcucaacagacugaucgggaaaacuaaugaaaaguuccaccagaucgagaaggaguucagcgaagucgaaggcaggauucaggacuuagagaaauacguugaggauacaaagauagaccuguggucauauaacgcagaacuccuuguggcucuggagaaccaacauaccaucgauuugacggacagugaaaugaauaaacuauuugagaagaccaaaaagcagcugcgggaaaacgccgaggauaugggaaauggcugcuucaagauuuaccacaaaugugacaacgcuugcaucggguccauucgaaauggaacauaugaucaugacguauaccgcgacgaggcccucaacaauagauuucagaucaaggguguggaacugaaaagcggcuacaaggauuggauacuuuggaucucuuucgcaauuucaugcuuucuguugugugucgcccuccugggguucaucaugugggcuugccagaaaggaaacauuagguguaauaucugcauauga

SEQ ID NO: 138587 - RNA, 1701 nt, Artificial Sequence; identical to SEQ ID NO: 138045
  derived and/or modified CDS sequence (opt3) from hemagglutinin__InfluenzaA__AGW01619

SEQ ID NO: 138588 - RNA, 1701 nt, Artificial Sequence; identical to SEQ ID NO: 138042
  derived and/or modified CDS sequence (opt3) from hemagglutinin__InfluenzaA__AGW01631

SEQ ID NO: 138589 - RNA, 1701 nt, Artificial Sequence
  derived and/or modified CDS sequence (opt3) from hemagglutinin__InfluenzaA__AGW01643
augaagaccaucauugcccugagcuacauacucugccuuguguucgcucagaaacugcccggcaacgacaauuccacagcaacuuuguguuuagggcaccaugccgucccuaacggaacgaucguuaagaccauuacaaaugauagaaucgaggugacuaacgcgaccgaacugguacaaaauucuucaauuggugagaucugcgacaguccacaccagauacuagauggcgaaaacuguacacucaucgacgcucugcuuggggauccgcagugcgacggauuucagaauaaaaagugggaucuguucguggagaggagcaaagccuauuccaacuguuaccccuaugacgucccugauuacgcaucuuugcggucgcucguggccucaagcggcacccuggaauuuaauaacgagaguuucaauuggacugguguuacacaaaacgggaccuccucugcuugcauucgcggaagcaauuccucauuuuucagucgacugaacuggcucacgcauuuaaauuuuaaguauccagcacugaacgugacuaugcccaacaaugagcaguucgacaaacuuuacaucuggggcguccaccauccuggcaccgauaaagaccagaucuuuuuguaugcccagagcucugggcguauuacaguguccacuaagagaucacaacaggcuguaauaccaaacauuggaagcaggccccggauccgcaauauuccuaguagaaucucuaucuacuggaccauuguuaaaccaggugauauacugcuaaucaacuccacaggcaaucucauugccccgaggggguacuucaagauccggagcggaaaaucgucuauaaugcgcuccgacgcgcccauuggcaaguguaagucagaaugcaucaccccuaacgguaguaucccaaaugacaaacccuuucagaacgugaaucgaauuacguauggggcauguccuagauacgucaagcagagcacucugaaacuugccacaggaaugaggaacgugccagagaagcaaacccggggcaucuucggcgcuauugccggguuuauagaaaauggaugggaggguaugauggauggcugguauggguuccgucaccagaacuccgagggacgcggccaggcagcugaccugaaaucuacucaagccgcgaucgaucagauuaaugguaaguugaacagacucaucgggaaaacaaaugaaaaguuccaccagaucgagaaggaauuuagcgagguggaaggcaggauucaggaccuggagaaauacgucgaggauaccaagauagacuuauggucauauaacgccgaacugcucguugcacuugagaaccaacauacgaucgaucugaccgacagugaaaugaauaaauuguucgagaagacaaagaagcagcuacgggaaaacgcugaggauaugggaaauggcugcuuuaagauuuaccacaaaugugacaacgccugcaucggguccauucgaaauggaacuuaugaucaugacguguaccgcgacgaggcucugaacaauagauuccagaucaaggguguagaacucaaaagcggcuacaaggauuggauacuguggaucucuuuugccauuucaugcuuccuucuguguguggcauugcucggguuuaucaugugggccugccagaaaggaaacauuagguguaauaucugcauauga

SEQ ID NO: 138590 - RNA, 1701 nt, Artificial Sequence; identical to SEQ ID NO: 138042
  derived and/or modified CDS sequence (opt3) from hemagglutinin__InfluenzaA__AGW01655

SEQ ID NO: 138591 - RNA, 1701 nt, Artificial Sequence
  derived and/or modified CDS sequence (opt3) from hemagglutinin__InfluenzaA__AGW01667
augaagaccaucauugcccugagcuacauacucugccuuguguucgcucagaaacugcccggcaacgacaauuccacagcaacuuuguguuuagggcaccaugccgucccuaacggaacgaucguuaagaccauuacaaaugauagaaucgaggugacuaacgcgaccgaacugguacaaaauucuucaauuggugagaucugcgacaguccacaccagauacuagauggcgaaaacuguacacucaucgacgcucugcuuggggauccgcagugcgacggauuucagaauaaaaagugggaucuguucguggagaggagcaaagccuauuccaacuguuaccccuaugacgucccugauuacgcaucuuugcggucgcucguggccucaagcggcacccuggaauuuaauaacgagaguuucaauugggcugguguuacucaaaacgggacauccucugcaugcauucgcggaagcaauuccucauuuuucagucgacugaacuggcucacccauuuaaauuuuaaguauccagcccugaacgugacgaugcccaacaaugagcaguucgacaaguuguacaucuggggcguccaccauccuggcacugauaaagaccagauuuuucuuuaugcucagagcucugggcguaucaccguguccacaaagagaucacaacaggccguaauaccaaacauuggaagcaggccccggauccgcaauauuccuaguagaaucucuaucuacuggacuauuguuaaaccaggugauauacugcuaaucaacuccaccggcaaucucauugcgccgaggggguacuucaagauccggagcggaaaaucgucuauaaugcgcuccgacgcacccauuggcaaguguaagucagaaugcaucacaccuaacgguaguaucccaaaugacaaacccuuucagaacgugaaucgaauuaccuauggggccuguccuagauacgucaagcagagcacgcugaaacuugcuacuggaaugaggaacgugccagagaagcaaacacggggcaucuucggcgccauugcaggguuuauagaaaauggaugggaggguaugguggauggcugguauggguuccgucaccagaacuccgagggacgcggccaggcugccgaccugaaaucuacccaagcggccaucgaucagauuaaugguaaguugaacagacucaucgggaaaacuaaugaaaaguuccaccagaucgagaaggaauuuagcgaggucgaaggcaggauucaggaccuggagaaauacguugaggauacaaagauagacuuauggucauauaacgcagaacugcucguggcucuugagaaccaacauaccaucgaucugacggacagugaaaugaauaaauuguucgagaagaccaaaaagcagcuacgggaaaacgccgaggauaugggaaauggcugcuuuaagauuuaccacaaaugugacaacgcuugcaucggguccauucgaaaugagacauaugaucaugacguauaccgcgacgaagcccugaacaauagauuccagaucaagggaguggagcucaaaagcgguuacaaggauuggauacuguggaucucuuuugcaauuucaugcuuccuucugugugucgccuugcucggcuuuaucaugugggcuugccagaaagggaacauuagguguaauaucugcauauga

SEQ ID NO: 138592 - RNA, 1701 nt, Artificial Sequence; identical to SEQ ID NO: 138042
  derived and/or modified CDS sequence (opt3) from hemagglutinin__InfluenzaA__AGW01679

SEQ ID NO: 138593 - RNA, 1701 nt, Artificial Sequence
  derived and/or modified CDS sequence (opt3) from hemagglutinin__InfluenzaA__AGW01691
augaagaccaucauugcccugagcuacauacucugccuuguguucgcucagaaacugcccggcaacgacaauuccacagcaacuuuguguuuagggcaccaugccgucccuaacggaacgaucguuaagaccauuacaaaugauagaaucgaggugacuaacgcgaccgaacugguacaaaauucuucaauuggugagaucugcgacaguccacaccagauacuagauggcgaaaacuguacacucaucgacgcucugcuuggggauccgcagugcgacggauuucagaauaaaaagugggaucuguucguggagaggagcaaagccuauuccaacuguuaccccuaugacgucccugauuacgcaucuuugcggucgcucguggccucaagcggcacccuggaauuuaauaacgagaguuucaauuggacugguguuacacaaaacgggaccuccucugcuugcauucgccgaagcaauuccucauuuuucagucgucugaacuggcucacgcauuuaaauuuuaaguauccagcacugaacgugacuaugcccaacaaugagcaguucgacaaacuuuacaucuggggaguccaccauccuggcaccgauaaagaccagaucuuuuuguaugcccagagcucuggcagaauuacaguguccacuaagaggucacaacaggcuguaauaccaaacauugggagccggccccgcaucagaaauauuccuaguaggaucucuaucuacuggaccauuguuaaaccaggagauauacugcuaaucaacuccacagguaaucucauugccccgcggggcuacuucaagauccgcagcgggaaaucgucuauaaugcgauccgacgcgcccauuggaaaguguaagucagaaugcaucaccccuaacggcaguaucccaaaugacaaacccuuucagaacgugaauagaauuacguauggugcauguccuagguacgucaagcagagcacucugaaacuugccacagggaugcggaacgugccagagaagcaaacccguggaaucuucggcgcuauugccggcuuuauagaaaaugggugggagggaaugguggaugguugguauggcuuccgccaccagaacuccgaggggagaggacaggcagcugaccugaaaucuacucaagccgcgaucgaucagauuaauggcaaguugaacaggcucaucgguaaaacaaaugaaaaguuccaccagaucgagaaggaauuuagcgaggucgaagggcggauucaggaccuggagaaauacguugaggauaccaagauagacuuauggucauauaacgccgaacugcucguggcacuugagaaccaacauacgaucgaucugaccgacagugaaaugaauaaauuguucgagaagacaaagaagcagcuacgagaaaacgcugaggauaugggcaauggaugcuuuaagauuuaccacaaaugugacaacgccugcaucggcuccauucgcaaugggacuuaugaucaugacguauacagagacgaggcucugaacaauagguuccagaucaagggaguggaacucaaaagcgguuacaaggauuggauacuguggaucucuuuugccauuucaugcuuccuucugugugucgcauugcucggcuuugugaugugggccugccagaaagggaacauccgguguaauauuugcaucuga

SEQ ID NO: 138594 - RNA, 1701 nt, Artificial Sequence; identical to SEQ ID NO: 137906
  derived and/or modified CDS sequence (opt3) from hemagglutinin__InfluenzaA__AGW01701

SEQ ID NO: 138595 - RNA, 1701 nt, Artificial Sequence; identical to SEQ ID NO: 137906
  derived and/or modified CDS sequence (opt3) from hemagglutinin__InfluenzaA__AGW01713

SEQ ID NO: 138596 - RNA, 1701 nt, Artificial Sequence
  derived and/or modified CDS sequence (opt3) from hemagglutinin__InfluenzaA__AGW01725
augaagaccaucauugcccugagcuacauacucugccuuguguucgcucagaaacugcccggcaacgacaauuccacagcaacuuuguguuuagggcaccaugccgucccuaacggaacgaucguuaagaccauuacaaaugauagaaucgaggugacuaacgcgaccgaacugguacaaaauucuucaauuggugagaucugcgacaguccacaccagauacuagauggcgaaaacuguacacucaucgacgcucugcuuggggauccgcagugcgacggauuucagaauaaaaagugggaucuguucguggagaggagcaaagccuauuccaacuguuaccccuaugacgucccugauuacgcaucuuugcggucgcucguggccucaagcggcacccuggaauuuaauaacgagaguuucaauuggacugguguuacacaaaacgggaccuccucugcuugcauucgccgaagcaauuccucauuuuucagucgucugaacuggcucacgcauuuaaauuuuaaguauccagcacugaacgugacuaugcccaacaaugagcaguucgacaaacuuuacaucuggggaguccaccauccuggcaccgauaaagaccagaucuuuuuguaugcccagagcucuggcagaauuacaguguccacuaagaggucacaacaggcuguaauaccaaacauugggagccggccccgcaucagaaauauuccuaguaggaucucuaucuacuggaccauuguuaaaccaggagauauacugcuaaucaacuccacagguaaucucauugccccgcggggcuacuucaagauccgcagcgggaaaucgucuauaaugcgauccgacgcgcccauuggaaaguguaagucagaaugcaucaccccuaacggcaguaucccaaaugacaaacccuuucagaacgugaauagaauuacguauggugcauguccuagguacgucaagcagagcacucugaaacuugccacagggaugcggaacgugccagagaagcaaacccguggaaucuucggcgcuauugccggcuuuauagaaaaugggugggagggaaugguggaugguugguauggcuuccgccaccagaacuccgaggggagaggacaggcagcugaccugaaaucuacucaagccgcgaucgaucagauuaauggcaaguugaacaggcucaucgguaaaacaaaugaaaaguuccaccagaucgagaaggaauuuagcgaggucgaagggcggauucaggaccuggagaaauacguugaggauaccaagauagacuuauggucauauaacgccgaacugcucguggcacuugagaaccaacauacgaucgaucugaccgacagugaaaugaauaaauuguucgagaagacaaagaagcagcuacgagaaaacgcugaggauaugggcaauggaugcuuuaagauuuaccacaaaugugacaacgccugcaucggcuccauucgcaaugggacuuaugaucauaacguauacagagacgaggcucugaauaacagguuccagaucaagggaguggaacucaaaagcgguuacaaggacuggauacuguggaucucuuuugccauuucaugcuuccuuaucugugucgcacuguugggcuuuauuaugugggccugccagaaagggaauauccgguguaacauaugcauuuga

SEQ ID NO: 138597 - RNA, 1701 nt, Artificial Sequence; identical to SEQ ID NO: 137906
  derived and/or modified CDS sequence (opt3) from hemagglutinin__InfluenzaA__AGW01737

SEQ ID NO: 138598 - RNA, 1701 nt, Artificial Sequence; identical to SEQ ID NO: 138042
  derived and/or modified CDS sequence (opt3) from hemagglutinin__InfluenzaA__AGW01749

SEQ ID NO: 138599 - RNA, 1701 nt, Artificial Sequence; identical to SEQ ID NO: 138042
  derived and/or modified CDS sequence (opt3) from hemagglutinin__InfluenzaA__AGW01761

SEQ ID NO: 138600 - RNA, 1701 nt, Artificial Sequence; identical to SEQ ID NO: 137906
  derived and/or modified CDS sequence (opt3) from hemagglutinin__InfluenzaA__AGW01773

SEQ ID NO: 138601 - RNA, 1701 nt, Artificial Sequence; identical to SEQ ID NO: 138042
  derived and/or modified CDS sequence (opt3) from hemagglutinin__InfluenzaA__AGW01785

SEQ ID NO: 138602 - RNA, 1701 nt, Artificial Sequence; identical to SEQ ID NO: 137906
  derived and/or modified CDS sequence (opt3) from hemagglutinin__InfluenzaA__AGW01797

SEQ ID NO: 138603 - RNA, 1701 nt, Artificial Sequence; identical to SEQ ID NO: 138042
  derived and/or modified CDS sequence (opt3) from hemagglutinin__InfluenzaA__AGW01809

SEQ ID NO: 138604 - RNA, 1701 nt, Artificial Sequence; identical to SEQ ID NO: 138042
  derived and/or modified CDS sequence (opt3) from hemagglutinin__InfluenzaA__AGW01821

SEQ ID NO: 138605 - RNA, 1701 nt, Artificial Sequence; identical to SEQ ID NO: 138041
  derived and/or modified CDS sequence (opt3) from hemagglutinin__InfluenzaA__AGW01833

SEQ ID NO: 138606 - RNA, 1701 nt, Artificial Sequence
  derived and/or modified CDS sequence (opt3) from hemagglutinin__InfluenzaA__AGW01845
augaagaccaucauugcccugagcuacauacucugccuuguguucgcucagaaacugcccggcaacgacaauuccacagcaacuuuguguuuagggcaccaugccgucccuaacggaacgaucguuaagaccauuacaaaugauagaaucgaggugacuaacgcgaccgaacugguacaaaauucuucaauuggugagaucugcgacaguccacaccagauacuagauggcgaaaacuguacacucaucgacgcucugcuuggggauccgcagugcgacggauuucagaauaaaaagugggaucuguucguggagaggagcaaagccuauuccaacuguuaccccuaugacgucccugauuacgcaucuuugcggucgcucguggccucaagcggcacccuggaauuuacuaaugagaguuucaacuggacagguguuacccaaaaugggacguccucugcuugcauucgccgaagcaacuccucauuuuucagucgucugaauuggcucacucauuuaaacuuuaaguauccagcacugaaugugaccaugcccaacaacgagcaguucgacaaguuguacaucuggggaguccaccauccuggcacagauaaagaccagauuuuucuuuaugcccagagcucuggcagaaucacuguguccaccaagaggucacaacaggcuguaauaccaaauauugggagccggccccgcaucagaaacauuccuaguaggaucucuaucuacuggacaauuguuaaaccaggagauauacugcuaaucaauuccaccgguaaccucauugccccgcggggcuacuucaagauccgcagcgggaaaucgucuauaaugcgauccgacgcgcccauuggaaaguguaagucagaaugcaucacgccuaauggcaguaucccaaacgacaaacccuuucagaaugugaacagaauuacuuauggugcauguccuagguacgucaagcagagcacacugaaacuugccaccgggaugcggaaugugccagagaagcaaacucguggaaucuucggcgcuauugccggcuuuauagaaaacgggugggagggaaugguggaugguugguauggcuuccgccaccaaaauuccgaggggagaggacaggcagcugaccugaaaucuacacaggccgcgaucgaucagauuaacggcaaguugaauaggcucaucgguaaaaccaacgaaaaguuccaccagaucgagaaggaauuuagcgaggucgaagggcggauucaggaccuggagaaauacguugaggauacgaagauagacuuauggucauauaaugccgaacugcucguggcacuugagaaccaacauaccaucgaucugacagacagugaaaugaacaaauuguucgagaagacuaaaaagcagcuacgagaaaaugcugaggauaugggcaacggaugcuuuaagauuuaccacaaaugugacaaugccugcaucggcuccauucgcaacgggaccuaugaucauaauguauacagagacgaggcucugaacaauagguuccagaucaagggaguggaacucaaaagcgguuacaaggacuggauacuguggaucucuuuugccauuucaugcuuccuucugugugucgcauugcucggcuuuaucaugugggccugccagaaagggaacauucgguguaauaucugcauauga

SEQ ID NO: 138607 - RNA, 1701 nt, Artificial Sequence; identical to SEQ ID NO: 138042
  derived and/or modified CDS sequence (opt3) from hemagglutinin__InfluenzaA__AGW01857

SEQ ID NO: 138608 - RNA, 1701 nt, Artificial Sequence; identical to SEQ ID NO: 138042
  derived and/or modified CDS sequence (opt3) from hemagglutinin__InfluenzaA__AGW01869

SEQ ID NO: 138609 - RNA, 1701 nt, Artificial Sequence; identical to SEQ ID NO: 138593
  derived and/or modified CDS sequence (opt3) from hemagglutinin__InfluenzaA__AGW01881

SEQ ID NO: 138610 - RNA, 1701 nt, Artificial Sequence; identical to SEQ ID NO: 137916
  derived and/or modified CDS sequence (opt3) from hemagglutinin__InfluenzaA__AGW01893

SEQ ID NO: 138611 - RNA, 1701 nt, Artificial Sequence; identical to SEQ ID NO: 137931
  derived and/or modified CDS sequence (opt3) from hemagglutinin__InfluenzaA__AGW01905

SEQ ID NO: 138612 - RNA, 1701 nt, Artificial Sequence; identical to SEQ ID NO: 138042
  derived and/or modified CDS sequence (opt3) from hemagglutinin__InfluenzaA__AGW01917

SEQ ID NO: 138613 - RNA, 1701 nt, Artificial Sequence; identical to SEQ ID NO: 137906
  derived and/or modified CDS sequence (opt3) from hemagglutinin__InfluenzaA__AGW01929

SEQ ID NO: 138614 - RNA, 1701 nt, Artificial Sequence; identical to SEQ ID NO: 138042
  derived and/or modified CDS sequence (opt3) from hemagglutinin__InfluenzaA__AGW01941

SEQ ID NO: 138615 - RNA, 1701 nt, Artificial Sequence; identical to SEQ ID NO: 137906
  derived and/or modified CDS sequence (opt3) from hemagglutinin__InfluenzaA__AGW01953

SEQ ID NO: 138616 - RNA, 1701 nt, Artificial Sequence
  derived and/or modified CDS sequence (opt3) from hemagglutinin__InfluenzaA__AGW01965
augaagaccaucauugcccugagcuacauacucugccuuguguucgcucaggagcugcccggcaacgacgauuccauggcaacauuguguuuagggcaccaugccgucccuaauggaacuaucguuaaaacgauuaccaacgaccaaaucgaagugacaaaugcgacugagcugguacagucuucaaguaccggugaaauuugcaacagcccacaccagauccuagauggcgagaauuguacacucauagacgcucugcuuggggauccgcagugcgacggauuucaaaacaagaaaugggaucuguucguggaaagauccaaggcccauucuaauuguuaucccuacgacgucccugauuaugcaucguugaggucacucguggccagcaguggcacccuggaguuuaacaaugaguccuucaacuggacugguguuacacagaaugggaccucuagcgcuugcauccggcgcuccaacaauucauuuuucagucgacugaacuggcucacgcacuuaaauuuuaaauacccagcacugaacgugacuaugcccaacaaugaacaguucgacaaacuuuauauuuggggaguccaucacccuggcaccgauaaggaccagaucuuuuuguacgcccaagcuagcggccguauuacagugucuacuaaaagaucccagcaggccguaaucccaaacauagggucaaggccccggguucgcaauauuccuagcagagugaguaucuauuggaccauugucaagccaggagauauccugcuaaucaacucuacagguaaucucauugcgccgaggggcuacuucaaaauacgguccggaaagagcucgaucaugcgcucugacgcacccauugggaaauguaacuccgccugcaucaccccuaauggcucaauaccaaacgacaagcccuuucagaaugugaaccgaauuacguacggugcuuguccuagauaugugaagcaaaauacucugaaacuugccacagggaugaggaacgucccagagaagcagacccggggaaucuucggcgcaaucgcuggcuuuauugaaaaugggugggagggaaugguugaugguugguacggcuuccgucaccagaacagugaggggcgcggacaagccgcggaccugaaaagcacucaggccgcaaucgaucagauuaauggcaaguugaacagacucauagguaaaacaaacgaaaaguuccaucagaucgagaaagaauuuuccgagguggaagggaggauucaagaccuggagaaguauguagaggauaccaagaucgacuuauggucuuacaaugcugaacugcucguggcccuugagaaccagcacacgaucgaucugaccgacagcgaaaugaauaaauuguucgagaagacaaagaagcagcuacgggaaaacgcugaggauaugggcaauggaugcuuuaaaauuuaucauaagugugacaacgauugcauaggcucaauccgaaaugggacuuacgaccacaacgucuaucgcgacgaggcccugaauaacagauuccagauuaagggaaucgaacucaaaagugguuacaaggauuggauucuguggaucuccuuugcaauaagcugcuuccuucuguguguggccuugcucggcuuuaucaugugggcuugccaaaaagggaauauuagguguaacaucugcauuuga

SEQ ID NO: 138617 - RNA, 1701 nt, Artificial Sequence; identical to SEQ ID NO: 138042
  derived and/or modified CDS sequence (opt3) from hemagglutinin__InfluenzaA__AGW01977

SEQ ID NO: 138618 - RNA, 1701 nt, Artificial Sequence; identical to SEQ ID NO: 138042
  derived and/or modified CDS sequence (opt3) from hemagglutinin__InfluenzaA__AGW01989

SEQ ID NO: 138619 - RNA, 1701 nt, Artificial Sequence; identical to SEQ ID NO: 138042
  derived and/or modified CDS sequence (opt3) from hemagglutinin__InfluenzaA__AGW02001

SEQ ID NO: 138620 - RNA, 1701 nt, Artificial Sequence; identical to SEQ ID NO: 138042
  derived and/or modified CDS sequence (opt3) from hemagglutinin__InfluenzaA__AGW02013

SEQ ID NO: 138621 - RNA, 1701 nt, Artificial Sequence; identical to SEQ ID NO: 137906
  derived and/or modified CDS sequence (opt3) from hemagglutinin__InfluenzaA__AGW02025

SEQ ID NO: 138622 - RNA, 1701 nt, Artificial Sequence; identical to SEQ ID NO: 138042
  derived and/or modified CDS sequence (opt3) from hemagglutinin__InfluenzaA__AGW02037

SEQ ID NO: 138623 - RNA, 1701 nt, Artificial Sequence; identical to SEQ ID NO: 138042
  derived and/or modified CDS sequence (opt3) from hemagglutinin__InfluenzaA__AGW02061

SEQ ID NO: 138624 - RNA, 1701 nt, Artificial Sequence; identical to SEQ ID NO: 138042
  derived and/or modified CDS sequence (opt3) from hemagglutinin__InfluenzaA__AGW02073

SEQ ID NO: 138625 - RNA, 1701 nt, Artificial Sequence; identical to SEQ ID NO: 138042
  derived and/or modified CDS sequence (opt3) from hemagglutinin__InfluenzaA__AGW02085

SEQ ID NO: 138626 - RNA, 1701 nt, Artificial Sequence; identical to SEQ ID NO: 137931
  derived and/or modified CDS sequence (opt3) from hemagglutinin__InfluenzaA__AGW02097

SEQ ID NO: 138627 - RNA, 1701 nt, Artificial Sequence; identical to SEQ ID NO: 137906
  derived and/or modified CDS sequence (opt3) from hemagglutinin__InfluenzaA__AGW02109

SEQ ID NO: 138628 - RNA, 1701 nt, Artificial Sequence; identical to SEQ ID NO: 138042
  derived and/or modified CDS sequence (opt3) from hemagglutinin__InfluenzaA__AGW02133

SEQ ID NO: 138629 - RNA, 1701 nt, Artificial Sequence; identical to SEQ ID NO: 138042
  derived and/or modified CDS sequence (opt3) from hemagglutinin__InfluenzaA__AGW02157

SEQ ID NO: 138630 - RNA, 1701 nt, Artificial Sequence; identical to SEQ ID NO: 137906
  derived and/or modified CDS sequence (opt3) from hemagglutinin__InfluenzaA__AGW02169

SEQ ID NO: 138631 - RNA, 1701 nt, Artificial Sequence; identical to SEQ ID NO: 138042
  derived and/or modified CDS sequence (opt3) from hemagglutinin__InfluenzaA__AGW02181

SEQ ID NO: 138632 - RNA, 1701 nt, Artificial Sequence; identical to SEQ ID NO: 137916
  derived and/or modified CDS sequence (opt3) from hemagglutinin__InfluenzaA__AGW02193

SEQ ID NO: 138633 - RNA, 1701 nt, Artificial Sequence; identical to SEQ ID NO: 137883
  derived and/or modified CDS sequence (opt3) from hemagglutinin__InfluenzaA__AGW04171

SEQ ID NO: 138634 - RNA, 1707 nt, Artificial Sequence
  derived and/or modified CDS sequence (opt3) from hemagglutinin__InfluenzaA__AGW27061
auggagaagaucgugcuacucuucgccauugucaaccuuguuaaaagcgaccacauaugcaucggcuaccaugcuaauaacuccaccgaacagguggauacaauuauggagaagaauguaacugugacgcacgcacaagacauccuggaaaagacccauaacgggaaguugugugauuuaaauggagucaaaccccugauucuaaaggacugcucuguggccgguuggcuccugggcaacccuaugugugaugaguuuaucgacguuccagaauggucauauauaguggagaaggcgaauccggcuaacgaucuuugcuaccccgggaauuucaacgacuaugaggaacugaaacacuugcucaguagaaucaaucauuuugagaagauuaggaucauuccuaaagauagcuggccagaccacgaagccucccugggagucucugcagccuguucguaccagggcaacagcucauucuuucggaaugugguauggcugcucaagaaaaacgaugcuuaucccaucauaaagaagaguuacaauaacacaaacaaagaggacuuacugguucuuugggguauucaccauccuaaugaugaggcagaacagauccgcuuguaucagaacccaacuaccuacguguccacagggaccucuacucugaaucaacgacuggucccccguauugccacaagaagcaaggugaacggacaguccggcaggaucgacuucuuuuggaccauccucaaaccuaaugacgcuauuaacuucgagucaaauggcaacuuuauagccccagaauacgcguauaagaucgugaaaaagggggauaguacgauuaugcggagcgaggucgaauacggaaauugcucuacucgcugucagaccccgaugggugcaaucaacuccucaaugcccuuccacaauauacauccucugacaauuggcgagugcccaaaauauguuaagagcaacaaacuugugcuggccacuggguugagaaauaguccccagaucgagaggcggcgccgaaaaagaggacucuuuggcgcuaucgccgguuucauugaagggggauggcaaggcaugguagacggcugguacggguaucaccacucuaacgagcagggauccgguuacgcagcugauaaggaaagcacccagaaagccaucgacggcgugacaaauaaggucaacucgauuauagauaaaaugaacacccaguuugaggcgguggggagggaguucaauaaccuggaacggcguaucgagaauuuaaacaagaagauggaagacggauuccuggauguuuggacguauaaugccgagcuccuugugcugauggaaaacgagcgcacuuuggacuuucaugauucuaaugucaaaaaccuauacgacaaggugagacugcaacucagggauaaugcaaaagaacugggcaacgguuguuucgaguuuuaccacaagugcgacaaugaguguauggaauccguacggaacgggacauaugacuacccucaguauucagaggaagcucgacuuaaacgcgaggagauuaguggcguuaagcuggaaagcaucggaaccuaccagaucuuguccauuuauucuacuguggccagcucacucguccugaguauaaugguggcuggcuuaucccuguggaugugcagcaaugggucucuacaaugcagaauguguaucuga

SEQ ID NO: 138635 - RNA, 1698 nt, Artificial Sequence
  derived and/or modified CDS sequence (opt3) from hemagglutinin__InfluenzaA__AGY14471
augaaggugaaacugcucauccuucugugcaccuucacagccacuuacgcugacacgauuuguauaggcuaucacgcaaacaauagcaccgauacagucgacacuaucuuggagaagaacguuaccgugacacauuccguaaauuuacuggaagauucucacaacgggaaacuaugccuccugaagggaauugcgccccuucagcuggguaauuguucaguggccggcuggaucuuggggaacccugagugcggacuccugauuccaaaagaaaguuggagcuacaucgucgagaccccgaaucccgaaaacggcacuuguuauccugguuacuuugacgauuaugaggagcugagagaacaacucuccucugugucgucauucgagagguuugaaauauucccaaaggagagcaguuggcccaaucauacaguuaccgggguguccgcuucuugcagccacaacggaaaguccucauuuuaccggaauuuacuguggcuuacgggcaaaaacggcuuguauccuaaucugaguaagagcuacgccaacaauaaagagaaggaaguccuaauccucuggggagugcaucacccaucuaacauugggaaccagcgcacucuguaccacaccgagaauacauauguauccguugugucaagccauuacagucgacguuucacucccgaaaucaccaaaagaccuaaggucagggaccaggagggucggauuaacuauuacuggacacuucuggaaccaggcgauaccaucauauuugaggcaaaugggaacuugauugccccgugguaugcuuucgcacucucuaagggauuuggcuccgguaucauuacgagcaaugcccccauggacgagugugaugcuaaaugccagacuccucaaggggccaucaacucgaaucugccauuccagaacgugcaccccgugacaaucggagaauguccuaaguacguccgcucuaccaaauuaagaaugguuacuggccugaggaauauuccauccauacagucacggggccucuuuggggcgaucgcaggauucauugaggguggcuggacagggaugguggacggaugguauggcuaccaucaccagaacgaacaagguaguggguacgccgcugaucaggagagcacccagaaugccaucaacggcauaacgaauaagguaaacuccgugauugaaaagaugaauacccaguuuacagucgugggaaaagaguucaacaaacuugagcgccgaauggaaaaccugaauaagaagguugacgauggcuucuuggacaucuggacuuauaacgcagagcuacuggugcuccuggaaaaugagagaacccuugacuuucacgauucuaacgucaugaaucuguacgaaaaagugaaggggcaauugaaaaacaaugcuaaggagaucggaaacgguugcuucgaguuuuaucauaaauguaauaacgaaugcauggagagcguaaagaauggcacauacgacuaucccaaguacucagaagagaguaaacucaacagggagaagauugaugggguuaaacuggaauccaugggaguguaucagaucuuagccauuuacagcacugucgcgucuucacuggugcuacucgucagucugggcgccaucagcuucuggaugugcuccaaugguucucuucagugucggauaugcauuuga

SEQ ID NO: 138636 - RNA, 1698 nt, Artificial Sequence; identical to SEQ ID NO: 138635
  derived and/or modified CDS sequence (opt3) from hemagglutinin__InfluenzaA__AGY14477

SEQ ID NO: 138637 - RNA, 1701 nt, Artificial Sequence
  derived and/or modified CDS sequence (opt3) from hemagglutinin__InfluenzaA__AHC57459
augaagaccaucauugcccugagcuacauacucugccuuguguucgcucagaaacugcccggcaacgacaauuccacagcaacuuuguguuuagggcaccaugccgucccuaacggaacgaucguuaagaccauuacaaaugaucaaaucgaggugacuaacgcgaccgaacugguacagucuucaaguacaggugagauuugcaauagcccacaccagauccuagacggcgaaaacuguacccucauagaugcucugcuuggggacccgcagugcgauggauuucaaaauaaaaagugggaccuguucguggagagauccaaagcccauucuaacuguuaucccuacgaugucccugacuaugcaucguugaggucacucguggccagcaguggcacucuggaauuuaauaacgaguccuucaauuggacagguguuacccagaacgggacgucuagcgcuugcauccggcgcuccaauaacucauuuuucagucgacugaauuggcucacucacuuaaacuuuaaguacccagcacugaacgugaccaugcccaauaacgagcaguucgauaaacuuuauauuuggggaguccaucacccuggcacagacaaagaucagaucuuuuuguacgcccaagcugccggccguauuacugugagcaccaagagaucucagcaggcgguaaucccaaauauaggguccaggccccggauucgcaacaucccuucaagaguuagcauuuauuggacaaucgugaaaccaggagacauccugcuaauuaauaguaccgguaaccucauagcaccgaggggcuacuucaagauccggucugggaaauccagcauuaugcgcucggaugcccccaucggaaaguguaauucugcuugcauaacgccuaacggcuccauuccaaaugacaagcccuuucagaacgucaaucgaaucacuuacggugccuguccuagauaugugaaacaaaacacacugaaacuugcaaccgggaugaggaaugugccagaaaagcagacucggggaaucuucggcgcuauugccggcuuuaucgagaacgggugggaaggaauggucgacgguugguacggcuuccgucaccaaaauucagaggggcgcggacaggcggccgaucugaagaguacacaggcagcuauugaccagauaaacggcaaauugaacagacucaucgguaagaccaaugagaaauuccaucagauugaaaaggaguuuagcgaaguugaggggaggauccaagaucuggaaaaguauguggaggacacgaaaaucgauuuaugguccuacaacgccgagcugcucguagcucuugaaaaucagcacaccauugaccugacagauucugagaugaacaaguuguucgaaaagacuaagaaacagcuacgggagaaugccgaagacaugggcaacggaugcuuuaagauauaucauaagugugauaaugcaugcaucggcagcauucgaaacgggaccuacgaccacgauguguaucgcgacgaggcccugaauaacagauuccagaucaaaggagucgagcucaagucagguuacaaagacuggauucuguggaucaguuuugcuauauccugcuuccuucuguguguggcguugcucggcuuuaucaugugggcaugccaaaaggggaauauuagguguaacaucugcauuuga

SEQ ID NO: 138638 - RNA, 1701 nt, Artificial Sequence; identical to SEQ ID NO: 135030
  derived and/or modified CDS sequence (opt3) from hemagglutinin__InfluenzaA__AHC57465

SEQ ID NO: 138639 - RNA, 1701 nt, Artificial Sequence; identical to SEQ ID NO: 134903
  derived and/or modified CDS sequence (opt3) from hemagglutinin__InfluenzaA__AHC57487

SEQ ID NO: 138640 - RNA, 1701 nt, Artificial Sequence; identical to SEQ ID NO: 135830
  derived and/or modified CDS sequence (opt3) from hemagglutinin__InfluenzaA__AHC57499

SEQ ID NO: 138641 - RNA, 1701 nt, Artificial Sequence; identical to SEQ ID NO: 135830
  derived and/or modified CDS sequence (opt3) from hemagglutinin__InfluenzaA__AHC57511

SEQ ID NO: 138642 - RNA, 1701 nt, Artificial Sequence; identical to SEQ ID NO: 135830
  derived and/or modified CDS sequence (opt3) from hemagglutinin__InfluenzaA__AHC57523

SEQ ID NO: 138643 - RNA, 1701 nt, Artificial Sequence; identical to SEQ ID NO: 135030
  derived and/or modified CDS sequence (opt3) from hemagglutinin__InfluenzaA__AHC57675

SEQ ID NO: 138644 - RNA, 1701 nt, Artificial Sequence; identical to SEQ ID NO: 135030
  derived and/or modified CDS sequence (opt3) from hemagglutinin__InfluenzaA__AHC57827

SEQ ID NO: 138645 - RNA, 1701 nt, Artificial Sequence; identical to SEQ ID NO: 134903
  derived and/or modified CDS sequence (opt3) from hemagglutinin__InfluenzaA__AHC57956

SEQ ID NO: 138646 - RNA, 1701 nt, Artificial Sequence
  derived and/or modified CDS sequence (opt3) from hemagglutinin__InfluenzaA__AHC57981
augaagaccaucauugcccugagcuacauacucugccuuguguucgcucagaaaauccccggcaacgacaauuccacagcaacucuguguuuggggcaccaugccgucccuaacggaacgauuguuaagaccaucacaaaugaucaaauugaggugacuaacgcgaccgaauuaguacaaaauucuucaacaggugagaucugcgacaguccacaccagauacuggauggcgaaaacuguacccuaaucgacgcucuccugggggauccgcagugcgacggauuucagaauaaaaagugggaucuuuucguggagagaagcaaagccuauuccaacuguuaccccuaugacgucccugauuacgcaucucugaggucguugauugccucaagcggcacucucgaauuuaauaacgagaguuucaauuggacaggugugacccagaacgggacguccucugcuugcauccggcgcagcaauaacuccuuuuucucacgacugaauuggcugacucaucucaacuuuaaguauccagcauuaaacguuaccaugcccaauaacgagcaguucgacaagcuguacauuuggggagugcaccauccuggcacagauaaagaccagaucuuucuuuaugcccaagcuaguggccguauaacugucagcaccaagagaucucagcaggccgugauuccaaauaucggguccaggccccggguacgcaacauuccuucaagaaucagcaucuacuggacaauuguuaaaccaggagauauauugcugaucaauaguaccgguaaccuaauugcgccgaggggcuacuucaagauccggucugggaaauccagcauaaugcgcucggacgcacccauuggaaaguguaauucugaaugcaucacgccuaacggcuccaucccaaaugacaagcccuuucagaacgugaaucgaauuacuuauggugccuguccuagauacgucaaacaaaacacacucaagcuggcuaccgggaugaggaaugugccagagaaacagacucggggaaucuucggcgccauugcaggcuuuauagaaaacgggugggagggaaugguggaugguugguauggcuuccgucaccaaaauucagaggggcgcggacaggcugccgaccuuaagaguacacaggcggccaucgaucagauuaacggcaaccugaauagauugaucgguaaaaccaacgaaaaguuccaccagaucgagaaagaauuuagcgaggucgaagggaggauucaagaccucgagaaguacguugaggauacgaagauagaccugugguccuauaaugcagaauuacugguggcucucgagaaccagcauaccaucgaucuuacagacucugaaaugaauaaacuguucgagaagacuaaaaagcaguugcgggaaaacgccgaggauaugggcaauggaugcuuuaaaauuuaccacaagugugacaacgcuugcaucggcagcauucgaaaugggaccuaugaucaugacguauaccgcgacgaggcccuaaacaauagauuccagaucaagggaguggaacugaaaucagguuacaaggauuggauacucuggaucaguuuugcaauuuccugcuuccugcuuugugucgcccuguugggcuuuaucaugugggcuugccaaaaagggaacauuagguguaauaucugcauauga

SEQ ID NO: 138647 - RNA, 1701 nt, Artificial Sequence; identical to SEQ ID NO: 135830
  derived and/or modified CDS sequence (opt3) from hemagglutinin__InfluenzaA__AHC57993

SEQ ID NO: 138648 - RNA, 1701 nt, Artificial Sequence; identical to SEQ ID NO: 137122
  derived and/or modified CDS sequence (opt3) from hemagglutinin__InfluenzaA__AHC58005

SEQ ID NO: 138649 - RNA, 1701 nt, Artificial Sequence
  derived and/or modified CDS sequence (opt3) from hemagglutinin__InfluenzaA__AHC58017
augaagaccaucauugcccugagcuacauacucugccuuguguucgcucagaaacugcccggcaacgacaauuccacagcaacuuuguguuuagggcaccaugccgucccuaacggaacgaucguuaagaccauuacaaaugaucaaaucgaggugacuaacgcgaccgaacugguacagucuucaaguacaggugagauuugcaauagcccacaccagauccuagacggcgaaaacuguacccucauagaugcucugcuuggggacccgcagugcgauggauuucaaaauaaaaagugggaccuguucguggagagauccaaagcccauucuaacuguuaucccuacgaugucccugacuaugcaucguugaggucacucguggccagcaguggcacucuggaauuuaauaacgaguccuucaauuggacagguguuacccagaacgggacgucuagcgcuugcauccggcgcuccaauaacucauuuuucagucgacugaauuggcucacucacuuaaacuuuaaguacccagcacugaacgugaccaugcccaauaacgagcaguucgauaaacuuuauauuuggggaguccaucacccuggcacagacaaagaucagaucuuuuuguacgcccaagcugccggccguauuacugugagcaccaagagaucucagcaggcgguaaucccaaauauaggguccaggccccggguucgcaacauuccuucaagagugagcaucuauuggacaauugucaaaccaggagacauccugcuaaucaauaguaccgguaaccucauugcaccgaggggcuacuucaagauacggucugggaaauccagcaucaugcgcucggaugcccccauuggaaaguguaauucugcuugcaucacgccuaacggcuccauaccaaaugacaagcccuuucagaacgugaaucgaauuacuuacggugccuguccuagauaugugaaacaaaacacacugaaacuugcaaccgggaugaggaaugucccagaaaagcagacucggggaaucuucggcgcuaucgccggcuuuauugagaacgggugggaaggaaugguugacgguugguacggcuuccgucaccaaaauucagaggggcgcggacaggcggccgaucugaagaguacacaggcagcuaucgaccagauuaacggcaaauugaacagacucauagguaagaccaaugagaaauuccaucagaucgaaaaggaguuuagcgaaguggaggggaggauucaagaucuggaaaaguauguagaggacacgaaaaucgauuuaugguccuacaacgccgagcugcucguggcucuugaaaaucagcacaccaucgaccugacagauucugagaugaacaaguuguucgaaaagacuaagaaacagcuacgggagaaugccgaagacaugggcaacggaugcuuuaagauuuaucauaagugugauaaugcaugcauagucagcauccgaaacggcaccuacgaccacgauguguaucgcgacgaggcccugaauaacagauuccagauuaaagggguugagcucaagucaggauacaaagacuggauccuguggauuaguuuugcuaucuccugcuuccuucuguguguggcguugcucgguuuuauaaugugggcaugccaaaagggcaauaucagguguaacauuugcaucuga

SEQ ID NO: 138650 - RNA, 1701 nt, Artificial Sequence
  derived and/or modified CDS sequence (opt3) from hemagglutinin__InfluenzaA__AHC58029
augaagaccaucauugcccugagcuacauacucugccuuguguucgcucagaaacugcccggcaacgacaauuccacagcaacuuuguguuuagggcaccaugccgucccuaacggaacgaucguuaagaccauuacaaaugaucaaaucgaggugacuaacgcgaccgaacugguacagucuucaaguacaggugagauuugcaauagcccacaccagauccuagacggcgaaaacuguacccucauagaugcucugcuuggggacccgcagugcgauggauuucaaaauaaaaagugggaccuguucguggagagauccaaagcccauucuaacuguuaucccuacgaugucccugacuaugcaucguugaggucacucguggccagcaguggcacucuggaauuuaauaacgaguccuucaauuggacagguguuacccagaacgggacgucuagcgcuugcauccggggauccaauaacucauuuuucagucgccugaauuggcucacucaguuaaacuuuaaguacccagcacugaacgugaccaugcccaauaacgagcaguucgauaagcuguauauuuggggcguccaccauccuggcacagacaaagaucaaaucuuuuuguacgcccaggcuagcgggcgaauuacugugucuaccaagcguucccagcaggccguaaucccaaauauaggaucaagacccaggguucggaacauuccuagccgcgugaguaucuauuggacaauugucaaaccaggugacauccugcuaaucaauucuaccggcaaccucauugcgccgagaggguacuucaagauaagguccggaaaaagcucgaucaugcggucugaugcacccauuggcaaguguaauuccgccugcaucacgccuaacgguucaauaccaaaugacaagcccuuucaaaacgugaaucgcauuacuuacggggcuuguccucgauaugugaaacagaacacacugaaacuugccaccggaaugagaaaugucccagaaaaacagacuaggggcaucuucggcgcaaucgcuggguuuauugagaacggaugggaagguaugguugacggcugguacggguuccggcaccaaaauagugagggacguggccaggccgcggaucuuaagagcacacaggccgcaaucgaccagauuaacgguaaauugaaccgccucauagggaagaccaaugagaaauuccaccaaaucgaaaaggaguuuuccgaaguggagggcaggauucaggaucuggaaaaguauguagaggacacgaaaaucgauuuauggucuuacaacgcugagcugcucguggcccuugaaaaucagcauaccaucgaccugacagauagcgagaugaacaaguuguucgaaaagacuaagaaacagcuaagagagaaugcugaagacaugggaaacggcugcuuuaagauuuaucacaagugugauaaugccugcauagggucaauccggaacggaaccuacgaccaugaugucuaucgagacgaggcacugaauaaccgcuuccaaauuaaagguguggagcucaagaguggcuacaaagacuggauccuguggauuuccuuugccaucagcugcuuccuucuguguguugcuuugcucggguuuauaaugugggcgugccagaagggaaauaucagauguaacauuugcaucuga

SEQ ID NO: 138651 - RNA, 1701 nt, Artificial Sequence
  derived and/or modified CDS sequence (opt3) from hemagglutinin__InfluenzaA__AHC58050
augaagaccaucauugcccugagcuacauacucugccuuguguucgcucagaaacugcccggcaacgacaauuccacagcaacuuuguguuuagggcaccaugccgucccuaacggaacgaucguuaagaccauuacaaaugaucaaaucgaggugacuaacgcgaccgaacugguacagucuucaaguacaggugagauuugcgacagcccacaccagauccuagauggcgaaaauuguacccucauagacgcucugcuuggggauccgcagugcgacggauuucaaaacaaaaagugggaucuguucguggagagauccaaagccuauucuaauuguuaccccuaugacgucccugauuacgcaucguugaggucacucguggccagcaguggcacucuggaauuuaacaaugaguccuucaacuggacagguguuacccagaaugggacgucuagcgcuugcauccggcgcuccaacucaaguuucuuuagccgacugaauuggcucacucauuuaaacuuuaaguauccagcacugaaugugaccaugcccaacaacgagcaguucgacaaacuuuacauuuggggaguccaccauccuggcacagauaaggaccagaucuuuuuguaugcccaaucuuccggccguauuacugugucaaccagaaggagccagcaggcuguaaucccaaauauagggagucggccccgcauuagaaacaucccuucuaggauuuccaucuacuggacaaucguuaagccaggagauauucugcuaauaaauagcaccgguaaccucaucgccccgcggggcuacuucaaaauucgcucggggaagucuuccaucaugcgaucagacgcgcccauaggaaaauguaauagugaaugcauuacgccuaacggcagcaucccaaaugacaagcccuuucagaacgugaauagaaucacuuauggugcauguccuagguacgucaagcaauccacacugaaacuugccaccgggaugcggaacgugccagagaagcagacucguggaauuuucggcgcuaucgccggcuuuauugaaaaugggugggagggaaugguggaugguugguauggcuuccgccaccagaacucugaggggagaggacaagcagcugaccugaaaagcacacaggccgcgauagaucagaucaauggcaaguugaacaggcucauugguaaaaccaaugaaaaguuccaccagaucgagaaagaauuuucagaggucgaagggcggauccaagaccuggagaaguacguugaggauacgaagauugacuuauggaguuauaacgccgaacugcucguggcacuugagaaccagcauaccauagaucugacagacuccgaaaugaauaaauuguucgagaagacuaaaaagcagcuacgagaaaacgcugaggauaugggcaauggaugcuuuaaaaucuaccacaagugugacaacgccugcauuggcagcauccgcaaugggaccuauaaccaugauguauacagagacgaggcucugaauaacagguuccagauuaagggaguggaacucaaaucugguuacaaggacuggauccuguggauaucauuugccaucaguugcuuccuucugugugucgcauugcucggcuuuauuaugugggccugccaaaaagggaauauccgguguaacauuugcaucuga

SEQ ID NO: 138652 - RNA, 1701 nt, Artificial Sequence; identical to SEQ ID NO: 135830
  derived and/or modified CDS sequence (opt3) from hemagglutinin__InfluenzaA__AHC58074

SEQ ID NO: 138653 - RNA, 1701 nt, Artificial Sequence; identical to SEQ ID NO: 135830
  derived and/or modified CDS sequence (opt3) from hemagglutinin__InfluenzaA__AHC58098

SEQ ID NO: 138654 - RNA, 1701 nt, Artificial Sequence; identical to SEQ ID NO: 135830
  derived and/or modified CDS sequence (opt3) from hemagglutinin__InfluenzaA__AHC58110

SEQ ID NO: 138655 - RNA, 1701 nt, Artificial Sequence; identical to SEQ ID NO: 135830
  derived and/or modified CDS sequence (opt3) from hemagglutinin__InfluenzaA__AHC58126

SEQ ID NO: 138656 - RNA, 1701 nt, Artificial Sequence; identical to SEQ ID NO: 135830
  derived and/or modified CDS sequence (opt3) from hemagglutinin__InfluenzaA__AHC58138

SEQ ID NO: 138657 - RNA, 1701 nt, Artificial Sequence; identical to SEQ ID NO: 135830
  derived and/or modified CDS sequence (opt3) from hemagglutinin__InfluenzaA__AHC58162

SEQ ID NO: 138658 - RNA, 1701 nt, Artificial Sequence; identical to SEQ ID NO: 137122
  derived and/or modified CDS sequence (opt3) from hemagglutinin__InfluenzaA__AHC58186

SEQ ID NO: 138659 - RNA, 1701 nt, Artificial Sequence
  derived and/or modified CDS sequence (opt3) from hemagglutinin__InfluenzaA__AHC58198
augaagaccaucauugcccugagcuacauacucugccuuguguucgcucagaaacugcccggcaacgacaauuccacagcaacuuuguguuuagggcaccaugccgucccuaacggaacgaucguuaagaccauuacaaaugaucaaaucgaggugacuaacgcgaccgaacugguacaaaauucuucaacaggugagauuugcgacaguccacaccagauccuagauggcgaaaacuguacccucauagacgcucugcuuggggauccgcagugcgacggauuucagaauaaaaagugggaucuguucguggagagaagcaaagccuauuccaacuguuaccccuaugacgucccugauuacgcaucuuugaggucgcucguggccucaagcggcacucuggaauuuaauaacgagaguuucaauuggacagguguuacccagaacgggacguccucugcuugcauccggcgcagcaauaacuccuuuuucucacgacugaauuggcucacucauuuaaacuuuaaguauccagcacugaacgugaccaugcccaauaacgagcaguucgacaaacuuuacauuuggggaguccaccauccuggcacagauaaggaccagaucuuuuuguaugcccaagcuaguggccguauuacugugagcaccaagagaucucagcaggccguaaucccaaauauaggguccaggccccggguucgcaacauuccuucaagaaucagcauuuacuggacaaucgugaaaccaggagauauccugcuaauuaauaguaccgguaaccucauagcgccgaggggcuacuucaagauccggucugggaaauccagcauuaugcgcucggacgcacccaucggaaaguguaauucugaaugcauaacgccuaacggcuccauuccaaaugacaagcccuuucagaacgucaaucgaaucacuuauggugccuguccuagauacgugaaacaaaacacacugaaacuugcuaccgggaugaggaaugugccagagaagcagacucggggaaucuucggcgccauugcaggcuuuaucgaaaacgggugggagggaauggucgaugguugguauggcuuccgucaccaaaauucagaggggcgcggacaggcugccgaccugaagaguacacaggcggccauugaucagauaaacggcaaauugaacagacucaucgguaagaccaaugaaaaauuccaccagauugagaaggaauuuagcgagguugaagggaggauccaaaaccuggagaaguacguggaggacacgaaaaucgauuuaugguccuauaaugcagaacugcucguagcucuugagaaccagcauaccauugaccugacagauucugaaaugaauaaguuguucgagaaaacuaagaaacagcuacgggaaaacgccgaggacaugggcaauggaugcuuuaagauauaccacaagugugauaacgcuugcaucggcagcauucgaaaugggaccuaugaccaugauguguaccgcgacgaggcccugaacaauagauuccagaucaaaggagucgaacucaagucagguuacaaagacuggauucuguggaucaguuuugcaauauccugcuuccuucuguguguggccuugcucggcuuuaucaugugggauugccaaaaggggaacauuagguguaauaucugcauuuga

SEQ ID NO: 138660 - RNA, 1701 nt, Artificial Sequence
  derived and/or modified CDS sequence (opt3) from hemagglutinin__InfluenzaA__AHC58210
augaagaccaucauugcccugagcuacauacucugccuuguguucgcucagaaacugcccggcaacgacaauuccacagcaacuuuguguuuagggcaccaugccgucccuaacggaacgaucguuaagaccauuacaaaugaucaaaucgaggugacuaacgcgaccgaacugguacaaaauucuucaacaggugagauuugcgacaguccacaccagauccuagauggcgaaaacuguacccucauagacgcucugcuuggggauccgcagugcgacggauuucagaauaaaaagugggaucuguucguggagagaagcaaagccuauuccaacuguuaccccuaugacgucccugauuacgcaucuuugaggucgcucguggccucaagcggcacucuggaauuuaauaacgagaguuucaauugggcugguguuacacagaacgggaccuccucugcaugcauccggcgcagcaauaacuccuuuuucucacgacugaauuggcucacgcauuuaaacuuuaaguauccagcccugaacgugacuaugcccaauaacgagcaguucgacaaacuuuacauuuggggaguccaccauccuggcaccgauaaggaccagaucuuuuuguaugcucaagccaguggccguauuacagugagcacuaagagaucucagcaggcgguaaucccaaauauaggguccaggccccggguucgcaacauuccuucaagaaucagcauuuacuggaccaucgugaaaccaggagauauccugcuaauuaauaguacagguaaccucauagcaccgaggggcuacuucaagauccggucugggaaauccagcauuaugcgcucggacgcccccaucggaaaguguaauucugaaugcauaaccccuaacggcuccauuccaaaugacaagcccuuucagaacgucaaucgaaucacguauggugcuuguccuagauacgugaaacaaaacacucugaaacuugccacagggaugaggaaugugccagagaagcagacccggggaaucuucggcgcaauugcuggcuuuaucgaaaacgggugggagggaauggucgaugguugguauggcuuccgucaccaaaauucagaggggcgcggacaggccgcggaccugaagaguacucaggccgcaauugaucagauaaacggcaaauugaacagacucaucgguaagacaaaugaaaaauuccaccagauugagaaggaauuuagcgagguugaagggaggauccaagaccuggagaaguacguggaggauaccaaaaucgacuuaugguccuauaacgcugaacugcucguagcccuugagaaucagcauacgauugaucugaccgacucugaaaugaacaaguuguucgagaaaacaaagaaacagcuacgggaaaaugcugaggauaugggcaacggaugcuuuaagauauaccacaagugugacaaugccugcaucggcagcauucgaaacgggacuuaugaucaugacguguaccgcgacgaggcacugaauaacagauuccagaucaaaggagucgaacucaagucagguuacaaagauuggauucuguggaucaguuuugccauauccugcuuccuucuguguguggcuuugcucggcuuuaucaugugggcgugccaaaaggggaauauuagguguaacaucugcauuuga

SEQ ID NO: 138661 - RNA, 1701 nt, Artificial Sequence; identical to SEQ ID NO: 135030
  derived and/or modified CDS sequence (opt3) from hemagglutinin__InfluenzaA__AHC58234

SEQ ID NO: 138662 - RNA, 1701 nt, Artificial Sequence; identical to SEQ ID NO: 135830
  derived and/or modified CDS sequence (opt3) from hemagglutinin__InfluenzaA__AHC58246

SEQ ID NO: 138663 - RNA, 1701 nt, Artificial Sequence; identical to SEQ ID NO: 135030
  derived and/or modified CDS sequence (opt3) from hemagglutinin__InfluenzaA__AHC58258

SEQ ID NO: 138664 - RNA, 1701 nt, Artificial Sequence; identical to SEQ ID NO: 134903
  derived and/or modified CDS sequence (opt3) from hemagglutinin__InfluenzaA__AHC58270

SEQ ID NO: 138665 - RNA, 1701 nt, Artificial Sequence
  derived and/or modified CDS sequence (opt3) from hemagglutinin__InfluenzaA__AHC58372
augaagaccaucauugcccugagcuacauacucugccuuguguucgcucagaaacugcccggcaacgacaauuccacagcaacuuuguguuuagggcaccaugccgucccuaacggaacgaucguuaagaccauuacaaaugaucaaaucgaggugacuaacgcgaccgaacugguacagucuucaaguacaggugagauuugcgacagcccacaccagauccuagauggcgaaaauuguacccucauagacgcucugcuuggggauccgcagugcgacggauuucaaaacaaaaagugggaucuguucguggagagauccaaagccuauucuaauuguuaccccuaugacgucccugauuacgcaucguugaggucacucguggccagcaguggcacucuggaauuuaacaaugaguccuucaacuggacagguguuacccagaaugggacgucuagcgcuugcauccggcgcuccaacucaaguuucuuuagccgacugaauuggcucacucauuuaaacuuuaaguauccagcacugaaugugaccaugcccaacaacgagcaguucgacaagcuguacauuuggggaguccaccauccuggcacagauaaagaccagaucuuuuuguaugcccaaucuuccggccguauuacugugucaaccaagagaagccagcaggcuguaacaccaaauaucgggaguaggccccggauacgcaacauuccuucuagaaucuccauuuacuggaccaucguuaaaccaggagauauccugcuaauuaauagcacggguaaccucauagccccgaggggcuacuucaagauccggucggggaaaucuuccauuaugcgcucagacgcgcccaucggaaaguguaauagugaaugcauaacuccuaacggcagcauuccaaaugacaagcccuuucagaacgugaaucgaaucacauauggugcauguccuagauacgucaaacaauccacccugaaacuugccacugggaugaggaacgugccagagaagcagacacggggaaucuucggcgcuauugccggcuuuaucgaaaaugggugggagggaaugguggaugguugguauggcuuccgucaccagaacucugaggggcgcggacaagcagcugaccuuaagagcacccaggccgcgauugaucagauaaauggcaaauugaacagacucaucgguaagacgaaugaaaaauuccaccagauugagaaggaauuuucagaggucgaagggaggauccaagaccuggagaaguacguugaggauaccaaaaucgacuuauggaguuauaacgccgaacugcucguggcacuugagaaccagcauacaauugaucugacugacuccgaaaugaauaaguuguucgagaaaaccaagaaacagcuacgggaaaacgcugaggauaugggcaauggaugcuuuaagauauaccacaagugugacaacgccugcaucggcagcauucgaaaugggacauauaaccaugauguauaccgcgacgaggcucugaauaacagauuccagaucaaaggaguggaacucaagucugguuacaaagacuggauucuguggaucucauuugccauaaguugcuuccuucugugugucgcauugcucggcuuuaucaugugggccugccaaaaggggaauauuagguguaacaucugcauuuga

SEQ ID NO: 138666 - RNA, 1701 nt, Artificial Sequence
  derived and/or modified CDS sequence (opt3) from hemagglutinin__InfluenzaA__AHC58396
augaagaccaucauugcccugagcuacauacucugccuuguguucgcucagaaacugcccggcaacgacaauuccacagcaacuuuguguuuagggcaccaugccgucccuaacggaacgaucguuaagaccauuacaaaugaucaaaucgaggugacuaacgcgaccgaacugguacagucuucaaguacaggugagauuugcaauagcccacaccagauccuagacggcgaaaacuguacccucauagaugcucugcuuggggacccgcagugcgauggauuucaaaauaaaaagugggaccuguucguggagagauccaaagcccauucuaacuguuaucccuacgaugucccugacuaugcaucguugaggucacucguggccagcaguggcacucuggaauuuaauaacgaguccuucaauuggacagguguuacccagaacgggacgucuagcgcuugcauccggggauccaauaacucauuuuucagucgccugaauuggcucacucacuuaaacuuuaaguacccagcacugaacgugaccaugcccaauaacgagcaguucgauaagcuguauauuuggggcguccaucacccuggcacagacaaagaucagaucuuuuuguacgcccaagcuagcgggcgaauuacugugucuaccaagcguucccagcaggccguaaucccaaauauaggaucaagacccaggguucggaacauuccuagccgcgugaguaucuauuggacaauugucaaaccaggugacauccugcuaaucaauucuaccggcaaccucauugcgccgagaggguacuucaagauaagguccggaaaaagcucgaucaugcggucugaugcacccauuggcaaguguaauuccgccugcaucacgccuaacgguucaauaccaaaugacaagcccuuucagaacgugaaucgcauuacuuacggggcuuguccucgauaugugaaacaaaacacacugaaacuugccaccggaaugagaaaugucccagaaaaacagacuaggggcaucuucggcgcaaucgcuggguuuauugagaacggaugggaagguaugguugacggcugguacggguuccggcaccagaauagugagggacguggccaagccgcggaucuuaagagcacacaggccgcaaucgaccagauuaacgguaaauugaaccgccucauagggaagaccaaugagaaauuccaucagaucgaaaaggaguuuuccgaaguggagggcaggauucaagaucuggaaaaguauguagaggacacgaaaaucgauuuauggucuuacaacgcugagcugcucguggcccuugaaaaucagcacaccaucgaccugacagauagcgagaugaacaaguuguucgaaaagacuaagaaacagcuaagagagaaugcugaagacaugggaaacggcugcuuuaagauuuaucauaagugugauaaugccugcauagggucaauccggaacggaaccuacgaccacgaugucuaucgagacgaggcacugaauaaccgcuuccagauuaaagguguggagcucaagaguggcuacaaagacuggauccuguggauuuccuuugccaucagcugcuuccuucuguguguugcuuugcucggguuuauaaugugggcgugccaaaagggaaauaucagauguaacauuugcaucuga

SEQ ID NO: 138667 - RNA, 1701 nt, Artificial Sequence; identical to SEQ ID NO: 135830
  derived and/or modified CDS sequence (opt3) from hemagglutinin__InfluenzaA__AHC58408

SEQ ID NO: 138668 - RNA, 1701 nt, Artificial Sequence; identical to SEQ ID NO: 137122
  derived and/or modified CDS sequence (opt3) from hemagglutinin__InfluenzaA__AHC58420

SEQ ID NO: 138669 - RNA, 1701 nt, Artificial Sequence; identical to SEQ ID NO: 137122
  derived and/or modified CDS sequence (opt3) from hemagglutinin__InfluenzaA__AHC58432

SEQ ID NO: 138670 - RNA, 1701 nt, Artificial Sequence; identical to SEQ ID NO: 135030
  derived and/or modified CDS sequence (opt3) from hemagglutinin__InfluenzaA__AHC58444

SEQ ID NO: 138671 - RNA, 1701 nt, Artificial Sequence; identical to SEQ ID NO: 138666
  derived and/or modified CDS sequence (opt3) from hemagglutinin__InfluenzaA__AHC58456

SEQ ID NO: 138672 - RNA, 1701 nt, Artificial Sequence
  derived and/or modified CDS sequence (opt3) from hemagglutinin__InfluenzaA__AHC58468
augaaggccauccuggugguccuccuuuacaccuucgcuacagcaaacgccgacacucugugcauuggcuaucacgcgaauaacagcacggauaccguugacacaguguuggagaaaaauguaacugugacccauuccgucaacuuacuggaagauaagcacaaugggaaacuauguaagcucagaggaguggcuccccugcaucuugguaaaugcaacauagccggcuggauccuggggaauccugagugugaaucuuugucaacagcaaguagcugguccuacauuguugagaccucuucgucagacaacggaacuugcuauccaggcgauuuuaucaauuacgaggagcucagggagcagcugagcaguguguccucuuucgaacgguuugagauuuucccgaagacaagcuccuggcccaaccacgacucaaauaagggugucaccgccgcuuguccucaagcaggggccaaaaguuuuuauaagaaccugaucuggcucgugaaaaagggaaauagcuacccaaaauuaucuaaguccuauauaaacgauaagggcaaagaaguacugguucuuuggggcauccaucaccccucaacgagcgcugaccagcagaguuuguaccagaaugccgaugcguacguguucgucgggacuucuaaguauuccaaaaaguuuaaaccugagauugcagugcgcccaaaggugcgagaccaagagggacguaugaacuacuauuggacccuggucgaacccggugauaaaaucacauucgaggccacuggcaaccuacucguuccuagauacgcuuuugccauggaaaggaaugcagggagcggaauuaucauaucggacaccccagugcacgauugcaacacaaccugucagacgccgaagggcgcuauuaauacuucucugcccuuccagaacauccauccuauuacaaucgguaagugcccaaaauauguaaaguccaccaaacuucggcuggccacuggguugcgcaaugugcccucaauccagaguagaggacucuuuggcgcgauugccggcuucauagaagggggauggacagguauggucgacggcugguacggguaucaccaucaaaacgcacagggaagcggcuacgcugccgaccugaaguccacccagaaugcuaucgauaaaauuacgaacaagguuaauucugugaucgaaaagaugaacacccaguuuacagccguggguaaagaguucaaucacuuagagaggcggauagaaaaccugaauaagaaagucgacgauggguuccucgacauuuggacuuacaacgcagagcuucugguguugcuagaaaaugagcgcacccuggauuaucacgacagcaacguaaagaaccucuacgaaaaaguucgaucacaacugaagaauaacgccaaggagaucggcaauggauguuuugaguucuaucauaaaugcgauaacacauguauggaaagugugaagaauggcacuuacgacuauccuaaauacuccgaggaagcuaaacuuaacagagaggaaaucgauggggucaagcuggagagcaccaggauuuaucagaucuuggcgauuuacucuacaguggcaucaagucucguccuggugguuagcuuaggagccauauccuuuuggaugugcucuaaugguucgcugcagugccggaucuguauuuga

SEQ ID NO: 138673 - RNA, 1701 nt, Artificial Sequence
  derived and/or modified CDS sequence (opt3) from hemagglutinin__InfluenzaA__AHC58479
augaagaccaucauugcccugagcuacauacucugccuuguguucgcucagaaacugcccggcaacgacaauuccacagcaacuuuguguuuagggcaccaugccgucccuaacggaacgaucguuaagaccauuacaaaugaucaaaucgaggugacuaacgcgaccgaacugguacaaaauucuucaacaggugagauuugcgacaguccacaccagaucauagauggcgaaaacuguacccuaaucgacgcucuccugggggauccgcagugcgacggauuucagaauaaaaagugggaucuuuucguggagagaagcaaagccuauuccaacuguuaccccuaugacgucccugauuacgcaucucugaggucguugguggccucaagcggcacucucgaauuuaauaacgagaguuucaauuggacagguguuacccagaacgggacguccucugcuugcauucggcgcagcaauaacuccuuuuucucacgacugaauuggcugacucaucucaacuuuaaguauccagcauuaaacgugaccaugcccaauaacgagcaguucgacaagcuguacaucuggggaguccaccauccuggcacagauaaagaccagauuuuucuuuaugcccaagcuaguggccguaucacugugagcaccaagagaucucagcaggccguaauaccaaauauuggguccaggccccggguucgcaacaucccuucaagaauuagcaucuacuggacaaucgugaaaccaggagauauuuugcugauaaauaguaccgguaaccuaaucgcgccgaggggcuacuucaagauucggucugggaaauccagcaucaugcgcucggacgcacccauaggaaaguguaauucugaaugcauuacgccuaacggcuccaucccaaaugacaagcccuuucagaacgucaaucgaaucacuuauggugccuguccuagauacgugaaacaaaacacacucaagcuggcuaccgggaugaggaaugugccagagaaacagacucggggaauuuucggcgccaucgcaggcuuuauugaaaacgggugggagggaauggucgaugguugguauggcuuccgucaccaaaauucagaggggcgcggacaggcugccgaccuuaagaguacacaggcggccauaaaccagaucaacggcaaacugaauagauugauugguaagaccaacgaaaaauuccaccagaucgagaaggaauuuagcgagguugaagggaggauccaagaucucgagaaguacguggaggacacgaaaauugaucugugguccuauaaugcagaauuacugguagcucucgagaaccagcauaccauagaccuuacagauucugaaaugaauaagcuguucgagaaaacuaagaaacaguugcgggaaaacgccgaggacaugggcaauggaugcuuuaagaucuaccacaagugugauaacgcuugcauuggcagcauccgaaaugggaccuaugaccaugauguguaccgcgacgaggcccuaaacaauagauucaaaauuaagggagucgaacugaaaucagguuacaaggacuggauccucuggauaaguuuugcaaucuccugcuuccugcuuuguguggcccuguugggcuuuauuaugugggcuugccagaaagggaacaucagguguaauauuugcaucuga

SEQ ID NO: 138674 - RNA, 1701 nt, Artificial Sequence; identical to SEQ ID NO: 138666
  derived and/or modified CDS sequence (opt3) from hemagglutinin__InfluenzaA__AHC58491

SEQ ID NO: 138675 - RNA, 1701 nt, Artificial Sequence; identical to SEQ ID NO: 135030
  derived and/or modified CDS sequence (opt3) from hemagglutinin__InfluenzaA__AHC58515

SEQ ID NO: 138676 - RNA, 1701 nt, Artificial Sequence; identical to SEQ ID NO: 135830
  derived and/or modified CDS sequence (opt3) from hemagglutinin__InfluenzaA__AHC58527

SEQ ID NO: 138677 - RNA, 1701 nt, Artificial Sequence
  derived and/or modified CDS sequence (opt3) from hemagglutinin__InfluenzaA__AHC58563
augaagaccaucauugcccugagcuacauacucugccuuguguucgcucagaaacugcccggcaacgacaauuccacagcaacuuuguguuuagggcaccaugccgucccuaacggaacgaucguuaagaccauuacaaaugaucaaaucgaggugacuaacgcgaccgaacugguacaaaauucuucaacaggugagauuugcgacaguccacaccagaucauagauggcgaaaacuguacccuaaucgacgcucuccugggggauccgcagugcgacggauuucagaauaaaaagugggaucuuuucguggagagaagcaaagccuauuccaacuguuaccccuaugacgucccugauuacgcaucucugaggucguugguggccucaagcggcacucucgaauuuaauaacgagaguuucaauuggacagguguuacccagaacgggacguccucugcuugcauucggcgcagcaauaacuccuuuuucucacgacugaauuggcugacucaucucaacuuuaaguauccagcauuaaacgugaccaugcccaauaacgagcaguucgacaagcuguacaucuggggaguccaccauccuggcacagauaaagaccagauuuuucuuuaugcccaagcuaguggccguaucacugugagcaccaagagaucucagcaggccguaauaccaaauauuggguccaggccccggguucgcaacaucccuucaagaauuagcaucuacuggacaaucgugaaaccaggagauauuuugcugauaaauaguaccgguaaccuaaucgcgccgaggggcuacuucaagauucggucugggaaauccagcaucaugcgcucggacgcacccauaggaaaguguaauucugaaugcauuacgccuaacggcuccaucccaaaugacaagcccuuucagaacgucaaucgaaucacuuauggugccuguccuagauacgugaaacaaaacacacucaagcuggcuaccgggaugaggaaugugccagagaaacagacucggggaauuuucggcgccaucgcaggcuuuauugaaaacgggugggagggaauggucgaugguugguauggcuuccgucaccaaaauucagaggggcgcggacaggcugccgaccuuaagaguacacaggcggccauagaucagaucaacggcaaacugaacagauugauugguaagaccaaugaaaaauuccaccagaucgagaaggaauuuagcgagguugaagggaggauccaagaccucgagaaguacguggaggauacgaaaauugaccugugguccuauaacgcagaauuacugguagcucucgagaaucagcauaccauagaucuuacagacucugaaaugaacaagcuguucgagaaaacuaagaaacaguugcgggaaaaugccgaggauaugggcaacggaugcuuuaagaucuaccacaagugugacaaugcuugcauuggcagcauccgaaacgggaccuaugaucaugacguguaccgcgacgaggcccuaaauaacagauuccagauuaaaggagucgaacugaagucagguuacaaagauuggauccucuggauaaguuuugcaaucuccugcuuccugcuuuguguggcccuguugggcuuuauuaugugggcuugccaaaaggggaauaucagguguaacauuugcaucuga

SEQ ID NO: 138678 - RNA, 1701 nt, Artificial Sequence; identical to SEQ ID NO: 135830
  derived and/or modified CDS sequence (opt3) from hemagglutinin__InfluenzaA__AHC58575

SEQ ID NO: 138679 - RNA, 1701 nt, Artificial Sequence; identical to SEQ ID NO: 134903
  derived and/or modified CDS sequence (opt3) from hemagglutinin__InfluenzaA__AHC58587

SEQ ID NO: 138680 - RNA, 1701 nt, Artificial Sequence; identical to SEQ ID NO: 135030
  derived and/or modified CDS sequence (opt3) from hemagglutinin__InfluenzaA__AHC58599

SEQ ID NO: 138681 - RNA, 1701 nt, Artificial Sequence; identical to SEQ ID NO: 135830
  derived and/or modified CDS sequence (opt3) from hemagglutinin__InfluenzaA__AHC58611

SEQ ID NO: 138682 - RNA, 1701 nt, Artificial Sequence; identical to SEQ ID NO: 135830
  derived and/or modified CDS sequence (opt3) from hemagglutinin__InfluenzaA__AHC58623

SEQ ID NO: 138683 - RNA, 1701 nt, Artificial Sequence; identical to SEQ ID NO: 135830
  derived and/or modified CDS sequence (opt3) from hemagglutinin__InfluenzaA__AHC58647

SEQ ID NO: 138684 - RNA, 1701 nt, Artificial Sequence; identical to SEQ ID NO: 135030
  derived and/or modified CDS sequence (opt3) from hemagglutinin__InfluenzaA__AHC58659

SEQ ID NO: 138685 - RNA, 1701 nt, Artificial Sequence; identical to SEQ ID NO: 134903
  derived and/or modified CDS sequence (opt3) from hemagglutinin__InfluenzaA__AHC58671

SEQ ID NO: 138686 - RNA, 1701 nt, Artificial Sequence; identical to SEQ ID NO: 137122
  derived and/or modified CDS sequence (opt3) from hemagglutinin__InfluenzaA__AHC58683

SEQ ID NO: 138687 - RNA, 1701 nt, Artificial Sequence; identical to SEQ ID NO: 134903
  derived and/or modified CDS sequence (opt3) from hemagglutinin__InfluenzaA__AHC58695

SEQ ID NO: 138688 - RNA, 1701 nt, Artificial Sequence; identical to SEQ ID NO: 137122
  derived and/or modified CDS sequence (opt3) from hemagglutinin__InfluenzaA__AHC58707

SEQ ID NO: 138689 - RNA, 1701 nt, Artificial Sequence; identical to SEQ ID NO: 137122
  derived and/or modified CDS sequence (opt3) from hemagglutinin__InfluenzaA__AHC58719

SEQ ID NO: 138690 - RNA, 1701 nt, Artificial Sequence; identical to SEQ ID NO: 138666
  derived and/or modified CDS sequence (opt3) from hemagglutinin__InfluenzaA__AHC58731

SEQ ID NO: 138691 - RNA, 1701 nt, Artificial Sequence
  derived and/or modified CDS sequence (opt3) from hemagglutinin__InfluenzaA__AHC58743
augaagaccaucauugccuggagcuacauacugugccucguguucgcucagaaacuucccggcaacgacaauuccacagcaacucuguguuuggggcaccaugccgucccuaacggaacgaucguuaagaccauuacaaaugaucaaaucgaggugacuaacgcgaccgaauuaguacaaaauucuucaacaggugagauuugcgacaguccacaccagauccuggauggcgaaaacuguacccuaauagacgcucuccugggggauccgcagugcgacggauuucagaauaaaaagugggaucuuuucguggagagaagcaaagccuauuccaacuguuaccccuaugacgucccugauuacgcaucucugaggucguugguggccucaagcggcacucucgaauuuaauaacgagaguuucaauuggacagguguuacccagaacgggacguccucugcuugcauccggcgcagcaauaacuccuuuuucucacgacugaauuggcugacucaucucaacuuuaaguauccagcauuaaacgugaccaugcccaauaacgagcaguucgacaagcuguacauuuggggaguccaccauccuggcacagauaaagaccagaucuuucuuuaugcccaagcuaguggccguauuacugugagcaccaagagaucucagcaggccguaaucccaaauauaggguccaggccccggguucgcaacauuccuucaagaaucagcauuuacuggacaaucgugaaaccaggagauaucuugcugauuaauaguaccgguaaccuaauagcgccgaggggcuacuucaagauccggucugggaaauccagcauuaugcgcucggacgcacccaucggaaaguguaauucugaaugcauaacgccuaacggcuccauuccaaaugacaagcccuuucagaacgucaaucgaaucacuuauggugccuguccuagauacgugaaacaaaacacacucaagcuggcuaccgggaugaggaaugugccagagaaacagacucggggaaucuucggcgccauugcaggcuuuaucgaaaacgggugggagggaauggucgaugguugguauggcuuccgucaccaaaauucagaggggcgcggacaggcugccgaccuuaagaguacacaggcggccauugaucagauaaacggcaaacugaacagauugaucgguaagaccaaugaaaaauuccaccagauugagaaggaauuuagcgagguugaagggaggauccaagaccucgagaaguacguggaggauacgaaaaucgaccugugguccuauaacgcagaauuacugguagcucucgagaaucagcauaccauugaucuuacagacucugaaaugaacaagcuguucgagaaaacuaagaaacaguugcgggaaaaugccgaggauaugggcaacggaugcuuuaagauauaccacaagugugacaaugcuugcaucggcagcauucgaaacgggaccuaugaucaugacguguaccgcgacgaggcccuaaauaacagauuccagaucaaaggagucgaacugaagucagguuacaaagauuggauucucuggaucaguuuugcaauauccugcuuccugcuuuguguggcccuguugggcuuuaucaugugggcuugccaaaaggggaauauuagguguaacaucugcauuuga

SEQ ID NO: 138692 - RNA, 1701 nt, Artificial Sequence; identical to SEQ ID NO: 138666
  derived and/or modified CDS sequence (opt3) from hemagglutinin__InfluenzaA__AHC58755

SEQ ID NO: 138693 - RNA, 1701 nt, Artificial Sequence; identical to SEQ ID NO: 134903
  derived and/or modified CDS sequence (opt3) from hemagglutinin__InfluenzaA__AHC58779

SEQ ID NO: 138694 - RNA, 1701 nt, Artificial Sequence; identical to SEQ ID NO: 138665
  derived and/or modified CDS sequence (opt3) from hemagglutinin__InfluenzaA__AHC58791

SEQ ID NO: 138695 - RNA, 1701 nt, Artificial Sequence
  derived and/or modified CDS sequence (opt3) from hemagglutinin__InfluenzaA__AHC58803
augaagaccaucauugcccugagcuacauacucugccuuguguucgcucagaaacugcccggcaacgacaauuccacagcaacuuuguguuuagggcaccaugccgucccuaacggaacgaucguuaagaccauuacaaaugaucaaaucgaggugacuaacgcgaccgaacugguacaaaauucuucaacaggugagauuugcgacaguccacaccagaucauagauggcgaaaacuguacccuaaucgacgcucuccugggggauccgcagugcgacggauuucagaauaaaaagugggaucuuuucguggagagaagcaaagccuauuccaacuguuaccccuaugacgucccugauuacgcaucucugaggucguugguggccucaagcggcacucucgaauuuaauaacgagaguuucaauuggacagguguuacccagaacgggacguccucugcuugcauucggcgcagcaauaacuccuuuuucucacgacugaauuggcugacucaucucaacuuuaaguauccagcauuaaacgugaccaugcccaauaacgagcaguucgacaagcuguacaucuggggaguccaccauccuggcacagauaaagaccagauuuuucuuuaugcccaagcuaguggccguaucacugugagcaccaagagaucucagcaggccguaauaccaaauauuggguccaggccccggguucgcaacaucccuucaagaauuagcaucuacuggacaaucgugaaaccaggagauauuuugcugauaaauaguaccgguaaccuaaucgcgccgaggggcuacuucaagauucggucugggaaauccagcaucaugaagucggacgcacccauaggaaaguguaauucugaaugcauuacgccuaacggcuccaucccaaaugacaaacccuuucagaacgucaaucgcaucacuuauggugccuguccucgauacgugaagcaaaacacacucaaacuggcuaccgggaugagaaaugugccagagaagcagacuaggggaauuuucggcgccaucgcaggcuuuauugaaaacgggugggagggaauggucgaugguugguauggcuuccggcaccaaaauucagaggggcguggacaggcugccgaccuuaaaaguacacaggcggccauagaucagaucaacggcaagcugaaccgcuugauugguaaaaccaaugaaaaguuccaccagaucgagaaggaauuuagcgagguugaagggagaauccaagaccucgagaaauacguggaggauacgaagauugaccugugguccuauaacgcagaauuacugguagcucucgagaaucagcauaccauagaucuuacagacucugaaaugaacaaacuguucgagaagacuaaaaagcaguugagggaaaaugccgaggauaugggcaacggaugcuuuaagaucuaccacaaaugugacaaugcuugcauuggcagcauccggaacgggaccuaugaucaugacguguaccgagacgaggcccuaaauaaccgcuucaagauuaaaggagucgaacugaagucagguuacaaagauuggauccucuggauaaguuuugcaaucuccugcuuccugcuuuguguggcccuguugggcuuuauuaugugggcuugccagaaggggaauaucagauguaacauuugcaucuga

SEQ ID NO: 138696 - RNA, 1701 nt, Artificial Sequence
  derived and/or modified CDS sequence (opt3) from hemagglutinin__InfluenzaA__AHC58815
augaagaccaucauugcccugagcuacauacucugccuuguguucgcucagaaacugcccggcaacgacaauuccacagcaacuuuguguuuagggcaccaugccgucccuaacggaacgaucguuaagaccauuacaaaugaucaaaucgaggugacuaacgcgaccgaacugguacagucuucaaguacaggugagauuugcaauagcccacaccagauccuagacggcgggaacuguacccucauagaugcucugcuuggagacccgcagugcgauggcuuucaaaauaaaaagugggaccuguucguggaaagauccaaagccuauucuaacuguuaccccuaugaugucccugacuacgcaucguugaggucacucguggccagcagugguacucuggaguuuaauaacgaauccuucaauuggacagggguuacccagaacggaacgucuagcgcuugcauccggcgcuccaauaacucauuuuucagucgacugaauuggcucacucauuuaaacuuuaaguauccagcacugaacgugaccaugcccaauaacgagcaguucgauaagcuguacauuuggggcguccaccauccuggcacagacaaagaucagaucuuuuuguaugcccaagcuagcgggcguauuacugugucuaccaagagaucccagcaggccguaaucccaaauauaggaucaaggccccggguucgcaacauuccuagcagaaucaguauuuacuggacaaucgugaaaccaggugacauccugcuaauuaauucuaccggcaaccucauagcgccgaggggguacuucaagauccgguccggaaaaagcucgauuaugcgcucugaugcacccaucggcaaguguaauuccgagugcauaacgccuaacgguucaauuccaaaugacaagcccuuucagaacgucaaucgaaucacuuauggggccuguccuagauacgugaaacaaaacacacugaaacuugcuaccggaaugaggaaugugccagaaaaacagacucggggcaucuucggcgccauugcaggguuuaucgagaacggaugggaagguauggucgacggcugguauggguuccgucaccagaauagugagggacgcggccaagcugccgaucuuaagagcacacaggcggccauugaccagauaaacgguaaauugaacagacucaucgggaagaccaaugagaaauuccaccagauugaaaaggaguuuuccgaaguugagggcaggauccaagaucuggaaaaguacguggaggacacgaaaaucgauuuauggucuuauaacgcagagcugcucguagcucuugaaaaucagcauaccauugaccugacagauagcgagaugaacaaguuguucgaaaagacuaagaaacagcuacgggagaaugccgaagacaugggaaacggcugcuuuaagauauaccacaagugugauaaugcuugcaucgggucaauucgaaacggaaccuaugaccauaauguguaccgcgaugaggcccugaacaauagauuccagaucaaaggugucgagcucaagaguggcuacaaagacuggauucuguggaucuccuuugcaauaagcugcuuccuucuguguguggccuugcucggguuuaucaugugggcuugccaaaagggaaacauuagguguaauaucugcauuuga

SEQ ID NO: 138697 - RNA, 1701 nt, Artificial Sequence; identical to SEQ ID NO: 134903
  derived and/or modified CDS sequence (opt3) from hemagglutinin__InfluenzaA__AHC58827

SEQ ID NO: 138698 - RNA, 1701 nt, Artificial Sequence; identical to SEQ ID NO: 135830
  derived and/or modified CDS sequence (opt3) from hemagglutinin__InfluenzaA__AHC58839

SEQ ID NO: 138699 - RNA, 1701 nt, Artificial Sequence
  derived and/or modified CDS sequence (opt3) from hemagglutinin__InfluenzaA__AHC58863
augaagaccaucauugcccugagcuacauacucugccuuguguucgcucagaaacugcccggcaacgacaauuccacagcaacuuuguguuuagggcaccaugccgucucuaacggaacgaucguuaagaccauuacaaaugaucaaaucgaggugacuaacgcgaccgaacugguacagucaaguagcacaggugagauuugcaauuccccucaccagauccuagacggcgaaaacuguacccucauagaugcucugcuuggggacccacagugcgauggauuucaaaauaaaaagugggaccuguucguggagagaucuaaagcccauucgaacuguuauccguacgauguccccgacuaugcaucauugaggagccucguggccaguuccggcacucuggaauuuaauaacgagucuuucaauuggacagguguuacccagaacgggacgagcuccgcuugcauccggggaucaaauaacagcuuuuucagucgccugaauuggcucacucacuuaaacuuuaaguacccugcacugaacgugaccaugccaaauaacgagcaguucgauaaacuuuauauuuggggcguccaucaccccggcacagacaaagaucagaucuuuuuguacgcccaggcuucugggcgaauuacuguguccaccaagcguucacaacaggccguaaucccuaauauaggaagcagaccaaggguucggaacauucccagucgcgugucuaucuauuggacaauugucaaaccuggugacauccugcuaaucaauuccaccggcaaccucauugcgccaagaggguacuucaagauaaggagcggaaaaucgucuaucaugcgguccgaugcaccgauuggcaaguguaauucagccugcaucacgcccaacgguaguauaccuaaugacaagccauuucagaacgugaaucgcauuacuuacggggcuuguccccgauaugugaaacaaaacacacugaaacuugccaccggaaugagaaaugucccugaaaagcagacuaggggcaucuucggcgcaaucgcuggguuuauugagaacggaugggaagguaugauggacggcugguacggguuccggcaccagaauagcgagggacguggccaagccgcggaucugaaguccacacaggccgcaaucgaccagauuaacgguaaauugaaccgccucauagggaagaccaaugagaaauuccaucagaucgaaaaggaguuuucugaaguugagggcaggauucaagaucuggaaaaguauguggaggacacgaaaaucgauuuauggagcuacaacgcugagcugcucguagcccuugaaaaucagcacaccaucgaccugacagauucagagaugaacaaguuguucgaaaagacuaagaaacagcuaagagagaaugcugaagacaugggaaacggcugcuuuaagauuuaucauaagugugauaaugccugcauagggaguauccggaacggaaccuacgaccacgauguguaucgagacgaggcacugaauaaccgcuuccagauuaaaggugucgagcucaaguccggcuacaaagacuggauccuguggauuagcuuugccaucucuugcuuccuucuguguguggcuuugcucggguuuauaaugugggcgugccaaaagggaaauaucagauguaacauuugcaucuga

SEQ ID NO: 138700 - RNA, 1701 nt, Artificial Sequence; identical to SEQ ID NO: 134903
  derived and/or modified CDS sequence (opt3) from hemagglutinin__InfluenzaA__AHC58875

SEQ ID NO: 138701 - RNA, 1701 nt, Artificial Sequence; identical to SEQ ID NO: 135830
  derived and/or modified CDS sequence (opt3) from hemagglutinin__InfluenzaA__AHC58887

SEQ ID NO: 138702 - RNA, 1701 nt, Artificial Sequence; identical to SEQ ID NO: 138666
  derived and/or modified CDS sequence (opt3) from hemagglutinin__InfluenzaA__AHC58899

SEQ ID NO: 138703 - RNA, 1701 nt, Artificial Sequence; identical to SEQ ID NO: 135830
  derived and/or modified CDS sequence (opt3) from hemagglutinin__InfluenzaA__AHC58981

SEQ ID NO: 138704 - RNA, 1701 nt, Artificial Sequence; identical to SEQ ID NO: 135830
  derived and/or modified CDS sequence (opt3) from hemagglutinin__InfluenzaA__AHC58993

SEQ ID NO: 138705 - RNA, 1701 nt, Artificial Sequence; identical to SEQ ID NO: 135830
  derived and/or modified CDS sequence (opt3) from hemagglutinin__InfluenzaA__AHC59005

SEQ ID NO: 138706 - RNA, 1701 nt, Artificial Sequence
  derived and/or modified CDS sequence (opt3) from hemagglutinin__InfluenzaA__AHC59017
augaagaccaucauugcccugagcuacauacucugccuuguguucgcucagaaacugcccggcaacgacaauuccacagcaacuuuguguuuagggcaccaugccgucccuaacggaacgaucguuaagaccauuacaaaugaucaaaucgaggugacuaacgcgaccgaacugguacagucuucaaguacaggugagauuugcaauagcccacaccagauccuagacggcgaaaacuguacccucauagaugcucugcuuggggacccgcagugcgauggauuucaaaauaaaaagugggaccuguucguggagagauccaaagcccauucuaacuguuaucccuacgaugucccugacuaugcaucguugaggucacucguggccagcaguggcacucuggaauuuaauaacgaguccuucaauuggacagguguuacccagaacgggacgucuagcgcuugcauccggggauccaauaacucauuuuucagucgccugaauuggcucacucacuuaaacuuuaaguacccagcacugaacgugaccaugcccaauaacgagcaguucgauaagcuguauauuuggggcguccaucacccuggcacagacaaagaucagaucuuuuuguacgcccaagcuagcgggcgaauuacugugucuaccaagcguucccagcaggccguaaucccaaauauaggaucaagacccaggguucggaacauuccuagccgcgugaguaucuauuggacaauugucaaaccaggugacauccugcuaaucaauucuaccggcaaccucauugcgccgagaggguacuucaagauaagguccggaaaaagcucgaucaugcggucugaugcacccauuggcaaguguaauuccgccugcaucacgccuaacgguucaauaccaaaugacaagcccuuucagaacgugaaucgcauuacuuacggggcuuguccucgauaugugaaacaaaacacacugaaacuugccaccggaaugagaaaugucccagaaaaacagacuaggggcaucuucggcgcaaucgcuggguuuauugagaacggaugggaagguaugguugacggcugguacggguuccggcaccagaauagugagggacguggccaagccgcggaucuuaagagcacacaggccgcaaucgaccagauuaacgguaaauugaaccgccucauagggaagaccaaugagaaauuccaucagaucgaaaaggaguuuuccgaaguggagggcaggauucaagaucuggaaaaguauguagaggacacgaaaaucgauuuauggucuuacaacgcugagcugcucguggcccuugaaaaucagcacaccaucgaccugacagauagcgagaugucaaaguuguucgaaaagacuaagaaacagcuaagagagaacgcugaagacaugggaaauggcugcuuuaagauuuaucauaagugugauaacgccugcauagggaguauccggaauggaaccuacgaccacgaugucuaucgagacgaggcacugaacaaucgcuuccagauuaaagguguggagcucaaguccggcuacaaagacuggauccuguggauuagcuuugccaucucuugcuuccuucuguguguugcuuugcucggguuuauaaugugggcgugccaaaagggaaacaucagauguaauauuugcaucuga

SEQ ID NO: 138707 - RNA, 1701 nt, Artificial Sequence; identical to SEQ ID NO: 138666
  derived and/or modified CDS sequence (opt3) from hemagglutinin__InfluenzaA__AHC59029

SEQ ID NO: 138708 - RNA, 1701 nt, Artificial Sequence; identical to SEQ ID NO: 135030
  derived and/or modified CDS sequence (opt3) from hemagglutinin__InfluenzaA__AHC59041

SEQ ID NO: 138709 - RNA, 1701 nt, Artificial Sequence
  derived and/or modified CDS sequence (opt3) from hemagglutinin__InfluenzaA__AHC59053
augaagaccaucauugcccugagcuacauacucugccuuguguucgcucagaaacugcccggcaacgacaauuccacagcaacuuuguguuuagggcaccaugccgucccuaacggaacgaucguuaagaccauuacaaaugaucaaaucgaggugacuaacgcgaccgaacugguacagucuucaaguacaggugagauuugcaauagcccacaccagauccuagacggcgaaaacuguacccucauagaugcucugcuuggggacccgcagugcgauggauuucaaaauaaaaagugggaccuguucguggagagauccaaagcccauucuaacuguuaucccuacgaugucccugacuaugcaucguugaggucacucguggccagcaguggcacucuggaauuuaauaacgaguccuucaauuggacagguguuacccagaacgggacgucuagcgcuugcauccggcgcuccaauaacucauuuuucagucgacugaauuggcucacucacuuaaacuuuaaguacccagcacugaacgugaccaugcccaauaacgagcaguucgauaaacuuuauauuuggggaguccaucacccuggcacagacaaagaucagaucuuuuuguacgcccaagcugccggccguauuacugugagcaccaagagaucucagcaggcgguaaucccaaauauaggguccaggccccggguucgcaacauuccuucaagagugagcaucuauuggacaauugucaaaccaggagacauccugcuaaucaauaguaccgguaaccucauugcaccgaggggcuacuucaagauacagucugggaaauccagcaucaugcggucggaugcccccauuggaaaguguaauucugcuugcaucacgccuaacggcuccauaccaaaugacaagcccuuucaaaacgugaaucgcauuacuuacggugccuguccucgauaugugaaacagaacacacugaaacuugcaaccgggaugagaaaugucccagaaaagcagacuaggggaaucuucggcgcuaucgccggcuuuauugagaacgggugggaaggaaugguugacgguugguacggcuuccggcaccaaaauucagaggggcguggacaggcggccgaucugaagaguacacaggcagcuaucgaccagauuaacggcaaauugaaccgccucauagguaagaccaaugagaaauuccaucaaaucgaaaaggaguuuagcgaaguggaggggaggauucaggaucuggaaaaguauguagaggacacgaaaaucgauuuaugguccuacaacgccgagcugcucguggcucuugaaaaucagcacaccaucgaccugacagauucugagaugaacaaguuguucgaaaagacuaagaaacagcuaagagagaaugccgaagacaugggcaacggaugcuuuaagauuuaucauaagugugauaaugcaugcauaggcagcauccggaacgggaccuacgaccacgaugucuaucgagacgaggcccugaauaaccgcuuccaaauuaaaggaguggagcucaagucagguuacaaagacuggauccuguggauuaguuuugcuaucuccugcuuccuucuguguguugcguugcucggcuuuauaauguggacaugccagaaggggaauaucagauguaacauuugcaucuga

SEQ ID NO: 138710 - RNA, 1701 nt, Artificial Sequence
  derived and/or modified CDS sequence (opt3) from hemagglutinin__InfluenzaA__AHC59077
augaagaccaucauugcccugagcuacauacucugccuuguguucgcucagaaacugcccggcaacgacaauuccacagcaacuuuguguuuagggcaccaugccgucccuaacggaacgaucguuaagaccauuacaaaugaucaaaucgaggugacuaacgcgaccgaacugguacaaaauucuucaacaggugagauuugcgacaguccacaccagauccuagauggcgaaaacuguacccucauagacgcucugcuuggggauccgcagugcgacggauuucagaauaaaaagugggaucuguucguggagagaagcaaagccuauuccaacuguuaccccuaugacgucccugauuacgcaucuuugaggucgcucguggccucaagcggcacucuggaauuuaauaacgagaguuucaauuggacagguguuacccagaacgggacguccucugcuugcauccggcgcagcaauaacuccuuuuucucacgacugaauuggcucacucauuuaaacuuuaaguauccagcacugaacgugaccaugcccaauaacgagcaguucgacaaacuuuacauuuggggaguccaccauccuggcacagauaaggaccagaucuuuuuguaugcccaagcuaguggccguauuacugugagcaccaagagaucucagcaggccguaaucccaaauauaggguccaggccccggguucgcaacauuccuucaagaaucagcauuuacuggacaaucgugaaaccaggagauauccugcuaauuaauaguaccgguaaccucauagcgccgaggggcuacuucaagauccggucugggaaauccagcauuaugcgcucggacgcacccaucggaaaguguaauucugaaugcauaacgccuaacggcuccauuccaaaugacaagcccuuucagaacgucaaucgaaucacuuauggugccuguccuagauacgugaaacaaaacacacugaaacuugcuaccgggaugaggaaugugccagagaagcagacucggggaaucuucggcgccauugcaggcuuuaucgaaaacgggugggagggaauggucgaugguugguauggcuuccgucaccaaaauucagaggggcgcggacaggcugccgaccugaagaguacacaggcggccauugaucagauaaacggcaaauugaacagacucaucgguaagaccaaugaaaaauuccaccagauugagaaggaauuuagcgagguugaagggaggauccaagaccuggagaaguacguggaggauacgaaaaucgacuuaugguccuauaacgcagaacugcucguagcucuugagaaucagcauaccauugaucugacagacucugaaaugaacaaguuguucgagaaaacuaagaaacagcuacgggaaaaugccgaggauaugggcaacggaugcuuuaagauauaccacaagugugacaaugcuugcaucggcagcauucgaaacgggaccuaugaucaugacguguaccgcgacgaggcccugaauaacagauuccagaucaaaggagucgaacucaagucagguuacaaagauuggauucuguggaucaguuuugcaauauccugcuuccuucugugugugguuuugcucggcuuuaucaugugggccugccaaaaggggaauauuagguguaacaucugcauuuga

SEQ ID NO: 138711 - RNA, 1701 nt, Artificial Sequence; identical to SEQ ID NO: 137122
  derived and/or modified CDS sequence (opt3) from hemagglutinin__InfluenzaA__AHC59089

SEQ ID NO: 138712 - RNA, 1701 nt, Artificial Sequence; identical to SEQ ID NO: 135830
  derived and/or modified CDS sequence (opt3) from hemagglutinin__InfluenzaA__AHC59101

SEQ ID NO: 138713 - RNA, 1701 nt, Artificial Sequence; identical to SEQ ID NO: 135030
  derived and/or modified CDS sequence (opt3) from hemagglutinin__InfluenzaA__AHC59113

SEQ ID NO: 138714 - RNA, 1701 nt, Artificial Sequence; identical to SEQ ID NO: 135830
  derived and/or modified CDS sequence (opt3) from hemagglutinin__InfluenzaA__AHC59125

SEQ ID NO: 138715 - RNA, 1701 nt, Artificial Sequence
  derived and/or modified CDS sequence (opt3) from hemagglutinin__InfluenzaA__AHC59137
augaagaccaucauugcccugagcuacauacucugccuuguguucgcucagaaaauccccggcaacgacaauuccacagcaacucuguguuuggggcaccaugccgucucuaacggaacgauuguuaagaccaucacaaaugaucaaauugaggugacuaacgcgaccgaauuaguacagucaaguagcacaggugagaucugcaauuccccucaccagauacuggacggcgaaaacuguacccuaaucgaugcucuccugggggacccacagugcgauggauuucaaaauaaaaagugggaccuuuucguggagagaucuaaagcccauucgaacuguuauccguacgauguccccgacuaugcaucacugaggagcuugguggccaguuccggcacucucgaauuuaauaacgagucuuucaauuggacagguguuacccagaacgggacgagcuccgcuugcauucggggaucaaauaacagcuuuuucagucgccugaauuggcugacucaccucaacuuuaaguacccugcauuaaacgugaccaugccaaauaacgagcaguucgauaagcuguauaucuggggcguccaucaccccggcacagacaaagaucagauuuuucuuuacgcccaggcuucugggcgaaucacuguguccaccaagcguucacaacaggccguaauaccuaauauuggaagcagaccaaggguucggaacauccccagucgcgugucuauuuauuggacaaucgucaaaccuggugacaucuugcugauuaauuccaccggcaaccuaauagcgccaagaggguacuucaagaucaggagcggaaaaucgucuauuaugcgguccgaugcaccgaucggcaaguguaauucagccugcauaacgcccaacgguaguauuccuaaugacaagccauuucagaacgugaaucgcaucacuuacggggcuuguccccgauaugugaaacaaaacacacucaagcuggccaccggaaugagaaaugucccugaaaaacagacuaggggcaucuucggcgcaauugcuggguuuaucgagaacggaugggaagguaugauggacggcugguacggguuccggcaccagaauagcgagggacguggccaagccgcggaucuuaaguccacacaggccgcaauugaccagauaaacgguaaacugaaccgcuugaucgggaagaccaaugagaaauuccaucagauugaaaaggaguuuucugaaguugagggcagaauccaagaucucgaaaaguauguggaggacacgaaaaucgaucuguggagcuacaacgcugaguuacugguagcccucgaaaaucagcacaccauugaccuuacagauucagagaugaacaagcuguucgagaaaacuaagaaacaguugagggaaaaugcugaagacaugggaaacggcugcuuuaagauauaucauaagugugauaaugccugcaucgggaguauucggaacggaaccuacgaccacgauguguaucgagacgaggcacuaaauaaccgcuuccagaucaaaggugucgagcugaaguccggcuacaaagacuggauucucuggaucagcuuugccauaucuugcuuccugcuuuguguggcucuguugggguuuaucaugugggcgugccaaaagggaaauauuagauguaacaucugcauuuga

SEQ ID NO: 138716 - RNA, 1701 nt, Artificial Sequence; identical to SEQ ID NO: 135030
  derived and/or modified CDS sequence (opt3) from hemagglutinin__InfluenzaA__AHC59149

SEQ ID NO: 138717 - RNA, 1701 nt, Artificial Sequence
  derived and/or modified CDS sequence (opt3) from hemagglutinin__InfluenzaA__AHC59185
augaagaccaucauugcccugagcuacauacucugccuuguguucgcucagaaacugcccggcaacgacaauuccacagcaacuuuguguuuagggcaccaugccgucccuaacggaacgaucguuaagaccauuacaaaugaucaaaucgaggugacuaacgcgaccgaacugguacagucuucaaguacaggugagauuugcgacagcccacaccagauccuagauggcgaaaauuguacccucauagacgcucugcuuggggauccgcagugcgacggauuucaaaacaaaaagugggaucuguucguggagagauccaaagccuauucuaauuguuaccccuaugacgucccugauuacgcaucguugaggucacucguggccagcaguggcacucuggaauuuaacaaugaguccuucaacuggacagguguuacccagaaugggacgucuagcgcuugcauccggcgcuccaacucaaguuucuuuagccgacugaauuggcucacucauuuaaacuuuaaguauccagcacugaaugugaccaugcccaacaacgagcaguucgacaagcuguacauuuggggaguccaccauccuggcacagauaaagaccagaucuuuuuguaugcccaaucuuccggccguauuacugugucaaccaagagaagccagcaggcuguaaucccaaauauagggaguaggccccggauucgcaacaucccuucuagaauuuccaucuacuggacaaucguuaaaccaggagauauucugcuaauaaauagcaccgguaaccucaucgccccgaggggcuacuucaagauucggucggggaaaucuuccaucaugcgcucagacgcgcccauaggaaaguguaauagugaaugcauuacgccuaacggcagcaucccaaaugacaagcccuuucagaacgugaaucgaaucacuuauggugcauguccuagauacgucaaacaauccacacugaaacuugccaccgggaugaggaacgugccagagaagcagacucggggaauuuucggcgcuaucgccggcuuuauugaaaaugggugggagggaaugguggaugguugguauggcuuccgucaccagaacucugaggggcgcggacaagcagcugaccuuaagagcacacaggccgcgauagaucagaucaauggcaaauugaacagacucauugguaagaccaaugaaaaauuccaccagaucgagaaggaauuuucagaggucgaagggaggauccaagaccuggagaaguacguugaggauacgaaaauugacuuauggaguuauaacgccgaacugcucguggcacuugagaaccagcauaccauagaucugacagacuccgaaaugaauaaguuguucgagaaaacuaagaaacagcuacgggaaaacgcugaggauaugggcaauggaugcuuuaagaucuaccacaagugugacaacgccugcauuggcagcauccgaaaugggaccuaugaucauaacguauaccgcgacgaggcucugaauaacagauuccagauuaaaggaguggaacucaagucugguuacaaagacuggauccuguggauaucauuugccaucaguugcuuccuucugugugucgcauugcucggcuuuauuaugugggccugccaaaaggggaauaucagguguaacauuugcaucuga

SEQ ID NO: 138718 - RNA, 1701 nt, Artificial Sequence; identical to SEQ ID NO: 134903
  derived and/or modified CDS sequence (opt3) from hemagglutinin__InfluenzaA__AHC59197

SEQ ID NO: 138719 - RNA, 1701 nt, Artificial Sequence
  derived and/or modified CDS sequence (opt3) from hemagglutinin__InfluenzaA__AHC59209
augaagaccaucauugcccugagcuacauacucugccuuguguucgcucaggagauccccggcaacgacaauuccacagcaacucuguguuuggggcaccaugccgucccuaacggaacgauuguuaaaaccaucacaaaugaucaaauugaagugacuaacgcgaccgaguuaguacagucuucaaguacaggugaaaucugcaauagcccacaccagauacuggacggcgagaacuguacccuaaucgaugcucuccugggggacccgcagugcgaugacuuucaaaauaagaaaugggaucuuuucguggaaagauccaaggcccauucuaacuguuaucccuacgacgucccugauuaugcaucgcugaggucauugguggccagcaguggaacucucgaguuuaauaacgaguccuucaauuggacaggcguuacccagaacgguacgucuagcgcuugcauucggcgcuccaauaacucauuuuucagucgacugaauuggcugacucaccucaacuuuaaauacccagcauuaaacgugaccaugcccaauaacgaacaguucgacaagcuguauaucuggggaguccaucacccugggacagauaaggaccagauuuuucuuuacgcccaagcuagcggccguaucacugugucuaccaaaagaucccagcaggccguaauaccaaauauuggcucaaggccccggguucgcaacaucccuagcagagugaguauuuauuggacaaucgucaagccaggggauaucuugcugauuaauucuaccggaaaccuaauagcgccgagggguuacuucaaaauccgguccggcaagagcucgauuaugcgcucugacgcacccaucggggaguguaauuccgccugcauaacgccuaacggaucaauuccaaaugacaaacccuuucagaacgugaaucgaaucacuuacggcgcuuguccuagauaugugaagcaaaacacacucaagcuggccaccgguaugaggaaugucccagaaaaacagacucgggggaucuucggagcaauugcuggcuuuaucgagaacggcugggaggggaugguugauggaugguacgguuuccgucaccagaauagugaaggccgcgggcaagccgcggaccuuaagagcacacaggccgcaauugaucagauaaacggaaaacugaacagauugaucggcaagaccaaugagaaauuccaucagauugaaaaggaguuuuccgaaguggaggguaggauccaagaccucgagaaauauguagaagauacgaagaucgaccuguggucuuacaacgcugaguuacugguggcccucgaaaaucagcacaccauugaucuuacagacagcgagaugaacaagcuguucgagaaaacuaagaaacaguugcgggaaaaugcugaggauauggggaacggcugcuuuaagauauaucauaaaugugacaaugccugcaucggaucaauucgaaacggcaccuacgaucacgcagucuaucgcgacgaagcccuaaauaacagauuccagaucaaggggguggagcugaagaguggauacaaagacuggauucucuggaucuccuuugcuauaagcugcuuccugcuuuguguugcgcuguuggguuuuaucaugugggcaugccaaaagggcaauauuagguguaacaucugcauuuga

SEQ ID NO: 138720 - RNA, 1701 nt, Artificial Sequence; identical to SEQ ID NO: 135030
  derived and/or modified CDS sequence (opt3) from hemagglutinin__InfluenzaA__AHC59221

SEQ ID NO: 138721 - RNA, 1701 nt, Artificial Sequence; identical to SEQ ID NO: 138699
  derived and/or modified CDS sequence (opt3) from hemagglutinin__InfluenzaA__AHC59245

SEQ ID NO: 138722 - RNA, 1701 nt, Artificial Sequence; identical to SEQ ID NO: 138666
  derived and/or modified CDS sequence (opt3) from hemagglutinin__InfluenzaA__AHC59257

SEQ ID NO: 138723 - RNA, 1701 nt, Artificial Sequence; identical to SEQ ID NO: 135830
  derived and/or modified CDS sequence (opt3) from hemagglutinin__InfluenzaA__AHC59269

SEQ ID NO: 138724 - RNA, 1701 nt, Artificial Sequence; identical to SEQ ID NO: 138666
  derived and/or modified CDS sequence (opt3) from hemagglutinin__InfluenzaA__AHC59281

SEQ ID NO: 138725 - RNA, 1701 nt, Artificial Sequence; identical to SEQ ID NO: 135030
  derived and/or modified CDS sequence (opt3) from hemagglutinin__InfluenzaA__AHC59293

SEQ ID NO: 138726 - RNA, 1701 nt, Artificial Sequence
  derived and/or modified CDS sequence (opt3) from hemagglutinin__InfluenzaA__AHC59305
augaagaccaucauugcccugagcuacauacucugccuuguguucgcucagaaacugcccggcaacgacaauuccacagcaacuuuguguuuagggcaccaugccgucccuaacggaacgaucguuaagaccauuacaaaugaucaaaucgaggugacuaacgcgaccgaacugguacagucuucaaguacaggugagauuugcagcuccccacaccagauccuagacggcgaaaauuguacccucauagaugcucugcuuggggacccgcagugcgauggauuucaaaacaaaaagugggaccuguucguggagagaucuaaagcccauucgaauuguuaucccuacgaugucccugacuaugcaucauugaggagccucguggccaguuccggcacucuggaauuuaacaaugagucuuucaacuggacagguguuacccagaaugggacgagcuccgcuugcauccggcgcucaaacaauagcuuuuucagucgacugaacuggcucacucacuuaaauuuuaaguacccagcacugaacgugaccaugcccaacaaugagcaguucgauaaacuuuauauuuggggaguccaucacccuggcacagacaaagaucagaucuuuuuguacgcccaggcuucuggccguauuacuguguccaccaagagaucacaacaggccguaaucccaaacauagggagcaggccccggguucgcaauauuccuaguagagugucuaucuauuggacaauugucaaaccaggagacauccugcuaaucaacuccaccgguaaucucauugcgccgaggggcuacuucaagauacggagcgggaaaucgucuaucaugcgcuccgaugcacccauuggaaaguguaacucagccugcaucacgccuaauggcaguauaccaaacgacaagcccuuucagaaugugaaccgaauuacuuacggugcuuguccuagauaugugaaacaaaauacacugaaacuugccaccgggaugaggaacgucccagaaaagcagacucggggaaucuucggcgcaaucgcuggcuuuauugagaaugggugggaaggaaugguugacgguugguacggcuuccgucaccagaacagcgaggggcgcggacaagccgcggaucugaaguccacacaggccgcaaucgaccagauuaauggcaaauugaacagacucauagguaagaccaacgagaaauuccaucagaucgaaaaggaguuuucugaaguggaggggaggauucaagaucuggaaaaguauguagaggacacgaaaaucgauuuauggagcuacaaugcugagcugcucguggcccuugaaaaccagcacaccaucgaccugacagauucagagaugaauaaguuguucgaaaagacuaagaaacagcuacgggagaacgcugaagacaugggcaauggaugcuuuaagauuuaucauaagugugauaacgccugcauaggcaguauccgaaaugggaccuacgaccacgaugucuaucgcgacgaggcacugaacaauagauuccagauuaaaggaguggagcucaaguccgguuacaaagacuggauccuguggauuagcuuugccaucucuugcuuccuucuguguguugcuuugcucggcuuuauaaugugggcgugccaaaaggggaacaucagguguaauauuugcaucuga

SEQ ID NO: 138727 - RNA, 1701 nt, Artificial Sequence
  derived and/or modified CDS sequence (opt3) from hemagglutinin__InfluenzaA__AHC59329
augaagaccaucauugcccugagcuacauacucugccuuguguucgcucagaaacugcccggcaacgacaauuccacagcaacuuuguguuuagggcaccaugccgucccuaacggaacgaucguuaagaccauuacaaaugauagaaucgaggugacuaacgcgaccgaacugguacaaaauucuucaauuggugagaucugcgacaguccacaccagauacuagauggcgaaaacuguacacucaucgacgcucugcuuggggauccgcagugcgacggauuucagaauaaaaagugggaucuguucguggagaggagcaaagccuauuccaacuguuaccccuaugacgucccugauuacgcaucuuugcggucgcucguggccucaagcggcacccuggaauuuaauaacgagaguuucaauuggacugguguuacacaaaacgggaccuccucugcuugcauucgccgaagcaauaacuccuuuuucucacgucugaauuggcucacgcauuuaaacuuuaaguauccagcacugaacgugacuaugcccaauaacgagcaguucgacaaacuuuacaucuggggaguccaccauccuggcaccgaaaaagaucagaucuuuuuguaugcccagaguagcggcagaauuacagugucuacuaagaggucccaacaggcuguaauaccaaauauugggucacggccccgcaucagaaacauuccuagcaggaucaguaucuacuggaccauuguuaaaccaggagacauacugcuaaucaauucuacagguaaccucauugccccgcggggcuacuucaagauccgcuccgggaaaagcucgauaaugcgaucugaugcgcccauuggaaaguguaaguccgagugcaucaccccuaauggcucaaucccaaacgacaaacccuuucagaaugugaacagaauuacguauggugcauguccuagguacgucaagcagaguacucugaaacuugccacagggaugcggaaugugccagaaaagcaaacccguggaaucuucggcgcuauugccggcuuuauagagaacgggugggagggaaugguggacgguugguauggcuuccgccaccagaauagcgaagggagaggacaggcagcugaucugaaauccacucaagccgcgaucgaccagauuaacggcaaguugaauaggcucaucgguaaaacaaacgagaaguuccaccagaucgaaaaggaguuuucugaagucgaggggcggauucaggaucuggagaaauacguugaagacaccaagauagauuuauggagcuauaacgccgagcugcucguggcacuugaaaaucaacauacgaucgaccugaccgauucagagaugaacaaauuguucgaaaagacaaagaagcagcuacgagagaaugcugaggacaugggcaacggaugcuuuaagauuuaccacaaaugugauaaugccugcaucggcaguauucgcaacgggacuuaugaccaugauguauacagagacgaagcucugaauaacagguuccagaucaagggaguggagcucaaauccgguuacaaggacuggauacuguggaucagcuuugccauuucuugcuuccuucugugugucgcauugcucggcuuuaucaugugggccugccagaaagggaauauucgguguaacaucugcauauga

SEQ ID NO: 138728 - RNA, 1701 nt, Artificial Sequence; identical to SEQ ID NO: 137122
  derived and/or modified CDS sequence (opt3) from hemagglutinin__InfluenzaA__AHC59341

SEQ ID NO: 138729 - RNA, 1701 nt, Artificial Sequence; identical to SEQ ID NO: 138666
  derived and/or modified CDS sequence (opt3) from hemagglutinin__InfluenzaA__AHC59365

SEQ ID NO: 138730 - RNA, 1701 nt, Artificial Sequence
  derived and/or modified CDS sequence (opt3) from hemagglutinin__InfluenzaA__AHC59377
augaagaccaucauugcccugagcuacauacucugccuuguguucgcucagaaacugcccggcaacgacaauuccacagcaacuuuguguuuagggcaccaugccgucccuaacggaacgguugugaagaccaucacaaaugaucaaauugagguaacuaacgcgaccgaacuggugcaaaauucuucaacaggugagaucugcgacaguccacaccagauucuagauggcgaaaacuguacccucaucgacgcucugcuuggggauccgcagugcgacggauuucagaauaaaaagugggaucuguucgucgagagaagcaaagccuauuccaacuguuaccccuaugacgugccugauuacgcaucuuugaggucgcucguugccucaagcggcacucuggaauuuaauaacgagaguuucaauuggacaggugugacccagaacgggacguccucugcuugcauacggcgcagcaauaacuccuuuuucucacgacugaauuggcucacucauuuaaacuuuaaguauccagcacugaacgucaccaugcccaauaacgagcaguucgacaaguuguacaucuggggagugcaccauccuggcacagauaaagaccagauuuuucuuuaugcccaagcuaguggccguaucacuguaagcaccaagagaucucagcaggccguuauuccaaauaucggguccaggccccgggugcgcaacauaccuucaagaauuagcaucuacuggacaauugucaaaccaggagauauccugcuaaucaauaguaccgguaaccucauugcgccgaggggcuacuucaagauacggucugggaaauccagcaucaugcgcucggacgcacccauuggaaaguguaauucugaaugcaucacgccuaacggcuccauaccaaaugacaagcccuuucagaacgugaaucgaauuacuuauggugccuguccuagauacgugaaacaaaacacacugaaacuugcuaccgggaugaggaaugucccagagaagcagacucggggaaucuucggcgccaucgcaggcuuuauugaaaacgggugggagggaaugguugaugguugguauggcuuccgucaccaaaauucagaggggcgcggacaggcugccgaccugaagaguacacaggcggccaucgaucagauuaacggcaaauugaacagacucauagguaagaccaaugaaaaauuccaccagaucgagaaggaauuuagcgagguggaagggaggauucaaaaccuggagaaguacguagaggacacgaaaaucgauuuaugguccuauaaugcagaacugcucguggcucuugagaaccagcauaccaucgaccugacagauucugaaaugaauaaguuguucgagaaaacuaagaaacagcuacgggaaaacgccgaggacaugggcaauggaugcuuuaagauuuaccacaagugugauaacgcuugcauaggcagcauccgaaaugggaccuaugaccaugaugucuaccgcgacgaggcccugaacaauagauuccagauuaaaggaguggaacucaagucagguuacaaagacuggauccuguggauuaguuuugcaaucuccugcuuccuucuguguguugccuugcucggcuuuauaaugugggcuugccaaaaggggaacaucagguguaauauuugcaucuga

SEQ ID NO: 138731 - RNA, 1701 nt, Artificial Sequence; identical to SEQ ID NO: 135030
  derived and/or modified CDS sequence (opt3) from hemagglutinin__InfluenzaA__AHC59413

SEQ ID NO: 138732 - RNA, 1701 nt, Artificial Sequence; identical to SEQ ID NO: 135830
  derived and/or modified CDS sequence (opt3) from hemagglutinin__InfluenzaA__AHC59425

SEQ ID NO: 138733 - RNA, 1701 nt, Artificial Sequence; identical to SEQ ID NO: 137122
  derived and/or modified CDS sequence (opt3) from hemagglutinin__InfluenzaA__AHC59437

SEQ ID NO: 138734 - RNA, 1701 nt, Artificial Sequence
  derived and/or modified CDS sequence (opt3) from hemagglutinin__InfluenzaA__AHC59449
augaagaccaucauugcccugagcuacauacucugccuuguguucgcucagaaacugcccggcaacgacaauuccacagcaacuuuguguuuagggcaccaugccgucccuaacggaacgaucguuaagaccauuacaaaugaucaaaucgaggugacuaacgcgaccgaacugguacagucuucaaguacaggugagauuugcaauagcccacaccagauccuagacggcgaaaacuguacccucauagaugcucugcuuggggacccgcagugcgauggauuucaaaauaaaaagugggaccuguucguggagagauccaaagcccauucuaacuguuaucccuacgaugucccugacuaugcaucguugaggucacucguggccagcaguggcacucuggaauuuaauaacgaguccuucaauuggacagguguuacccagaacgggacgucuagcgcuugcauccggggauccaauaacucauuuuucagucgccugaauuggcucacucacuuaaacuuuaaguacccagcacugaacgugaccaugcccaauaacgagcaguucgauaagcuguauauuuggggcguccaucacccuggcacagacaaagaucagaucuuuuuguacgcccaagcuagcgggcgaauuacugugucuaccaagcguucccagcaggccguaaucccaaauauaggaucaagacccaggguucggaacauuccuagccgcgugaguaucuauuggacaauugucaaaccaggugacauccugcuaaucaauucuaccggcaaccucauugcgccgagaggguacuucaagauaagguccggaaaaagcucgaucaugcggucugaugcacccauuggcaaguguaauuccgccugcaucacgccuaacgguucaauaccaaaugacaagcccuuucagaacgugaaucgcauuacuuacggggcuuguccucgauaugugaaacaaaacacacugaaacuugccaccggaaugagaaaugucccagaaaagcagacuaggggcaucuucggcgcaaucgcuggguuuauugagaacggaugggaagguaugguugacggcugguacggguuccggcaccagaauagugagggacguggccaagccgcggaucuuaagagcacacaggccgcaaucgaccagauuaacgguaaauugaaccgccucauagggagaaccaaugagaaguuccaucagaucgaaaaagaguuuuccgaaguggagggcaggauucaagaucuggaaaaguauguagaggacacgaagaucgauuuauggucuuacaacgcugagcugcucguggcccuugaaaaucagcacaccaucgaccugacagauagcgagaugaacaaauuguucgaaaagacuaaaaagcagcuacgggagaaugcugaagacaugggaaacggcugcuuuaaaauuuaucauaagugugauaaugccugcauagggucaauccgaaacggaaccuacgaccacgaugucuaucgcgacgaggcacugaauaacagauuccagauuaaggguguggagcucaaaaguggcuacaaggacuggauccuguggauuuccuuugccaucagcugcuuccuucuguguguugcuuugcucggguuuauaaugugggcgugccaaaaaggaaauaucagguguaacauuugcaucuga

SEQ ID NO: 138735 - RNA, 1701 nt, Artificial Sequence; identical to SEQ ID NO: 134903
  derived and/or modified CDS sequence (opt3) from hemagglutinin__InfluenzaA__AHC59461

SEQ ID NO: 138736 - RNA, 1701 nt, Artificial Sequence; identical to SEQ ID NO: 138727
  derived and/or modified CDS sequence (opt3) from hemagglutinin__InfluenzaA__AHC59473

SEQ ID NO: 138737 - RNA, 1701 nt, Artificial Sequence; identical to SEQ ID NO: 135030
  derived and/or modified CDS sequence (opt3) from hemagglutinin__InfluenzaA__AHC59485

SEQ ID NO: 138738 - RNA, 1701 nt, Artificial Sequence; identical to SEQ ID NO: 135030
  derived and/or modified CDS sequence (opt3) from hemagglutinin__InfluenzaA__AHC59497

SEQ ID NO: 138739 - RNA, 1701 nt, Artificial Sequence; identical to SEQ ID NO: 134903
  derived and/or modified CDS sequence (opt3) from hemagglutinin__InfluenzaA__AHC59509

SEQ ID NO: 138740 - RNA, 1701 nt, Artificial Sequence; identical to SEQ ID NO: 134903
  derived and/or modified CDS sequence (opt3) from hemagglutinin__InfluenzaA__AHC59521

SEQ ID NO: 138741 - RNA, 1701 nt, Artificial Sequence
  derived and/or modified CDS sequence (opt3) from hemagglutinin__InfluenzaA__AHC59533
augaagaccaucauugcccugagcuacauacucugccuuguguucgcucagaaacugcccggcaacgacaauuccacagcaacuuuguguuuagggcaccaugccgucccuaacggaacgaucguuaagaccauuacaaaugaucaaaucgaggugacuaacgcgaccgaacugguacagucuucaaguacaggugagauuugcaauagcccacaccagauccuagacggcgaaaacuguacccucauagaugcucugcuuggggacccgcagugcgauggauuucaaaauaaaaagugggaccuguucguggagagauccaaagcccauucuaacuguuaucccuacgaugucccugacuaugcaucguugaggucacucguggccagcaguggcacucuggaauuuaagaaugaguccuucaacuggacagguguuacccagaaugggacgucuagcgcuugcauccggcgcuccaacaauucauuuuucagucgacugaacuggcucacucacuuaaauuuuaaguacccagcacugaacgugaccaugcccaacaaugagcaguucgauaaacuuuauauuuggggaguccaucacccuggcacagacaaggaucagaucuuuuuguacgcccaagcuagcggccguauuacugugucuaccaaaagaucccagcaggccguaaucccaaacauagggucaaggccccggguucgcaauauuccuagcagagugaguaucuauuggacaauugucaagccaggagacauccugcuaaucaacucuaccgguaaucucauugcgccgaggggcuacuucaaaauacgguccggaaagagcucgaucaugcgcucugaugcacccauugggaaguguaacuccgccugcaucacgccuaauggcucaauaccaaacgacaaacccuuucagaaugugaaccgaauuacuuacggugcuuguccuagauaugugaagcaaaauacacugaaacuugccaccgggaugaggaacgucccagaaaagcagacucggggaaucuucggcgcaaucgcuggcuuuauugagaaugggugggaaggaaugguugacgguugguacggcuuccgucaccagaacagugaggggcgcggacaagccgcggaucugaaaagcacacaggccgcaaucgaccagauuaauggcaaguugaacagacucauagguaaaaccaacgagaaguuccaucagaucgaaaaggaguuuuccgaaguggaggggaggauucaagaucuggaaaaauauguagaggacacgaagaucgauuuauggucuuacaaugcugagcugcucguggcccuugaaaaccagcacaccaucgaccugacagauagcgagaugaauaaauuguucgaaaagacuaaaaagcagcuacgggagaacgcugaagacaugggcaauggaugcuuuaagauuuaucauaaaugugauaacgccugcauaggcucaauccgaaaugggaccuacgaccacgaugucuaucgcgacgaggcacugaacaauagauuccagauuaagggaguggagcucaaaagugguuacaaggacuggauccuguggauuuccuuugccaucagcugcuuccuucuguguguugcuuugcucggcuuuauaaugugggcgugccaaaaagggaacaucagguguaauauuugcaucuga

SEQ ID NO: 138742 - RNA, 1701 nt, Artificial Sequence; identical to SEQ ID NO: 135030
  derived and/or modified CDS sequence (opt3) from hemagglutinin__InfluenzaA__AHC59545

SEQ ID NO: 138743 - RNA, 1701 nt, Artificial Sequence; identical to SEQ ID NO: 138666
  derived and/or modified CDS sequence (opt3) from hemagglutinin__InfluenzaA__AHC59557

SEQ ID NO: 138744 - RNA, 1701 nt, Artificial Sequence
  derived and/or modified CDS sequence (opt3) from hemagglutinin__InfluenzaA__AHC59569
augaagaccaucauugcccugagcuacauacucugccuuguguucgcucagaaacugcccggcaacgacaauuccacagcaacuuuguguuuagggcaccaugccgucccuaacggaacgaucguuaagaccauuacaaaugaucaaaucgaggugacuaacgcgaccgaacugguacaaaauucuucaacaggugagauuugcgacaguccacaccagauccuagauggcgaaaacuguacccucauagacgcucugcuuggggauccgcagugcgacggauuucagaauaaaaagugggaucuguucguggagagaagcaaagccuauuccaacuguuaccccuaugacgucccugauuacgcaucuuugaggucgcucguggccucaagcggcacucuggaauuuaauaacgagaguuucaauuggacagguguuacccagaacgggacguccucugcuugcauccggcgcagcaauaacuccuuuuucucacgacugaauuggcucacucauuuaaacuuuaaguauccagcacugaacgugaccaugcccaauaacgagcaguucgacaaacuuuacauuuggggaguccaccauccuggcacagauaaggaccagaucuuuuuguaugcccaagcuaguggccguauuacugugagcaccaagagaucucagcaggccguaaucccaaauauaggguccaggccccggguucgcaacauuccuucaagaaucagcauuuacuggacaaucgugaaaccaggagauauccugcuaauuaauaguaccgguaaccucauagcgccgaggggcuacuucaagauccggucugggaaauccagcauuaugcgcucggacgcacccaucggaaaguguaauucugaaugcauaacgccuaacggcuccauuccaaaugacaagcccuuucagaacgucaaucgaaucacuuauggugccuguccuagauacgugaaacaaaacacacugaaacuugcuaccgggaugaggaaugugccagagaagcagacucggggaaucuucggcgccauugcaggcuuuaucgaaaacgggugggagggaaugauggaugguugguauggcuuccgucaccaaaauucagaggggcgcggacaggcugccgaccugaagaguacacaggcggccauugaucagauaaacggcaaauugaacagacucaucgguaagaccaaugaaaaauuccaccagauugagaaggaauuuagcgaggucgaagggaggauccaagaccuggagaaguacguugaggauacgaaaaucgacuuaugguccuauaacgcagaacugcucguggcucuugagaaucagcauaccauugaucugacagacucugaaaugaacaaguuguucgagaaaacuaagaaacagcuacgggaaaaugccgaggauaugggcaacggaugcuuuaagauauaccacaagugugacaaugcuugcaucggcagcauucgaaacgggaccuaugaucaugacguauaccgcgacgaggcccugaauaacagauuccagaucaaaggaguggaacucaagucagguuacaaagauuggauucuguggaucaguuuugcaauauccugcuuccuucugugugucgccuugcucggcuuuaucaugugggcuugccaaaaggggaauauuagguguaacaucugcauuuga

SEQ ID NO: 138745 - RNA, 1701 nt, Artificial Sequence; identical to SEQ ID NO: 135030
  derived and/or modified CDS sequence (opt3) from hemagglutinin__InfluenzaA__AHC59581

SEQ ID NO: 138746 - RNA, 1701 nt, Artificial Sequence; identical to SEQ ID NO: 134903
  derived and/or modified CDS sequence (opt3) from hemagglutinin__InfluenzaA__AHC59593

SEQ ID NO: 138747 - RNA, 1701 nt, Artificial Sequence; identical to SEQ ID NO: 137122
  derived and/or modified CDS sequence (opt3) from hemagglutinin__InfluenzaA__AHC59605

SEQ ID NO: 138748 - RNA, 1701 nt, Artificial Sequence; identical to SEQ ID NO: 135030
  derived and/or modified CDS sequence (opt3) from hemagglutinin__InfluenzaA__AHC59617

SEQ ID NO: 138749 - RNA, 1701 nt, Artificial Sequence; identical to SEQ ID NO: 135030
  derived and/or modified CDS sequence (opt3) from hemagglutinin__InfluenzaA__AHC59629

SEQ ID NO: 138750 - RNA, 1701 nt, Artificial Sequence; identical to SEQ ID NO: 138666
  derived and/or modified CDS sequence (opt3) from hemagglutinin__InfluenzaA__AHC59641

SEQ ID NO: 138751 - RNA, 1701 nt, Artificial Sequence
  derived and/or modified CDS sequence (opt3) from hemagglutinin__InfluenzaA__AHC59653
augaagaccaucauugcccugagcuacauacucugccuuguguucgcucagaaacugcccggcaacgacaauuccacagcaacuuuguguuuagggcaccaugccgucccuaacggaacgaucguuaagaccauuacaaaugaucaaaucgaggugacuaacgcgaccgaacugguacagucuucaaguacaggugagauuugcaauagcccacaccagauccuagacggcgaaaacuguacccucauagaugcucugcuuggggacccgcagugcgauggauuucaaaauaaaaagugggaccuguucguggagagauccaaagcccauucuaacuguuaucccuacgaugucccugacuaugcaucguugaggucacucguggccagcaguggcacucuggaauuuaauaacgaguccuucaauuggacagguguuacccagaacgggacgucuagcgcuugcauccggcgcuccaauaacucauuuuucagucgacugaauuggcucacucacuuaaacuuuaaguacccagcacugaacgugaccaugcccaauaacgagcaguucgauaaacuuuauauuuggggaguccaucacccuggcacagacaaggaucagaucuuuuuguacgcccaagcuagcggccguauuacugugucuacccagagaucccagcaggccguaaucccaaauauagggucaaggccccggguucgcaacauuccuagcagagugaguaucuauuggacaauugucaagccaggagacauccugcuaaucaauucuaccgguaaccucauugcgccgaggggcuacuucaaaauacgguccggaaagagcucgaucaugcgcucugaugcacccauugggaaauguaauuccgccugcaucacgccuaacggcucaauaccaaaugacaagcccuuucaaaacgugaaucgaauuacuuacggugcuuguccuagauaugugaagcagaacacacugaaacuugccaccgggaugaggaaugucccagaaaagcagacucggggaaucuucggcgcaaucgcuggcuuuauugagaacgggugggaaggaaugguugacgguugguacggcuuccgucaccaaaauagugaggggcgcggacaggccgcggaucugaaaagcacacaggccgcaaucgaccagauuaacggcaaguugaacagacucauagguaaaaccaaugagaaguuccaucaaaucgaaaaagaguuuuccgaaguggaggggaggauucaggaucuggaaaaguauguagaggacacgaagaucgauuuauggucuuacaacgcugagcugcucguggcccuugaaaaucagcacaccaucgaccugacagauagcgagaugaacaaauuguucgaaaagacuaaaaagcagcuacgggagaaugcugaagacaugggcaacggaugcuuuaaaauuuaucauaagugugauaaugccugcauaggcucaauccgaaacgggaccuacgaccacgaugucuaucgcgacgaggcacugaauaacagauuccaaauuaagggaguggagcucaaaagugguuacaaggacuggauccuguggauuuccuuugccaucagcugcuuccuucuguguguugcuuugcucggcuuuauaaugugggcgugccagaaagggaauaucagguguaacauuugcaucuga

SEQ ID NO: 138752 - RNA, 1701 nt, Artificial Sequence; identical to SEQ ID NO: 134903
  derived and/or modified CDS sequence (opt3) from hemagglutinin__InfluenzaA__AHC59665

SEQ ID NO: 138753 - RNA, 1701 nt, Artificial Sequence; identical to SEQ ID NO: 135030
  derived and/or modified CDS sequence (opt3) from hemagglutinin__InfluenzaA__AHC59677

SEQ ID NO: 138754 - RNA, 1701 nt, Artificial Sequence; identical to SEQ ID NO: 138751
  derived and/or modified CDS sequence (opt3) from hemagglutinin__InfluenzaA__AHC59689

SEQ ID NO: 138755 - RNA, 1701 nt, Artificial Sequence; identical to SEQ ID NO: 138666
  derived and/or modified CDS sequence (opt3) from hemagglutinin__InfluenzaA__AHC59701

SEQ ID NO: 138756 - RNA, 1701 nt, Artificial Sequence; identical to SEQ ID NO: 134903
  derived and/or modified CDS sequence (opt3) from hemagglutinin__InfluenzaA__AHC59713

SEQ ID NO: 138757 - RNA, 1701 nt, Artificial Sequence; identical to SEQ ID NO: 138677
  derived and/or modified CDS sequence (opt3) from hemagglutinin__InfluenzaA__AHC59737

SEQ ID NO: 138758 - RNA, 1701 nt, Artificial Sequence; identical to SEQ ID NO: 134903
  derived and/or modified CDS sequence (opt3) from hemagglutinin__InfluenzaA__AHC59749

SEQ ID NO: 138759 - RNA, 1701 nt, Artificial Sequence; identical to SEQ ID NO: 135030
  derived and/or modified CDS sequence (opt3) from hemagglutinin__InfluenzaA__AHC59761

SEQ ID NO: 138760 - RNA, 1701 nt, Artificial Sequence; identical to SEQ ID NO: 135030
  derived and/or modified CDS sequence (opt3) from hemagglutinin__InfluenzaA__AHC59773

SEQ ID NO: 138761 - RNA, 1701 nt, Artificial Sequence; identical to SEQ ID NO: 135830
  derived and/or modified CDS sequence (opt3) from hemagglutinin__InfluenzaA__AHC59785

SEQ ID NO: 138762 - RNA, 1701 nt, Artificial Sequence; identical to SEQ ID NO: 135030
  derived and/or modified CDS sequence (opt3) from hemagglutinin__InfluenzaA__AHC59797

SEQ ID NO: 138763 - RNA, 1701 nt, Artificial Sequence; identical to SEQ ID NO: 137122
  derived and/or modified CDS sequence (opt3) from hemagglutinin__InfluenzaA__AHC59809

SEQ ID NO: 138764 - RNA, 1701 nt, Artificial Sequence
  derived and/or modified CDS sequence (opt3) from hemagglutinin__InfluenzaA__AHC59821
augaagaccaucauugcccugagcuacauacucugccuuguguucgcucagaaacugcccggcaacgacaauuccacagcaacuuuguguuuagggcaccaugccgucccuaacggaacgaucguuaagaccauuacaaaugaucaaaucgaggugacuaacgcgaccgaacugguacaaaauucuucaacaggugagauuugcgacaguccacaccagauccuagauggcgaaaacuguacccucauagacgcucugcuuggggauccgcagugcgacggacugcagaauaaaaagugggauuuguuuguggagagaagcaaagccuauuccaacuguuaccccuaugacgucccugauuacgcaucucucaggucgcugguggccucaagcggcacucuggaguucaauaacgaaaguuuuaauuggacagguguuacccagaacgggacguccucugcuugcauccggcgcagcaauaacuccuucuuuucacgacucaauugguuaacucaucugaacuucaaguauccagcacuuaacgugaccaugcccaauaacgagcaguuugacaaguuguacauuuggggaguccaccauccuggcacagauaaagaccagaucuuccuguaugcccaagcuaguggccguauuacugugagcaccaagagaucucagcaggccguaaucccaaauauaggguccaggccccggguucgcaacauuccuucaagaaucagcauuuacuggacaaucgugaaaccaggagauauccuacucauuaauaguaccgguaaccugauagcgccgaggggcuacuuuaagauccggucugggaaauccagcauuaugcgcucggacgcacccaucggaaaguguaauucugaaugcauaacgccuaacggcuccauuccaaaugacaagcccuuccagaacgucaaucgaaucacuuauggugccuguccuagauacgugaaacaaaacacacuuaagcuggcuaccgggaugaggaaugugccagagaaacagacucggggaaucuuuggcgccauugcaggcuucaucgaaaacgggugggagggaauggucgaugguugguauggcuuucgucaccaaaauucagaggggcgcggacaggcugccgacuugaagaguacacaggcggccauugaucagauaaacggcaaacucaacagacugaucgguaagaccaaugaaaaauuccaccagauugagaaggaguucagcgaaguugaagggaggauccaagacuuagagaaguacguggaggauacgaaaaucgaccugugguccuauaacgcagaacuccuuguagcucuggagaaucagcauaccauugauuugacagacucugaaaugaacaagcuaguggagaaaacuaagaaacagcugcgggaaaaugccgaggauaugggcaacggaugcuuuaagauauaccacaagugugacaaugcuugcaucggcagcauucgaaacgggaccuaugaucaugacgucuaccgcgacgaggcccucaauaacagauuccagaucaaaggaguggaacugaagucagguuacaaagauuggauucuuuggaucaguuuugcaauauccugcuuccuguuguguguugcccuccugggcuuuaucaugugggcuugccaaaaggggaauauuagguguaacaucugcauuuga

SEQ ID NO: 138765 - RNA, 1701 nt, Artificial Sequence; identical to SEQ ID NO: 138666
  derived and/or modified CDS sequence (opt3) from hemagglutinin__InfluenzaA__AHC59833

SEQ ID NO: 138766 - RNA, 1701 nt, Artificial Sequence; identical to SEQ ID NO: 138665
  derived and/or modified CDS sequence (opt3) from hemagglutinin__InfluenzaA__AHC59845

SEQ ID NO: 138767 - RNA, 1701 nt, Artificial Sequence; identical to SEQ ID NO: 135830
  derived and/or modified CDS sequence (opt3) from hemagglutinin__InfluenzaA__AHC59857

SEQ ID NO: 138768 - RNA, 1701 nt, Artificial Sequence; identical to SEQ ID NO: 135030
  derived and/or modified CDS sequence (opt3) from hemagglutinin__InfluenzaA__AHC59869

SEQ ID NO: 138769 - RNA, 1701 nt, Artificial Sequence; identical to SEQ ID NO: 135030
  derived and/or modified CDS sequence (opt3) from hemagglutinin__InfluenzaA__AHC59881

SEQ ID NO: 138770 - RNA, 1701 nt, Artificial Sequence; identical to SEQ ID NO: 134903
  derived and/or modified CDS sequence (opt3) from hemagglutinin__InfluenzaA__AHC59892

SEQ ID NO: 138771 - RNA, 1701 nt, Artificial Sequence
  derived and/or modified CDS sequence (opt3) from hemagglutinin__InfluenzaA__AHC59904
augaagaccaucauugcccugagcuacauacucugccuuguguucgcucagaaacugcccggcaacgacaauuccacagcaacuuuguguuuagggcaccaugccgucccuaacggaacgaucguuaagaccauuacaaaugaucaaaucgaggugacuaacgcgaccgaacugguacagucuucaaguacaggugagauuugcaauagcccacaccagauccuagacggcgaaaacuguacccucauagaugcucugcuuggggacccgcagugcgauggauuucaaaauaaaaagugggaccuguucguggagagauccaaagcccauucuaacuguuaucccuacgaugucccugacuaugcaucguugaggucacucguggccagcaguggcacucuggaauuuaauaacgaguccuucaauuggacagguguuacccagaacgggacgucuagcgcuugcauccggggauccaauaacucauuuuucagucgccugaauuggcucacucacuuaaacuuuaaguacccagcacugaacgugaccaugcccaauaacgagcaguucgauaagcuguauauuuggggcguccaucacccuggcacagacaaagaucagaucuuuuuguacgcccaagcuagcgggcgaauuacugugucuaccaagcguucccagcaggccguaaucccaaauauaggaucaagacccaggguucggaacauuccuagccgcgugaguaucuauuggacaauugucaaaccaggugacauccugcuaaucaauucuaccggcaaccucauugcgccgagaggguacuucaagauaagguccggaaaaagcucgaucaugcggucugaugcacccauuggcaaguguaauuccgccugcaucacgccuaacgguucaauaccaaaugacaagcccuuucagaacgugaaucgcauuacuuacggggcuuguccucgauaugugaaacaaaacacacugaaacuugccaccggaaugagaaaugucccagaaaaacagacuaggggcaucuucggcgcaaucgcuggguuuauugagaacggaugggaagguaugauggacggcugguacggguuccggcaccagaauagugagggacguggccaagccgcggaucuuaagagcacacaggccgcaaucgaccagauuaacgguaaauugaaccgccucauagggaagaccaaugagaaauuccaucagaucgaaaaggaguuuuccgaaguugagggcaggauucaagaucuggaaaaguauguggaggacacgaaaaucgauuuauggucuuacaacgcugagcugcucguagcccuugaaaaucagcacaccaucgaccugacagauagcgagaugaacaaguuguucgaaaagacuaagaaacagcuaagagagaaugcugaagacaugggaaacggcugcuuuaagauuuaucauaagugugauaaugccugcauagggucaauccggaacggaaccuacgaccacgauguguaucgagacgaggcacugaauaaccgcuuccagauuaaaggugucgagcucaagaguggcuacaaagacuggauccuguggauuuccuuugccaucagcugcuuccuucuguguguggcuuugcucggguuuauaaugugggcgugccaaaagggaaauaucagauguaacauuugcaucuga

SEQ ID NO: 138772 - RNA, 1701 nt, Artificial Sequence
  derived and/or modified CDS sequence (opt3) from hemagglutinin__InfluenzaA__AHC59915
augaagaccgugaucgcccugagcuacauucucugccuugcuuucgcacagaaacugcccggcaacgacaauuccacagccacuuuguguuuagggcaccaugcggucccuaacggaacgauaguuaagaccaucacaaaugaucaaauugaggugacuaacgcuaccgaacugguacagucuucaaguacaggugagaucugcgacagcccacaccagauucuagauggcgaaaauuguacccucaucgacgcccugcuuggggauccgcagugcgacggauuucaaaacaaaaagugggaucuguucguggagagauccaaagcauauucuaauuguuaccccuaugacgucccugauuacgccucguugaggucacucguggcuagcaguggcacucuggaauuuaacaaugaguccuucaacuggacagguguuacccagaaugggacgucuagcgcaugcauacggcgcuccaacaauucauuuuucagucgacugaacuggcucacucauuuaaauuuuaaguauccagcccugaacgugaccaugcccaacaaugagcaguucgacaagcuguacaucuggggaguccaccauccuggcacagauaaagaccagauuuuucuuuaugcucaagccagcggccguaucacugugucuaccaagagaucccagcaggcgguaauuccaaacaucgggucaaggccccggguucgcaauauaccuagcagaauuaguaucuacuggacaauugugaaaccaggagauauccugcuaaucaacucuaccgguaaucucauugcaccgaggggcuacuucaagauacgguccgggaaaagcucgaucaugcgcucugacgcccccauuggaaaguguaacuccgaaugcaucacgccuaauggcucaauaccaaacgacaagcccuuucagaaugucaaccgaauuacuuauggugcuuguccuagauacgugaaacaaaauacacugaaguuggccaccgggaugaggaacgugccagagaaacagacucggggaaucuucggcgcaaucgcuggcuuuauugaaaaugggugggagggaauggucgaugguugguauggcuuccgucaccagaacagugaggggcgcggacaagccgcggaccuuaagagcacacaggccgcaaucgaucagauuaauggcaaauugaacagacucauagguaagaccaacgaaaaauuccaccagaucgagaaggaauuuuccgagguugaagggaggauucaagaccuggagaaguacguggaggauacgaaaaucgacuuauggucuuauaaugcugaacugcucguagcccuugagaaccagcauaccaucgaucugacagacagcgaaaugaauaaguuguucgagaaaacuaagaaacagcuacgggaaaacgcugaggauaugggcaauggaugcuuuaagauuuaccacaagugugacaacgccugcauaggcucaauccgaaaugggaccuaugaucaugacguguaccgcgacgaggcacugaacaauagauuccagauuaaaggagucgaacucaagagugguuacaaagauuggauccuguggauuuccuuugccaucagcugcuuccuucuguguguggcuuugcucggcuuuauaaugugggcgugccaaaaggggaacaucagguguaauauuugcaucuga

SEQ ID NO: 138773 - RNA, 1701 nt, Artificial Sequence; identical to SEQ ID NO: 135030
  derived and/or modified CDS sequence (opt3) from hemagglutinin__InfluenzaA__AHC59939

SEQ ID NO: 138774 - RNA, 1701 nt, Artificial Sequence
  derived and/or modified CDS sequence (opt3) from hemagglutinin__InfluenzaA__AHC59963
augaagaccaucauugcccugagcuacauacucugccuuguguucgcucagaaacugcccggcaacgacaauuccacagcaacuuuguguuuagggcaccaugccgucccuaacggaacgaucguuaagaccauuacaaaugaucaaaucgaggugacuaacgcgaccgaacugguacagucuucaaguacaggugagauuugcgacagcccacaccagauccuagauggcgaaaauuguacccucauagacgcucugcuuggggauccgcagugcgacggauuucaaaacaaaaagugggaucuguucguggagagauccaaagccuauucuaauuguuaccccuaugacgucccugauuacgcaucguugaggucacucguggccagcaguggcacucuggaauuuaacaaugaguccuucaacuggacagguguuacccagaaugggacgucuagcgcuugcauccggcgcuccaacucaaguuucuuuagccgacugaauuggcucacucauuuaaacuuuaaguauccagcacugaaugugaccaugcccaacaacgagcaguucgacaagcuguacauuuggggaguccaccauccuggcacagauaaagaccagaucuuuuuguaugcccaaucuuccggccguauuacugugucaaccaagagaagccagcaggcuguaaucccaaauauagggaguaggccccggauucgcaacaucccuucuagaauuuccaucuacuggacaaucguuaaaccaggagauauucugcuaauaaauagcaccgguaaccucaucgccccgaggggcuacuucaagauucggucggggaaaucuuccaucaugcgcucagacgcgcccauaggaaaguguaauagugaaugcauuacgccuaacggcagcaucccaaaugacaagcccuuucagaacgugaaucgaaucacuuauggugcauguccuagauacauuaaacaauccacacugaaacuugccaccgggaugaggaacgucccagagaagcagacucggggaaucuucggcgcuauugccggcuuuauagaaaaugggugggagggaaugguggaugguugguauggcuuccgucaccagaacucugaggggcgcggacaagcagcugaccuuaagagcacacaggccgcgaucgaucagauuaauggcaaauugaacagacucaucgguaagaccaaugaaaaauuccaccagaucgagaaggaauuuucagagguggaagggaggauucaagaccuggagaaguacgucgaggauacgaaaauagacuuauggaguuauaacgccgaacugcucguugcacuugagaaccagcauaccaucgaucugacagacuccgaaaugaauaaguuguucgagaaaacuaagaaacagcuacgggaaaacgcugaggauaugggcaauggaugcuuuaagauuuaccacaagugugacaacgccugcaucggcagcauucgaaaugggaccuauaaccaugauguguaccgcgacgaggcucugaauaacagauuccagaucaaaggaguagaacucaagucugguuacaaagacuggauacuguggaucucauuugccauuaguugcuuccuucuguguguggcauugcucggcuuuaucaugugggccugccaaaaggggaauauuagguguaacaucugcauauga

SEQ ID NO: 138775 - RNA, 1701 nt, Artificial Sequence; identical to SEQ ID NO: 134903
  derived and/or modified CDS sequence (opt3) from hemagglutinin__InfluenzaA__AHC59987

SEQ ID NO: 138776 - RNA, 1701 nt, Artificial Sequence; identical to SEQ ID NO: 134903
  derived and/or modified CDS sequence (opt3) from hemagglutinin__InfluenzaA__AHC59999

SEQ ID NO: 138777 - RNA, 1701 nt, Artificial Sequence; identical to SEQ ID NO: 135030
  derived and/or modified CDS sequence (opt3) from hemagglutinin__InfluenzaA__AHC60011

SEQ ID NO: 138778 - RNA, 1701 nt, Artificial Sequence; identical to SEQ ID NO: 134903
  derived and/or modified CDS sequence (opt3) from hemagglutinin__InfluenzaA__AHC60023

SEQ ID NO: 138779 - RNA, 1701 nt, Artificial Sequence; identical to SEQ ID NO: 135830
  derived and/or modified CDS sequence (opt3) from hemagglutinin__InfluenzaA__AHC60035

SEQ ID NO: 138780 - RNA, 1701 nt, Artificial Sequence; identical to SEQ ID NO: 135830
  derived and/or modified CDS sequence (opt3) from hemagglutinin__InfluenzaA__AHC60047

SEQ ID NO: 138781 - RNA, 1701 nt, Artificial Sequence
  derived and/or modified CDS sequence (opt3) from hemagglutinin__InfluenzaA__AHC60059
augaagaccaucauugcccugagcuacauacucugccuuguguucgcucagaaacugcccggcaacgacaauuccacagcaacuuuguguuuagggcaccaugccgucccuaacggaacgaucguuaagaccauuacaaaugaucaaaucgaggugacuaacgcgaccgaacugguacaaaauucuucaacaggugagauuugcgacaguccacaccagauccuagauggcgaaaacuguacccucauagacgcucugcuuggggauccgcagugcgacggauuucagaauaaaaagugggaucuguucguggagagaagcaaagccuauuccaacuguuaccccuaugacgucccugauuacgcaucuuugaggucgcucguggccucaagcggcacucuggaauuuaauaacgagaguuucaauuggacagguguuacccagaacgggacguccucugcuugcauccggcgcagcaauaacuccuuuuucucacgacugaauuggcucacucauuuaaacuuuaaguauccagcacugaacgugaccaugcccaauaacgagcaguucgacaaacuuuacauuuggggaguccaccauccuggcacagauaaagaccagaucuuuuuguaugcccaagcuaguggccguauuacugugagcaccaagagaucucagcaggccguaaucccaaauauaggguccaggccccggguucgcaacauuccuucaagaaucagcauuuacuggacaaucgugaaaccaggagauauccugcuaauuaauaguaccgguaaccucauagcgccgaggggcuacuucaagauccggucugggaaauccagcauuaugcgcucggacgcacccaucggaaaguguaauucugccugcauaacgccuaacggcuccauuccaaaugacaagcccuuucagaacgucaaucgaaucacuuauggugcuuguccuagauacgugaaacaaaacacacugaaacuugccaccgggaugaggaaugugccagaaaagcagacucggggaaucuucggcgcaauugcuggcuuuaucgagaacgggugggaaggaauggucgaugguugguauggcuuccgucaccaaaauucagaggggcgcggacaggccgcggaccugaagaguacacaggccgcaauugaucagauaaacggcaaauugaacagacucaucgguaagaccaaugagaaauuccaccagauugaaaaggaguuuagcgaaguugaggggaggauccaagaccuggaaaaguacguggaggauacgaaaaucgacuuaugguccuauaacgcugagcugcucguagcccuugaaaaucagcauaccauugaucugacagacucugagaugaacaaguuguucgaaaagacuaagaaacagcuacgggagaaugcugaagauaugggcaacggaugcuuuaagauauaccacaagugugacaaugccugcaucggcagcauucgaaacgggaccuauaaucaugauguguaccgcgacgaggcacugaacaauagauuccagaucaaaggagucgagcucaagucagguuacaaagacuggauucuguggaucaguuuugccauauccugcuuccuucuguguguggcuuugcucggcuuuaucaugugggcgugccaaaaggggaacauuagguguaauaucugcauuuga

SEQ ID NO: 138782 - RNA, 1701 nt, Artificial Sequence; identical to SEQ ID NO: 137122
  derived and/or modified CDS sequence (opt3) from hemagglutinin__InfluenzaA__AHC60071

SEQ ID NO: 138783 - RNA, 1701 nt, Artificial Sequence; identical to SEQ ID NO: 138666
  derived and/or modified CDS sequence (opt3) from hemagglutinin__InfluenzaA__AHC60083

SEQ ID NO: 138784 - RNA, 1701 nt, Artificial Sequence; identical to SEQ ID NO: 135830
  derived and/or modified CDS sequence (opt3) from hemagglutinin__InfluenzaA__AHC60095

SEQ ID NO: 138785 - RNA, 1701 nt, Artificial Sequence
  derived and/or modified CDS sequence (opt3) from hemagglutinin__InfluenzaA__AHC60107
augaagaccaucauugcccugagcuacauacucugccuuguguucgcucagaaacugcccggcaacgacaauuccacagcaacuuuguguuuagggcaccaugccgucccuaacggaacgaucguuaagaccauuacaaaugaucaaaucgaggugacuaacgcgaccgaacugguacaaaauucuucaacaggugagauuugcgacaguccacaccagaucauagauggcgaaaacuguacccuaaucgacgcucuccugggggauccgcagugcgacggauuucagaauaaaaagugggaucuuuucguggagagaagcaaagccuauuccaacuguuaccccuaugacgucccugauuacgcaucucugaggucguugguggccucaagcggcacucucgaauuuaauaacgagaguuucaauuggacagguguuacccagaacgggacguccucugcuugcauucggcgcagcaauaacuccuuuuucucacgacugaauuggcugacucaucucaacuuuaaguauccagcauuaaacgugaccaugcccaauaacgagcaguucgacaagcuguacaucuggggaguccaccauccuggcacagauaaagaccagauuuuucuuuaugcccaagcuaguggccguaucacugugagcaccaagagaucucagcaggccguaauaccaaauauuggguccaggccccggguucgcaacaucccuucaagaauuagcaucuacuggacaaucgugaaaccaggagauauuuugcugauaaauaguaccgguaaccuaaucgcgccgaggggcuacuucaagauucggucugggaaauccagcaucaugcgcucggacgcacccauaggaaaguguaauucugaaugcauuacgccuaacggcuccaucccaaaugacaagcccuuucagaacgucaaucgaaucacuuauggugccuguccuagauacgugaaacaaaacacacucaagcuggcuaccgggaugaggaaugugccagagaaacagacucggggaauuuucggcgccaucgcaggcuuuauugaaaacgggugggagggaauggucgaugguugguauggcuuccgucaccaaaauucagaggggcgcggacaggcugccgaccuuaagaguacacaggcggccauagaucagaucaacggcaaacugaacagauugauugguaagaccaaugaaaaauuccaccagaucgagaaggaauuuagcgagguugaagggaggauccaagaccucgagaaguacguggaggauacgaaaauugaccugugguccuauaacgcagaauuacugguagcucucgagaaucagcauaccauagaucuuacagacucugaaaugaacaagcuguucgagaaaacuaagaaacaguugcgggaaaaugccgaggauaugggcaacggaugcuuuaagaucuaccacaagugugacaaugcuugcauuggcagcauccgaaacgggaccuaugaucaugacguguaccgcgacgaggcccuaaauaacagauucaaaauuaagggagucgaacugaaaucagguuacaaggauuggauccucuggauaaguuuugcaaucuccugcuuccugcuuuguguggcccuguugggcuuuauuaugugggcuugccagaaagggaauaucagguguaacauuugcaucuga

SEQ ID NO: 138786 - RNA, 1701 nt, Artificial Sequence; identical to SEQ ID NO: 135030
  derived and/or modified CDS sequence (opt3) from hemagglutinin__InfluenzaA__AHC60119

SEQ ID NO: 138787 - RNA, 1701 nt, Artificial Sequence; identical to SEQ ID NO: 135030
  derived and/or modified CDS sequence (opt3) from hemagglutinin__InfluenzaA__AHC60131

SEQ ID NO: 138788 - RNA, 1701 nt, Artificial Sequence; identical to SEQ ID NO: 138696
  derived and/or modified CDS sequence (opt3) from hemagglutinin__InfluenzaA__AHC60143

SEQ ID NO: 138789 - RNA, 1701 nt, Artificial Sequence
  derived and/or modified CDS sequence (opt3) from hemagglutinin__InfluenzaA__AHC60155
augaagaccgugaucgcccugagcuacauucucugccuugcuuucgcacagaaacugcccggcaacgacaauuccacagccacuuuguguuuagggcaccaugcggucccuaacggaacgauaguuaagaccaucacaaaugaucaaauugaggugacuaacgcuaccgaacugguacagucuucaccaacaggugagaucugcgacaguccgcaccagauucuagauggcgaaaauuguacccucaucgacgcccugcuuggggauccccagugcgacggauuucaaaacaaaaagugggaucuguucguggagagaagcaaagcauauuccaauuguuacccuuaugacgucccagauuacgccucuuugaggucgcucguggcuucaagcggcacucuggaauuuaacaaugagaguuucaacuggacagguguuacccagaaugggacguccucugcaugcauacggcgcagcaacaauuccuuuuucucacgacugaacuggcucacucauuuaaauuuuaaguaucccgcccugaacgugaccaugccuaacaaugagcaguucgacaaguuguacaucuggggaguccaccauccaggcacagauaaagaccagauuuuucuuuaugcucaagccaguggccguaucacugugagcaccaagagaucucagcaggcgguaauucccaacaucggguccaggccucggguucgcaauauaccaucaagaauuagcaucuacuggacaauugugaaaccgggagauauccugcuaaucaacaguaccgguaaucucauugcacccaggggcuacuucaagauacggucugggaaauccagcaucaugcgcucggacgccccuauuggaaaguguaacucugaaugcaucacgccaaauggcuccauacccaacgacaagccuuuucagaaugucaaccgaauuacuuauggugcuuguccaagauacgugaaacaaaauacacugaaacuugccaccgggaugaggaacgugcccgagaagcagacucggggaaucuucggcgcaaucgcuggcuuuauugaaaaugggugggagggaauggucgaugguugguauggcuuccgucaccagaacucagaggggcgcggacaagccgcggaccugaagaguacacaggccgcaaucgaucagauuaauggcaaauugaacagacucauagguaagaccaacgaaaaauuccaccagaucgagaaggaauuuagcgagguugaagggaggauucaagaccuggagaaguacguggaggauacgaaaaucgacuuaugguccuauaaugcugaacugcucguagcccuugagaaccagcauaccaucgaucugacagacucugaaaugaauaaguuguucgagaaaacuaagaaacagcuacgggaaaacgcugaggauaugggcaauggaugcuuuaagauuuaccacaagugugacaacgccugcauaggcagcauccgaaaugggaccuaugaucaugacguguaccgcgacgaggcacugaacaauagauuccagauuaaaggagucgaacucaagucagguuacaaagauuggauccuguggauuaguuuugccaucuccugcuuccuucuguguguggcuuugcucggcuuuauaaugugggcgugccaaaaggggaacaucagguguaauauuugcaucuga

SEQ ID NO: 138790 - RNA, 1701 nt, Artificial Sequence; identical to SEQ ID NO: 134903
  derived and/or modified CDS sequence (opt3) from hemagglutinin__InfluenzaA__AHC60167

SEQ ID NO: 138791 - RNA, 1701 nt, Artificial Sequence; identical to SEQ ID NO: 135830
  derived and/or modified CDS sequence (opt3) from hemagglutinin__InfluenzaA__AHC60179

SEQ ID NO: 138792 - RNA, 1701 nt, Artificial Sequence; identical to SEQ ID NO: 138741
  derived and/or modified CDS sequence (opt3) from hemagglutinin__InfluenzaA__AHC60191

SEQ ID NO: 138793 - RNA, 1701 nt, Artificial Sequence; identical to SEQ ID NO: 138741
  derived and/or modified CDS sequence (opt3) from hemagglutinin__InfluenzaA__AHC60203

SEQ ID NO: 138794 - RNA, 1701 nt, Artificial Sequence; identical to SEQ ID NO: 137122
  derived and/or modified CDS sequence (opt3) from hemagglutinin__InfluenzaA__AHC60215

SEQ ID NO: 138795 - RNA, 1701 nt, Artificial Sequence; identical to SEQ ID NO: 135830
  derived and/or modified CDS sequence (opt3) from hemagglutinin__InfluenzaA__AHC60239

SEQ ID NO: 138796 - RNA, 1701 nt, Artificial Sequence; identical to SEQ ID NO: 135830
  derived and/or modified CDS sequence (opt3) from hemagglutinin__InfluenzaA__AHC60251

SEQ ID NO: 138797 - RNA, 1701 nt, Artificial Sequence
  derived and/or modified CDS sequence (opt3) from hemagglutinin__InfluenzaA__AHC60263
augaagaccaucauugcccugagcuacauacucugccuuguguucgcucagaaacugcccggcaacgaaaauuccacagcaacuuuguguuuagggcaccaugccgucccuaacggaacgaucguuaagaccauuacaaaugaccaaaucgaagugacuaacgcgaccgagcugguacaaaauucuucaacaggugaaauuugcgauaguccacaccagauccuagacggcgagaacuguacccucauagaugcucugcuuggggacccgcagugcgauggauuucagaauaaaaagugggaccuguucguggaaagaagcaaagccuauuccaacuguuaccccuaugaugucccugacuacgcaucuuugaggucgcucguggccucaagcggcacucuggaguuuaauaacgagaguuucaauuggacagguguuacccagaacgggacguccucugcuugcauccggcgcagcaauaacuccuuuuucucacgacugaauuggcucacucauuuaaacuuuaaguauccagcacugaacgugaccaugcccaauaacgaacaguucgauaaacuuuacauuuggggaguccaccauccuggcacagacaaggaucagaucuuuuuguaugcccaagcuaguggccguauuacugugagcaccaagagaucucagcaggccguaaucccaaauauaggguccaggccccggguucgcaacauuccuucaagaaucagcauuuacuggacaaucgugaaaccaggagacauccugcuaauuaauaguaccgguaaccucauagcgccgaggggcuacuucaagauccggucugggaaauccagcauuaugcgcucggaugcacccaucggaaaguguaauucugagugcauaacgccuaacggcuccauuccaaaugacaagcccuuucagaacgucaaucgaaucacuuauggugccuguccuagauacgugaaacaaaacacacugaaacuugcuaccgggaugaggaaugugccagaaaagcagacucggggaaucuucggcgccauugcaggcuuuaucgagaacgggugggagggaauggucgacgguugguauggcuuccgucaccaaaauucagaagggcgcggacaggcugccgaucugaagaguacacaggcggccauugaccagauaaacggcaaauugaacagacucaucgguaagaccaaugagaaauuccaccagauugaaaaggaguuuagcgaaguugaggggaggauccaagaucuggagaaguacguggaagacacgaaaaucgauuuaugguccuauaacgcagagcugcucguagcucuugaaaaucagcauaccauugaccugacagauucugagaugaacaaguuguucgagaaaacuaagaaacagcuacgggagaaugccgaggacaugggcaacggaugcuuuaagauauaccacaagugugauaaugcuugcaucggcagcauucgaaacgggaccuaugaccaugauguguaccgcgacgaagcccugaauaacagauuccagaucaaaggagucgagcucaagucagguuacaaagacuggauucuguggaucaguuuugcaauauccugcuuccuucuguguguggccuugcucggcuuuaucaugugggcuugccaaaaggggaauauuagguguaacaucugcauuuga

SEQ ID NO: 138798 - RNA, 1701 nt, Artificial Sequence; identical to SEQ ID NO: 134903
  derived and/or modified CDS sequence (opt3) from hemagglutinin__InfluenzaA__AHC60275

SEQ ID NO: 138799 - RNA, 1701 nt, Artificial Sequence; identical to SEQ ID NO: 138785
  derived and/or modified CDS sequence (opt3) from hemagglutinin__InfluenzaA__AHC60287

SEQ ID NO: 138800 - RNA, 1701 nt, Artificial Sequence; identical to SEQ ID NO: 138666
  derived and/or modified CDS sequence (opt3) from hemagglutinin__InfluenzaA__AHC60299

SEQ ID NO: 138801 - RNA, 1701 nt, Artificial Sequence
  derived and/or modified CDS sequence (opt3) from hemagglutinin__InfluenzaA__AHC60311
augaagaccaucauugcccugagcuacauacucugccuuguguucgcucagaaacugcccggcaacgacaauuccacagcaacuuuguguuuagggcaccaugccgucccuaacggaacgaucguuaagaccauuacaaaugaucaaaucgaggugacuaacgcgaccgaacugguacaaaauucuucaacaggugagauuugcgacaguccacaccagauccuagauggcgaaaacuguacccucauagacgcucugcuuggggauccgcagugcgacggauuucagaauaaaaagugggaucuguucguggagagaagcaaagccuauuccaacuguuaccccuaugacgucccugauuacgcaucuuugaggucgcucguggccucaagcggcacucuggaauuugacaaugagaguuucaacuggacagguguuacccagaaugggacguccucugcuugcauccggcgcagcaacaauuccuuuuucucacgacugaacuggcucacucauuuaaauuuuaaguauccagcacugaacgugaccaugcccaacaaugagcaguucgauaaacuuuacauuuggggaguccaccauccuggcacagacaaggaucagaucuuuuuguaugcccaagcuaguggccguauuacugugagcaccaagagaucucagcaggccguaaucccaaacauaggguccaggccccggguucgcaauauuccuucaagaaucagcauuuacuggacaaucgugaaaccaggagacauccugcuaauuaacaguaccgguaaucucauagcgccgaggggcuacuucaagauccggucugggaaauccagcauuaugcgcucggacgcacccaucggaaaguguaacucugaaugcauaacgccuaauggcuccauuccaaacgauaagcccuuucagaaugucaaccgaaucacuuauggugccuguccuagauacgugaaacaaaauacacugaaacuugcuaccgggaugaggaacgugccagagaagcagacucggggaaucuucggcgccauugcaggcuuuaucgaaaaugggugggagggaauggucgacgguugguauggcuuccgucaccagaacucagaggggcgcggacaagcugccgaucugaagaguacacaggcggccauugaccagauaaauggcaaauugaacagacucaucgguaagaccaacgaaaaauuccaccagauugagaaggaauuuagcgagguugaagggaggauccaagaucuggagaaguacguggaggacacgaaaaucgauuuaugguccuauaaugcagaacugcucguagcucuugagaaccagcauaccauugaccugacagauucugaaaugaauaaguuguucgagaaaacuaagaaacagcuacgggaaaacgccgaggacaugggcaauggaugcuuuaagauauaccacaagugugauaacgcuugcaucggcagcauucgaaaugggaccuaugaccaugacguguaccgcgaugaggcccugaacaauagauuccagaucaaaggagucgaacucaagucagguuacaaagacuggauucuguggaucaguuuugcaauauccugcuuccuucuguguguggccuugcucggcuuuaucaugugggcuugccaaaaggggaacauuagguguaauaucugcauuuga

SEQ ID NO: 138802 - RNA, 1701 nt, Artificial Sequence; identical to SEQ ID NO: 135830
  derived and/or modified CDS sequence (opt3) from hemagglutinin__InfluenzaA__AHC60323

SEQ ID NO: 138803 - RNA, 1701 nt, Artificial Sequence; identical to SEQ ID NO: 137122
  derived and/or modified CDS sequence (opt3) from hemagglutinin__InfluenzaA__AHC60335

SEQ ID NO: 138804 - RNA, 1701 nt, Artificial Sequence; identical to SEQ ID NO: 134903
  derived and/or modified CDS sequence (opt3) from hemagglutinin__InfluenzaA__AHC60347

SEQ ID NO: 138805 - RNA, 1701 nt, Artificial Sequence; identical to SEQ ID NO: 135030
  derived and/or modified CDS sequence (opt3) from hemagglutinin__InfluenzaA__AHC60359

SEQ ID NO: 138806 - RNA, 1701 nt, Artificial Sequence; identical to SEQ ID NO: 138727
  derived and/or modified CDS sequence (opt3) from hemagglutinin__InfluenzaA__AHC60371

SEQ ID NO: 138807 - RNA, 1701 nt, Artificial Sequence; identical to SEQ ID NO: 134903
  derived and/or modified CDS sequence (opt3) from hemagglutinin__InfluenzaA__AHC60383

SEQ ID NO: 138808 - RNA, 1701 nt, Artificial Sequence; identical to SEQ ID NO: 135030
  derived and/or modified CDS sequence (opt3) from hemagglutinin__InfluenzaA__AHC60395

SEQ ID NO: 138809 - RNA, 1701 nt, Artificial Sequence; identical to SEQ ID NO: 138741
  derived and/or modified CDS sequence (opt3) from hemagglutinin__InfluenzaA__AHC60407

SEQ ID NO: 138810 - RNA, 1701 nt, Artificial Sequence; identical to SEQ ID NO: 134903
  derived and/or modified CDS sequence (opt3) from hemagglutinin__InfluenzaA__AHC60419

SEQ ID NO: 138811 - RNA, 1701 nt, Artificial Sequence; identical to SEQ ID NO: 135030
  derived and/or modified CDS sequence (opt3) from hemagglutinin__InfluenzaA__AHC60431

SEQ ID NO: 138812 - RNA, 1701 nt, Artificial Sequence; identical to SEQ ID NO: 134903
  derived and/or modified CDS sequence (opt3) from hemagglutinin__InfluenzaA__AHC60455

SEQ ID NO: 138813 - RNA, 1701 nt, Artificial Sequence; identical to SEQ ID NO: 134903
  derived and/or modified CDS sequence (opt3) from hemagglutinin__InfluenzaA__AHC60467

SEQ ID NO: 138814 - RNA, 1701 nt, Artificial Sequence; identical to SEQ ID NO: 138665
  derived and/or modified CDS sequence (opt3) from hemagglutinin__InfluenzaA__AHC60479

SEQ ID NO: 138815 - RNA, 1701 nt, Artificial Sequence; identical to SEQ ID NO: 135830
  derived and/or modified CDS sequence (opt3) from hemagglutinin__InfluenzaA__AHC60491

SEQ ID NO: 138816 - RNA, 1701 nt, Artificial Sequence
  derived and/or modified CDS sequence (opt3) from hemagglutinin__InfluenzaA__AHC60503
augaagaccaucauugcccugagcuacauacucugccuuguguucgcucagaaacugcccggcaacgacaauuccacagcaacuuuguguuuagggcaccaugccgucccuaacggaacgaucguuaagaccauuacaaaugaucaaaucgaggugacuaacgcgaccgaacugguacagucuucaaguacaggugagauuugcaauagcccacaccagauccuagacggcgaaaacuguacccucauagaugcucugcuuggggacccgcagugcgauggauuucaaaauaaaaagugggaccuguucguggagagauccaaagccuauucuaacuguuaccccuaugaugucccugacuacgcaucguugaggucacucguggccagcaguggcacucuggaauuuaauaacgaguccuucaauuggacagguguuacccagaacgggacgucuagcgcuugcauccggcgcuccaauaacucauuuuucagucgacugaauuggcucacucauuuaaacuuuaaguauccagcacugaacgugaccaugcccaauaacgagcaguucgauaagcuguacauuuggggaguccaccauccuggcacagacaaagaucagaucuuuuuguaugcccaagcuagcggccguauuacugugucuaccaagagaucccagcaggccguaaucccaaauauagggucaaggccccggguucgcaacauuccuagcagaaucaguauuuacuggacaaucgugaaaccaggagacauccugcuaauuaauucuaccgguaaccucauagcgccgaggggcuacuucaagauccgguccgggaaaagcucgauuaugcgcucugaugcacccaucggaaaguguaauuccgccugcauaacgccuaacggcucaauuccaaaugacaagcccuuucagaacgucaaucgaaucacuuauggugcuuguccuagauacgugaaacaaaacacacugaaacuugccaccgggaugaggaaugugccagaaaaacagacucggggaaucuucggcgcaauugcuggcuuuaucgagaacgggugggaaggaauggucgacgguugguauggcuuccgucaccagaauagugaggggcgcggacaagccgcggaucuuaagagcacacaggccgcaauugaccagauaaacggcaaauugaacagacucaucgguaagaccaaugagaaauuccaccagauugaaaaggaguuuuccgaaguugaggggaggauccaagaucuggaaaaguacguggaggacacgaaaaucgauuuauggucuuauaacgcugagcugcucguagcccuugaaaaucagcauaccauugaccugacagauagcgagaugaacaaguuguucgaaaagacuaagaaacagcuacgggagaaugcugaagacaugggcaacggaugcuuuaagauauaccacaagugugauaaugccugcaucggcucaauucgaaacgggaccuaugaccaugauguguaccgcgacgaggcacugaauaacagauuccagaucaaaggagucgagcucaagagugguuacaaagacuggauucuguggaucuccuuugccauaagcugcuuccuucugugugugguuuugcucggcuuuaucaugugggcuugccaaaaggggaauauuagguguaacaucugcauuuga

SEQ ID NO: 138817 - RNA, 1701 nt, Artificial Sequence; identical to SEQ ID NO: 135030
  derived and/or modified CDS sequence (opt3) from hemagglutinin__InfluenzaA__AHC60515

SEQ ID NO: 138818 - RNA, 1701 nt, Artificial Sequence; identical to SEQ ID NO: 135830
  derived and/or modified CDS sequence (opt3) from hemagglutinin__InfluenzaA__AHC60527

SEQ ID NO: 138819 - RNA, 1701 nt, Artificial Sequence; identical to SEQ ID NO: 135030
  derived and/or modified CDS sequence (opt3) from hemagglutinin__InfluenzaA__AHC60539

SEQ ID NO: 138820 - RNA, 1701 nt, Artificial Sequence; identical to SEQ ID NO: 138677
  derived and/or modified CDS sequence (opt3) from hemagglutinin__InfluenzaA__AHC60551

SEQ ID NO: 138821 - RNA, 1701 nt, Artificial Sequence; identical to SEQ ID NO: 137122
  derived and/or modified CDS sequence (opt3) from hemagglutinin__InfluenzaA__AHC60563

SEQ ID NO: 138822 - RNA, 1701 nt, Artificial Sequence; identical to SEQ ID NO: 137122
  derived and/or modified CDS sequence (opt3) from hemagglutinin__InfluenzaA__AHC60575

SEQ ID NO: 138823 - RNA, 1701 nt, Artificial Sequence
  derived and/or modified CDS sequence (opt3) from hemagglutinin__InfluenzaA__AHC60587
augaagaccaucauugcccugagcuacauacucugccuuguguucgcucagaaacugcccggcaacgacaauuccacagcaacuuuguguuuagggcaccaugccgucccuaacggaacgaucguuaagaccauuacaaaugaucaaaucgaggugacuaacgcgaccgaacugguacaaaauucuucaacaggugagauuugcgacaguccacaccagauccuagauggcgaaaacuguacccucauagacgcucugcuuggggauccgcagugcgacggauuucagaauaaaaagugggaucuguucguggagagaagcaaagccuauuccaacuguuaccccuaugacgucccugauuacgcaucuuugaggucgcucguggccucaagcggcacucuggaauuuaauaacgagaguuucaauuggacagguguuacccagaacgggacguccucugcuugcauccggcgcagcaauaacuccuuuuucucacgacugaauuggcucacucauuuaaacuuuaaguauccagcacugaacgugaccaugcccaauaacgagcaguucgacaaacuuuacauuuggggaguccaccauccuggcacagauaaggaccagaucuuuuuguaugcccaagcuaguggccguauuacugugagcaccaagagaucucagcaggccguaaucccaaauauaggguccaggccccggguucgcaacauuccuucaagaaucagcauuuacuggacaaucgugaaaccaggagauauccugcuaauuaauaguaccgguaaccucauagcgccgaggggcuacuucaagauccggucugggaaauccagcauuaugcgcucggacgcacccaucggaaaguguaauucugaaugcauaacgccuaacggcuccauuccaaaugacaagcccuuucagaacgucaaucgaaucacuuauggugccuguccuagauacgugaaacaaaacacacugaaacuugcuaccgggaugaggaaugugccagagaagcagacucggggaaucuucggcgccauugcaggcuuuaucgaaaacgggugggagggaauggucgaugguugguauggcuuccgucaccaaaauucagaggggcgcggacaggcugccgaccugaagaguacacaggcggccauugaucagauaaacggcaaauugaacagacucaucgguaagaccaaugaaaaauuccaccagauugagaaggaauuuagcgagguugaagggaggauccaaaaccuggagaaguacguggaggacacgaaaaucgauuuaugguccuauaaugcagaacugcucguagcucuugagaaccagcauaccauugaccugacagauucugaaaugaauaaguuguucgagaaaacuaagaaacagcuacgggaaaacgccgaggacaugggcaauggaugcuuuaagauauaccacaagugugauaacgcuugcaucggcagcauucgaaaugggaccuaugaccaugauguguaccgcgacgaggcccugaacaauagauuccagaucaaaggagucgaacucaagucagguuacaaagacuggauucuguggaucaguuuugcaauauccugcuuccuucuguguguggccuugcucggcuuuaucaugugggcuugccaaaaggggaacauuagguguaauaucugcauuuga

SEQ ID NO: 138824 - RNA, 1701 nt, Artificial Sequence; identical to SEQ ID NO: 137122
  derived and/or modified CDS sequence (opt3) from hemagglutinin__InfluenzaA__AHC60599

SEQ ID NO: 138825 - RNA, 1701 nt, Artificial Sequence; identical to SEQ ID NO: 134903
  derived and/or modified CDS sequence (opt3) from hemagglutinin__InfluenzaA__AHC60611

SEQ ID NO: 138826 - RNA, 1701 nt, Artificial Sequence
  derived and/or modified CDS sequence (opt3) from hemagglutinin__InfluenzaA__AHC60623
augaagaccaucauugcccugagcuacauacucugccuuguguucgcucagaaacugcccggcaacgacaauuccacagcaacuuuguguuuagggcaccaugccgucccuaacggaacgaucguuaagaccauuacaaaugaucaaaucgaggugacuaacgcgaccgaacugguacagucuucaaguacaggugagauuugcgacagcccacaccagauccuagauggcgaaaauuguacccucauagacgcucugcuuggggauccgcagugcgacggauuucaaaacaaaaagugggaucuguucguggagagauccaaagccuauucuaauuguuaccccuaugacgucccugauuacgcaucguugaggucacucguggccagcaguggcacucuggaauuuaacaaugaguccuucaacuggacagguguuacccagaaugggacgucuagcgcuugcauccggcgcuccaacucauccuuuuucagccgacugaauuggcucacucauuuaaacuuuaaguauccagcacugaaugugaccaugcccaacaacgagcaguucgacaaacuuuacauuuggggaguccaccauccuggcacagauaaggaccagaucuuuuuguaugcccaaucuuccggccguauuacugugucaaccaagagaagccagcaggcuguaaucccaaauauagggaguaggccccggauucgcaacaucccuucuagaauuuccaucuacuggacaaucguuaaaccaggagauauucugcuaauaaauagcaccgguaaccucaucgccccgaggggcuacuucaagauucggaaugggaaaucgucuaucaugcgcuccgacgcgcccauaggaaaguguaacucagaaugcauuacgccuaauggcaguaucccaaacgacaagcccuuucagaaugugaaccgaaucacuuauggugcauguccuagauacgucaaacaaagcacacugaaacuugccaccgggaugaggaaugugccagagaagcagacucggggaauuuucggcgcuaucgccggcuuuauugaaaacgggugggagggaaugguggaugguugguauggcuuccgucaccagaauagugaggggcgcggacaagcagcugaccugaagucuacacaggccgcgauagaucagaucaacggcaaauugaauagacucauugguaagaccaacgaaaaauuccaccagaucgagaaggaauuuagcgaggucgaagggaggauccaagaccuggagaaguacguugaggauacgaaaauugacuuauggucauauaacgccgaacugcucguggcacuugagaaucagcauaccauagaucugacagacagugaaaugaacaaguuguucgagaaaacuaagaaacagcuacgggaaaaugcugaggauaugggcaacggaugcuuuaagaucuaccacaagugugacaaugccugcauuggcuccauccgaaacgggaccuauaaucaugauguauaccgcgacgaggcucugaacaauagauuccagauuaaaggaguggaacucaagagcgguuacaaagacuggauccuguggauaucuuuugccaucucaugcuuccuucugugugucgcauugcucggcuuuauuaugugggccugccaaaaggggaacaucagguguaauauuugcaucuga

SEQ ID NO: 138827 - RNA, 1701 nt, Artificial Sequence; identical to SEQ ID NO: 137122
  derived and/or modified CDS sequence (opt3) from hemagglutinin__InfluenzaA__AHC60635

SEQ ID NO: 138828 - RNA, 1701 nt, Artificial Sequence
  derived and/or modified CDS sequence (opt3) from hemagglutinin__InfluenzaA__AHC60647
augaagaccaucauugcccugagcuacauacucugccuuguguucacacagaaacugcccggcaacgacaauuccacugcuacguuguguuuagggcaccaugcagucccuaacggaaccaucguuaagacaauuacuaaugaucaaaucgaggugaccaacgccacagaacugguacaaaauucuucaaccggugagauuugcgacaguccacaccagauccuagauggcgaaaacuguacucucauagacgcgcugcuuggggauccgcagugcgacggauuucagaauaaaaagugggaucuguucguggagagaagcaaggcuuauuccaacuguuaccccuaugacgucccugauuacgccucuuugaggucgcucguggcaucaagcggcacacuggaauuuaauaacgagaguuucaauuggaccgguguuacgcagaacgggacuuccucugccugcauccggcgcagcaauaacuccuuuuucucacgacugaauuggcucacccauuuaaacuuuaaguauccagcucugaacgugacaaugcccaauaacgagcaguucgacaaacuuuacauuuggggaguccaccauccuggcacugauaaagaccagaucuuuuuguaugcacaagccaguggccguauuaccgugagcacaaagagaucucagcaggcuguaaucccaaauauaggguccaggccccggguucgcaacauuccuucaagaaucagcauuuacuggaccaucgugaaaccaggagauauccugcuaauuaauaguacggguaaccucauagccccgaggggcuacuucaagauccggucugggaaauccagcauuaugcgcucggacgcgcccaucggaaaguguaauucugaaugcauaacuccuaacggcuccauuccaaaugacaagcccuuucagaacgucaaucgaaucacauauggugcauguccuagauacgugaaacaaaacacccugaaacuugccacugggaugaggaaugugccagagaagcagacacggggaaucuucggcgcuauugccggcuuuaucgaaaacgggugggagggaauggucgaugguugguauggcuuccgucaccaaaauucagaggggcgcggacaggcagcugaccugaagaguacccaggccgcgauugaucagauaaacggcaaauugaacagacucaucgguaagacgaaugaaaaauuccaccagauugagaaggaauuuagcgagguugaagggaggauccaagaccuggagaaguacguggaggauaccaaaaucgacuuaugguccuauaacgccgaacugcucguagcacuugagaaucagcauacaauugaucugacugacucugaaaugaacaaguuguucgagaaaaccaagaaacagcuacgggaaaaugcugaggauaugggcaacggaugcuuuaagauauaccacaagugugacaaugccugcaucggcagcauucgaaacgggacauaugaucaugacguguaccgcgacgaggcucugaauaacagauuccagaucaaaggagucgaacucaagucagguuacaaagauuggauucuguggaucaguuuugccauauccugcuuccuucuguguguggcauugcucggcuuuaucaugugggccugccaaaaggggaauauuagguguaacaucugcauuuga

SEQ ID NO: 138829 - RNA, 1701 nt, Artificial Sequence
  derived and/or modified CDS sequence (opt3) from hemagglutinin__InfluenzaA__AHC60659
augaagaccaucauugcccugagcuacauacucugccuuguguucacacagaaacugcccggcaacgacaauuccacugcuacguuguguuuagggcaccaugcagucccuaacggaaccaucguuaagacaauuacuaaugaucaaaucgaggugaccaacgccacagaacugguacagucuucaaguaccggugagauuugcaauagcccacaccagauccuagacggcgaaaacuguacucucauagaugcgcugcuuggggacccgcagugcgauggauuucaaaauaaaaagugggaccuguucguggagagauccaaagcucauucuaacuguuaucccuacgaugucccugacuaugccucguugaggucacucguggcaagcaguggcacacuggaauuuaauaacgaguccuucaauuggaccgguguuacgcagaacgggacuucuagcgccugcauccggcgcuccaauaacucauuuuucagucgacugaauuggcucacccacuuaaacuuuaaguacccagcucugaacgugacaaugcccaauaacgagcaguucgauaaacuuuauauuuggggaguccaucacccuggcacugacaaagaucagaucuuuuuguacgcacaagccgcuggccguauuaccgugagcacaaagagaucucagcaggccguaaucccaaauauaggguccaggccccggguucgcaacauuccuucaagagugagcaucuauuggaccauugucaaaccaggagacauccugcuaaucaauaguacggguaaccucauugcgccgaggggcuacuucaagauacggucugggaaauccagcaucaugcgcucggaugcacccauuggaaaguguaauucugccugcaucacuccuaacggcuccauaccaaaugacaagcccuuucagaacgugaaucgaauuacauacggugcuuguccuagauaugugaaacaaaacacccugaaacuugccacugggaugaggaaugucccagaaaagcagacacggggaaucuucggcgcaaucgcuggcuuuauugagaacgggugggaaggaaugguugacgguugguacggcuuccgucaccaaaauucagaggggcgcggacaggccgcggaucugaagaguacccaggccgcaaucgaccagauuaacggcaaauugaacagacucauagguaagacgaaugagaaauuccaucagaucgaaaaggaguuuagcgaaguggaggggaggauucaagaucuggaaaaguauguagaggacaccaaaaucgauuuaugguccuacaacgcugagcugcucguggcccuugaaaaucagcacacaaucgaccugacugauucugagaugaacaaguuguucgaaaagaccaagaaacagcuacgggagaaugcugaagacaugggcaacggaugcuuuaagauuuaucauaagugugauaaugccugcauaggcagcauccgaaacgggacauacgaccacgaugucuaucgcgacgaggcacugaauaacagauuccagauuaaaggaguggagcucaagucagguuacaaagacuggauccuguggauuaguuuugccaucuccugcuuccuucuguguguugcuuugcucggcuuuauaaugugggcgugccaaaaggggaauaucagguguaacauuugcaucuga

SEQ ID NO: 138830 - RNA, 1701 nt, Artificial Sequence
  derived and/or modified CDS sequence (opt3) from hemagglutinin__InfluenzaA__AHC60671
augaagaccaucauugcccugagcuacauacucugccuuguguucgcucagaaacugcccggcaacgacaauuccacagcaacuuuguguuuagggcaccaugccgucccuaacggaacgaucguuaagaccauuacaaaugaucaaaucgaggugacuaacgcgaccgaacugguacagucuucaaguacaggugagauuugcaauagcccacaccagauccuagacggcgaaaacuguacccucauagaugcucugcuuggggacccgcagugcgauggauuucaaaauaaagagugggaccuguucguggaaagauccaaggcccauucuaacuguuaucccuacgaugucccugacuaugcaucguugaggucacucguggccagcaguggcacucuggaguuuaauaacgaguccuucaauuggacagguguuacccagaacgggacgucuagcgcuugcauccggcgcuccaauaacucauuuuucagucgacugaauuggcucacucacuuaaacuuuaaauacccagcacugaacgugaccaugcccaauaacgaacaguucgauaaacuuuauauuuggggaguccaucacccuggcacagacaaggaucagaucuuuuuguacgcccaagcuagcggccguauuacugugucuaccaagagaucccagcaggccguaaucccaaauauagggucaaggccccggguucgcaacauuccuagcagagugaguaucuauuggacaauugucaagccaggagacauccugcuaaucaauucuaccgguaaccucauugcgccgaggggcuacuucaaaauacgguccggaaagagcucgaucaugcgcucugaugcacccauugggaaauguaauuccgccugcaucacgccuaacggcucaauaccaaaugacaagcccuuucagaacgugaaucgaauuacuuacggugcuuguccuagauaugugaagcaaaacacacugaaacuugccaccgggaugaggaaugucccagagaagcagacucggggaaucuucggcgcaaucgcuggcuuuauugaaaacgggugggagggaaugguugacgguugguacggcuuccgucaccagaauagugaggggcgcggacaagccgcggaucugaaaagcacacaggccgcaaucgaccagauuaacggcaaguugaacagacucauagguaaaaccaaugaaaaguuccaucagaucgagaaagaauuuuccgagguggaagggaggauucaagaucuggagaaguauguagaggacacgaagaucgauuuauggucuuacaacgcugaacugcucguggcccuugagaaucagcacaccaucgaccugacagauagcgaaaugaacaaauuguucgagaagacuaaaaagcagcuacgggaaaaugcugaggacaugggcaacggaugcuuuaaaauuuaucauaagugugauaaugccugcauaggcucaauccgaaacgggaccuacgaccacgaugucuaucgcgacgaggcacugaauaacagauuccagauuaagggaguggaacucaaaagugguuacaaggacuggauccuguggauuuccuuugccaucagcugcuuccuucuguguguugcuuugcucggcuuuauaaugugggcgugccaaaaagggaauaucagguguaacauuugcaucuga

SEQ ID NO: 138831 - RNA, 1701 nt, Artificial Sequence
  derived and/or modified CDS sequence (opt3) from hemagglutinin__InfluenzaA__AHC60683
augaagaccaucauugcccugagcuacauacucugccuuguguucgcucagaaacugcccggcaacgacaauuccacagcaacuuuguguuuagggcaccaugccgucccuaacggaacgaucguuaagaccauuacaaaugaucaaaucgaggugacuaacgcgaccgaacugguacagucuucaaguacaggugagauuugcaauagcccacaccagauccuagacggcgaaaacuguacccucauagaugcucugcuuggggacccgcagugcgauggauuucaaaauaaaaagugggaccuguucguggagagauccaaagcccauucuaacuguuaucccuacgaugucccugacuaugcaucguugaggucacucguggccagcaguggcacucuggaauuuaauaacgaguccuucaauuggacagguguuacccagaacgggacgucuagcgcuugcauccggcgcuccaauaacucauuuuucagucgacugaauuggcucacucacuuaaacuuuaaguacccagcacugaacgugaccaugcccaauaacgagcaguucgauaaacuuuauauuuggggaguccaucacccuggcacagacaaagaucagaucuuuuuguacgcccaagcugccggccguauuacugugagcaccaagagaucucagcaggcgguaaucccaaauauaggguccaggccccggguucgcaacauuccuucaagagugagcaucuauuggacaauugucaaaccaggagacauccugcuaaucaauaguaccgguaaccucauugcaccgaggggcuacuucaagauacggucugggaaauccagcaucauucgcucggaugcccccaucggaaaguguaauucugcuugcauaacgccuaacggcuccauuccaaaugacaagcccuuucagaacgugaaucgaaucacuuacggugccuguccuagauaugugaaacaaaacacacugaaacuugcaaccgggaugaggaaugucccagaaaagcagacucggggaaucuucggcgcuauugccggcuuuaucgagaacgggugggaaggaaugguugacgguugguacggcuuccgucaccaaaauucagaggggcgcggacaggcggccgaucugaagaguacacaggcagcuauugaccagauaaacggcaaauugaacagacucaucgguaagaccaaugagaaauuccaucagauugaaaaggaguuuagcgaaguggaggggaggauccaagaucuggaaaaguauguagaggacacgaaaaucgauuuaugguccuacaacgccgagcugcucguggcucuugaaaaucagcacaccauugaccugacagauucugagaugaacaaguuguucgaaaagacuaagaaacagcuacgggagaaugccgaagacaugggcaacggaugcuuuaagauauaucauaagugugauaaugcaugcaucggcagcauucgaaacgggaccuacgaccacgaugucuaucgcgacgaggcccugaauaacagauuccagaucaaaggaguggagcucaagucagguuacaaagacuggauucuguggaucaguuuugcuauauccugcuuccuucuguguguugcguugcucggcuuuaucaugugggcaugccaaaaggggaauauuagguguaacaucugcauuuga

SEQ ID NO: 138832 - RNA, 1701 nt, Artificial Sequence
  derived and/or modified CDS sequence (opt3) from hemagglutinin__InfluenzaA__AHC60695
augaagaccaucauugcccugagcuacauacucugccuuguguucgcucagaaacugcccggcaacgacaauuccacagcaacuuuguguuuagggcaccaugccgucccuaacggaacgaucguuaagaccauuacaaaugaucaaaucgaggugacuaacgcgaccgaacugguacagucuucaaguacaggugagauuugcaauagcccacaccagauccuagacggcgaaaacuguacccucauagaugcucugcuuggggacccgcagugcgauggauuucaaaauaaaaagugggaccuguucguggagagauccaaagcccauucuaacuguuaucccuacgaugucccugacuaugcaucguugaggucacucguggccagcaguggcacucuggaauuuaauaacgaguccuucaauuggacagguguuacccagaacgggacgucuagcgcuugcaugcggggauccaauaacucauuuuucagucgccugaauuggcucacucacuuaaacuuuaaguacccagcacugaacgugaccaugcccaauaacgagcaguucgauaagcuguauaucuggggcguccaucacccuggcacagacaaagaucagaucuuuuuguacgcccaagcuagcgggcgaauuacugugucuaccaagcguucccagcaggccguaauuccaaauaucggaucaagacccaggguucggaacauaccuagccgcgugaguauuuauuggacaaucgucaaaccaggugacauucugcuaaucaauucuaccggcaaccucaucgcgccgagaggguacuucaagauuagguccggaaaaagcucgauaaugcggucugaugcacccaucggcaaguguaauuccgccugcauuacgccuaacgguucaaucccaaaugacaagcccuuucagaacgugaaucgcauaacuuacggggcuuguccucgauaugugaaacaaaacacacugaaacuugccaccggaaugagaaaugucccagaaaaacagacuaggggcauuuucggcgcaaucgcuggguuuaucgagaacggaugggaagguaugguugacggcugguacggguuccggcaccagaauagugagggacguggccaagccgcggaucuuaagagcacacaggccgcaauugaccagaucaacgguaaauugaaccgccucauugggaagaccaaugagaaauuccaucagauagaaaaggaguuuuccgaaguggagggcagaauccaagaucuggaaaaguauguagaggacacgaaaauugauuuauggucuuacaacgcugagcugcucguggcccuugaaaaucagcacaccaucgaccugacagauagcgagaugaacaaguuguucgaaaagacuaagaaacagcuaagggagaaugcugaagacaugggaaacggcugcuuuaagaucuaucauaagugugauaaugccugcauugggucaauacggaacggaaccuacgaccacgaugucuaucgagacgaggcacugaauaaccgcuuccagaucaaagguguggagcucaagaguggcuacaaagacuggauucuguggaucuccuuugccauuagcugcuuccuucuguguguugcuuugcucggguuuaucaugugggcgugccaaaagggaaauauaagauguaacaucugcauuuga

SEQ ID NO: 138833 - RNA, 1701 nt, Artificial Sequence
  derived and/or modified CDS sequence (opt3) from hemagglutinin__InfluenzaA__AHC60707
augaagaccaucauugcccugagcuacauacucugccuuguguucgcucagaaacugcccggcaacgacaauuccacagcaacuuuguguuuagggcaccaugccgucccuaacggaacgaucguuaagaccauuacagaugaccaaaucgaggugacuaaugcgaccgaacugguacagaacucuucaacaggugagauuugcgauaguccacaccagauccuagacggcgaaaauuguacccucauagaugcucugcuuggggacccgcagugcgauggauuucaaaacaaaaagugggaccuguucguggagagaagcaaagccuauuccaauuguuaccccuaugaugucccugacuacgcaucuuugaggucgcucguggccucaagcggcacucuggaauuuaacaaugagaguuucaacuggacagguguuacccagaaugggacguccucugcuugcauccggcgcagcaacaauuccuuuuucucacgacugaacuggcucacucauuuaaauuuuaaguauccagcacugaacgugaccaugcccaacaaugagcaguucgauaaacuuuacauuuggggaguccaccauccuggcacagacaaggaucagaucuuuuuguaugcccaagcuaguggccguauuacugugagcaccaagagaucucagcaggccguaaucccaaacauaggguccaggccccggguucgcaauauuccuucaagaaucagcauuuacuggacaaucgugaaaccaggagacauccugcuaauuaacaguaccgguaaucucauagcgccgaggggcuacuucaagauccggucugggaaauccagcauuaugcgcucggacgcacccaucggaaaguguaacucugaaugcauaacgccuaauggcuccauuccaaacgauaagcccuuucagaaugucaaccgaaucacuuauggugccuguccuagauacgugaaacaaaauacacugaaacuugcuaccgggaugaggaacgugccagagaagcagacucggggaaucuucggcgccauugcaggcuuuaucgaaaaugggugggagggaauggucgacgguugguauggcuuccgucaccagaacucagaggggcgcggacaagcugccgaucugaagaguacacaggcggccauugaccagauaaauggcaaauugaacagacucaucgguaagaccaacgaaaaauuccaccagauugagaaggaauuuagcgagguugaagggaggauccaagaucuggagaaguacguggaggacacgaaaaucgauuuaugguccuauaaugcagaacugcucguagcucuugagaaccagcauaccauugaccugacagauucugaaaugaauaaguuguucgagaaaacuaagaaacagcuacgggaaaacgccgaggacaugggcaauggaugcuuuaagauauaccacaagugugauaacgcuugcaucggcagcauucgaaaugggaccuaugaccaugacguguaccgcgaugaggcccugaacaauagauuccagaucaaaggagucgaacucaagucagguuacaaagacuggauuaucuggauaaguuuugcaaucuccugcuuccugcuuuguguggcccuguugggcuuuauuaugugggcuugccaaaaggggaacaucagguguaauauuugcaucuga

SEQ ID NO: 138834 - RNA, 1701 nt, Artificial Sequence; identical to SEQ ID NO: 134903
  derived and/or modified CDS sequence (opt3) from hemagglutinin__InfluenzaA__AHC60719

SEQ ID NO: 138835 - RNA, 1701 nt, Artificial Sequence; identical to SEQ ID NO: 135030
  derived and/or modified CDS sequence (opt3) from hemagglutinin__InfluenzaA__AHC60731

SEQ ID NO: 138836 - RNA, 1701 nt, Artificial Sequence; identical to SEQ ID NO: 138741
  derived and/or modified CDS sequence (opt3) from hemagglutinin__InfluenzaA__AHC60743

SEQ ID NO: 138837 - RNA, 1701 nt, Artificial Sequence; identical to SEQ ID NO: 131459
  derived and/or modified CDS sequence (opt3) from hemagglutinin__InfluenzaA__AHC60767

SEQ ID NO: 138838 - RNA, 1701 nt, Artificial Sequence
  derived and/or modified CDS sequence (opt3) from hemagglutinin__InfluenzaA__AHC60779
augaagaccaucauugcccugagcuacauacucugccuuguguucgcucagaaacugcccggcaacgacaauuccacagcaacuuuguguuuagggcaccaugccgucccuaacggaacgaucguuaagaccauuacaaaugaucaaaucgaggugacuaacgcgaccgaacugguacagucuucaaguacaggugagauuugcaauagcccacaccagauccuagacggcgaaaacuguacccucauagaugcucugcuuggggacccgcagugcgauggauuucaaaauaaaaagugggaccuguucguggagagauccaaagcccauucuaacuguuaucccuacgaugucccugacuaugcaucguugaggucacucguggccagcaguggcacucuggaauuuaauaacgagcgguucaauuggacagguguuacccagaacgggacguccucugcuugcauccgccgaagcaauaacuccuuuuucucacgucugaauuggcucacucacuuaaacuuuaaguacccagcacugaacgugaccaugcccaauaacgagcaguucgauaaacuuuauauuuggggaguccaucacccuggcacagacaaagaucagaucuuuuuguacgcccaagcugccggcagaauuacugugaguaccaagaggagccagcaggcgguaaucccaaauauagggucucggccccgcguuagaaacauuccuuccagggugucaaucuauuggacaauugucaaaccaggagacauccugcuaaucaauagcaccgguaaccucauugcaccgcggggcuacuucaagauacgcagugggaaaucuuccaucaugcgaagcgaugcccccauuggaaaguguaauucggcuugcaucacgccuaacggcucuauaccaaaugacaagcccuuucagaacgugaauagaauuacuuacggugccuguccuagguaugugaaacaaaacacacugaaacuugcaaccgggaugcggaaugucccagaaaagcagacucguggaaucuucggcgcuaucgccggcuuuauugagaacgggugggaaggaaugguugacgguugguacggcuuccgccaccaaaauuccgaggggagaggacaggcggccgaucugaagucaacacaggcagcuaucgaccagauuaacggcaaauugaacaggcucauagguaagaccaaugagaaauuccaucagaucgaaaaggaguuuagugaaguggaggggcggauucaagaucuggaaaaguauguagaggacacgaaaaucgauuuauggagcuacaacgccgagcugcucguggcucuugaaaaucagcacaccaucgaccugacagauuccgagaugaacaaguuguucgaaaagacuaagaaacagcuacgagagaaugccgaagacaugggcaacggaugcuuuaagauuuaucauaagugugauaaugcaugcauaggcucuauccgcaacgggaccuacgaccacgaugucuauagagacgaggcccugaauaacagguuccagauuaaaggaguggagcucaagagcgguuacaaagacuggauccuguggauuucauuugcuaucaguugcuuccuucuguguguugcguugcucggcuuuauaaugugggcaugccaaaaggggaauauccgguguaacauuugcaucuga

SEQ ID NO: 138839 - RNA, 1701 nt, Artificial Sequence; identical to SEQ ID NO: 135030
  derived and/or modified CDS sequence (opt3) from hemagglutinin__InfluenzaA__AHC60791

SEQ ID NO: 138840 - RNA, 1701 nt, Artificial Sequence; identical to SEQ ID NO: 138699
  derived and/or modified CDS sequence (opt3) from hemagglutinin__InfluenzaA__AHC60803

SEQ ID NO: 138841 - RNA, 1701 nt, Artificial Sequence; identical to SEQ ID NO: 134903
  derived and/or modified CDS sequence (opt3) from hemagglutinin__InfluenzaA__AHC60815

SEQ ID NO: 138842 - RNA, 1701 nt, Artificial Sequence
  derived and/or modified CDS sequence (opt3) from hemagglutinin__InfluenzaA__AHC60827
augaagaccaucauugcccugagcuacauacucugccuuguguucgcucagaaacugcccggcaacgacaauuccacagcaacuuuguguuuagggcaccaugccgucccuaacggaacgaucguuaagaccauuacaaaugaucaaaucgaggugacuaacgcgaccgaacugguacagucuucaaguacagacgagauuugcaauagcccacaccagauccuagauggugaaaacuguacccucauagacgcucugcuuggcgauccgcagugcgacggguuucaaaauaaaaagugggaucuguucguggagagauccaaagcccauucuaacuguuaucccuacgacgucccugauuaugcaucguugaggucacucguggccagcaguggaacucuggaauuuaauaacgaguccuucaauuggacaggcguuacccagaacgguacgucuagcgcuugcauccggggguccaauaacucauuuuucagucgccugaauuggcucacucacuuaaacuuuaaguacccagcacugaacgugaccaugcccaauaacgagcaguucgacaagcuguauauuuggggaguccaucacccuggcacagauaaagaccagaucuuuuuguacgcccaagcuagcggccgaauuacugugucuaccaagcguucccagcaggccguaaucccaaauauagggucaagacccaggguucggaacauuccuagccgcgugaguaucuauuggacaauugucaaaccaggagauauccugcuaaucaauucuaccgguaaccucauugcgccgagaggcuacuucaagauaagguccgggaaaagcucgaucaugcggucugacgcacccauuggaaaguguaauuccgccugcaucacgccuaacggcucaauaccaaaugacaagcccuuucagaacgugaaucgcauuacuuacggugcuuguccucgauaugugaaacaaaacacacugaaacuugccaccgggaugagaaaugucccagaaaaacagacuaggggaaucuucggcgcaaucgcuggcuuuauugagaacgggugggaaggaaugguugaugguugguacggcuuccggcaccagaauagugaggggcguggacaagccgcggaccuuaagagcacacaggccgcaaucgaucagauuaacggcaaauugaaccgccucauagguaagaccaaugagaaauuccaucagaucgaaaaggaguuuuccgaaguggaggggaggauucaagaccuggaaaaguauguagaggauacgaaaaucgacuuauggucuuacaacgcugagcugcucguggcccuugaaaaucagcacaccaucgaucugacagacagcgagaugaacaaguuguucgaaaagacuaagaaacagcuaagagagaaugcugaagauaugggcaacggaugcuuuaagauuuaucauaagugugacaaugccugcauaggcucaauccggaacgggaccuacgaucacgacgucuaucgagacgaggcacugaauaaccgcuuccagauuaaaggaguggagcucaagagugguuacaaagauuggauccuguggauuuccuuugccaucagcugcuuccuucuguguguugcuuugcucggcuuuauaaugugggcgugccaaaaggggaauaucagauguaacauuugcaucuga

SEQ ID NO: 138843 - RNA, 1701 nt, Artificial Sequence; identical to SEQ ID NO: 138677
  derived and/or modified CDS sequence (opt3) from hemagglutinin__InfluenzaA__AHC60839

SEQ ID NO: 138844 - RNA, 1701 nt, Artificial Sequence; identical to SEQ ID NO: 135030
  derived and/or modified CDS sequence (opt3) from hemagglutinin__InfluenzaA__AHC60851

SEQ ID NO: 138845 - RNA, 1701 nt, Artificial Sequence
  derived and/or modified CDS sequence (opt3) from hemagglutinin__InfluenzaA__AHC60863
augaagaccaucauugcccugagcuacauacucugccuuguguucgcucagaaacugcccggcaacgacaauuccacagcaacuuuguguuuagggcaccaugccgucccuaacggaacgaucguuaagaccauuacaaaugaucaaaucgaggugacuaacgcgaccgaacugguacagucuucaaguacaggugagauuugcaauagcccacaccagauccuagacggcgaaaacuguacccucauagaugcucugcuuggggacccgcagugcgauggauuucaaaauaaaaagugggaccuguucguggagagauccaaagcccauucuaacuguuaucccuacgaugucccugacuaugcaucguugaggucacucguggccagcaguggcacucuggaauuuaauaacgaguccuucaauuggacagguguuacccagaacgggacgucuagcgcuugcauccggcgcuccaauaacucauuuuucagucgacugaauuggcucacucacuuaaacuuuaaguacccagcacugaacgugaccaugcccaauaacgagcaguucgauaaacuuuauauuuggggaguccaucacccuggcacagacaaagaucagaucuuuuuguacgcccaagcugccggccguauuacugugagcaccaagagaucucagcaggcgguaaucccaaauauaggguccaggccccggguucgcaacauuccuucaagagugagcaucuauuggacaauugucaaaccaggagacauccugcuaaucaauaguaccgguaaccucauugcaccgaggggcuacuucaagauacggucugggaaauccagcaucaugcgcucggaugcccccauuggaaaguguaauucugcuugcaucacgccuaacggcuccauaccaaaugacaagcccuuucagaacgugaaucgaauuacuuacggugccuguccuagauaugugaaacaaaacacacugaaacuugcaaccgggaugaggaaugucccagaaaagcagacucggggaaucuucggcgcuaucgccggcuuuauugagaacgggugggaaggaaugguugacgguugguacggcuuccgucaccaaaauucagaggggcgcggacaggcggccgaucugaagaguacacaggcagcuaucgaccagauuaacggcaaauugaacagacucauagguaagaccaaugagaaauuccaucagaucgaaaaggaguuuagcgaaguggaggggaggauucaagaucuggaaaaguauguagaggacacgaaaaucgauuuaugguccuacaacgccgagcugcucguggcucuugaaaaucagcacaccaucgaccugacagauucugagaugaacaaguuguucgaaaagacuaagaaacagcuacgggagaaugccgaagacaugggcaacggaugcuuuaagauuuaucauaagugugauaaugcaugcauaggcagcauccgaaacgggaccuacgaccacgaugucuaucgcgacgaggcccugaauaacagauuccagauuaaaggaguggagcucaaggcugguuacaaagacuggauccuguggauuucauuugcgaucaguugcuuccuucuguguguugcauugcucggcuuuauaaugugggccugccaaaaggggaauaucagguguaacauuugcaucuga

SEQ ID NO: 138846 - RNA, 1701 nt, Artificial Sequence; identical to SEQ ID NO: 135030
  derived and/or modified CDS sequence (opt3) from hemagglutinin__InfluenzaA__AHC60875

SEQ ID NO: 138847 - RNA, 1701 nt, Artificial Sequence; identical to SEQ ID NO: 135030
  derived and/or modified CDS sequence (opt3) from hemagglutinin__InfluenzaA__AHC60887

SEQ ID NO: 138848 - RNA, 1701 nt, Artificial Sequence; identical to SEQ ID NO: 131459
  derived and/or modified CDS sequence (opt3) from hemagglutinin__InfluenzaA__AHC60899

SEQ ID NO: 138849 - RNA, 1701 nt, Artificial Sequence; identical to SEQ ID NO: 135830
  derived and/or modified CDS sequence (opt3) from hemagglutinin__InfluenzaA__AHC60911

SEQ ID NO: 138850 - RNA, 1701 nt, Artificial Sequence; identical to SEQ ID NO: 138666
  derived and/or modified CDS sequence (opt3) from hemagglutinin__InfluenzaA__AHC60923

SEQ ID NO: 138851 - RNA, 1701 nt, Artificial Sequence; identical to SEQ ID NO: 135830
  derived and/or modified CDS sequence (opt3) from hemagglutinin__InfluenzaA__AHC60935

SEQ ID NO: 138852 - RNA, 1701 nt, Artificial Sequence; identical to SEQ ID NO: 135030
  derived and/or modified CDS sequence (opt3) from hemagglutinin__InfluenzaA__AHC60947

SEQ ID NO: 138853 - RNA, 1701 nt, Artificial Sequence; identical to SEQ ID NO: 135830
  derived and/or modified CDS sequence (opt3) from hemagglutinin__InfluenzaA__AHC60959

SEQ ID NO: 138854 - RNA, 1701 nt, Artificial Sequence; identical to SEQ ID NO: 134903
  derived and/or modified CDS sequence (opt3) from hemagglutinin__InfluenzaA__AHC60971

SEQ ID NO: 138855 - RNA, 1701 nt, Artificial Sequence; identical to SEQ ID NO: 135830
  derived and/or modified CDS sequence (opt3) from hemagglutinin__InfluenzaA__AHC60983

SEQ ID NO: 138856 - RNA, 1701 nt, Artificial Sequence; identical to SEQ ID NO: 135030
  derived and/or modified CDS sequence (opt3) from hemagglutinin__InfluenzaA__AHC61007

SEQ ID NO: 138857 - RNA, 1701 nt, Artificial Sequence; identical to SEQ ID NO: 134903
  derived and/or modified CDS sequence (opt3) from hemagglutinin__InfluenzaA__AHC61019

SEQ ID NO: 138858 - RNA, 1701 nt, Artificial Sequence
  derived and/or modified CDS sequence (opt3) from hemagglutinin__InfluenzaA__AHC61031
augaagaccaucauugcccugagcuacauacucugccuuguguucgcucagaaacugcccggcaacgacaauuccacagcaacuuuguguuuagggcaccaugccgucccuaacggaacgaucguuaagaccauuacaaaugaucaaaucgaggugacuaacgcgaccgaacugguacagucuucaaguacaggugagauuugcaauagcccacaccagauccuagacggcgaaaacuguacccucauagaugcucugcuuggggacccgcagugcgauggauuucaaaauaaaaagugggaccuguucguggagagauccaaagcccauucuaacuguuaucccuacgaugucccugacuaugcaucguugaggucacucguggccagcaguggcacucuggaauuuaauaacgaguccuucaauuggacagguguuacccagaacgggacgucuagcgcuugcauccggcgcuccaauaacucauuuuucagucgacugaauuggcucacucacuuaaacuuuaaguacccagcacugaacgugaccaugcccaauaacgagcaguucgauaaacuuuauauuuggggaguccaucacccuggcacagacaaagaucagaucuuuuuguacgcccaagcugccggccguauuacugugagcaccaagagaucucagcaggcgguaaucccaaauauaggguccaggccccggguucgcaacauuccuucaagagugagcaucuauuggacaauugucaaaccaggagacauccugcuaaucaauaguaccgguaaccucauugcaccgaggggcuacuucaagauacggucugggaaauccagcaucaugcgcucggaugcccccauuggaaaguguaauucugcuugcaucacgccuaacggcuccauaccaaaugacaagcccuuucagaacgugaaucgaauuacuuacggugccuguccuagauaugugaaacaaaacacacugaaacuugcaaccgggaugaggaaugucccagaaaagcagacucggggaaucuucggcgcuaucgccggcuuuauugagaacgggugggaaggaaugguugacgguugguacggcuuccgucaccaaaauucagaggggcgcggacaggcggccgaucugaagaguacacaggcagcuaucgaccagauuaacggcaaauugaacagacucauagguaagaccaaugagaaauuccaucagaucgaaaaggaguuuagcgaaguggaggggaggauucaagaucuggaaaaguauguagaggacacgaaaaucgauuuaugguccuacaacgccgagcugcucguggcucuugaaaaucagcacaccaucgaccugacagauucugagaugaacaaguuguucgaaaagacuaagaaacagcuacgggagaaugccgaagacaugggcaacggaugcuuuaagauuuaucauaagugugauaaugcaugcauaggcagcauccgaaacgggaccuacgaccacgaugucuaucgcgacgaggcccugaauaacagauuccagauuaaaggaguggagcucaagucagguuacaaagacuggauccuguggauuaguuuugcuaucuccugcuuccuucuguguguuguguugcucggcuuuauaaugugggcgugccaaaaggggaauaucagguguaacauuugcaucuga

SEQ ID NO: 138859 - RNA, 1701 nt, Artificial Sequence; identical to SEQ ID NO: 135830
  derived and/or modified CDS sequence (opt3) from hemagglutinin__InfluenzaA__AHC61043

SEQ ID NO: 138860 - RNA, 1701 nt, Artificial Sequence
  derived and/or modified CDS sequence (opt3) from hemagglutinin__InfluenzaA__AHC61055
augaagaccaucauugcccugagcuacauacucugccuuguguucgcucagaaacugcccggcaacgacaauuccacagcaacuuuguguuuagggcaccaugccgucccuaacggaacgaucguuaagaccauuacaaaugaucaaaucgaggugacuaacgcgaccgaacugguacagucuucaaguacaggugagauuugcaauagcccacaccagauccuagacggcgaaaacuguacccucauagaugcucugcuuggggacccgcagugcgauggauuucaaaauaaaaagugggaccuguucguggagagauccaaagcccauucuaacuguuaucccuacgaugucccugacuaugcaucguugaggucacucguggccagcaguggcacucuggaauuuaauaacgaguccuucaauuggacagguguuacccagaacgggacgucuagcgcuugcauccggcgcuccaauaacucauuuuucagucgacugaauuggcucacucacuuaaacuuuaaguacccagcacugaacgugaccaugcccaauaacgagcaguucgauaaacuuuauauuuggggaguccaucacccuggcacagacaaagaucagaucuuuuuguacgcccaagcugccggccguauuacugugagcaccaagagaucucagcaggcgguaaucccaaauauaggguccaggccccggguucgcaacauuccuucaagagugagcaucuauuggacaauugucaaaccaggagacauccugcuaaucaauaguaccgguaaccucauugcaccgaggggcuacuucaagauacggucugggaaauccagcaucaugcgcucggaugcccccauuggaaaguguaauucugcuugcaucacgccuaacggcuccauaccaaaugacaagcccuuucagaacgugaaucgaauuacuuacggugccuguccuagauaugugaaacaaaacacacugaaacuugcaaccgggaugaggaaugucccagaaaagcagacucggggaaucuucggcgcuaucgccggcuuuauugagaacgggugggaaggaaugguugacgguugguacggcuuccgucaccaaaauucagaggggcgcggacaggcggccgaucugaagaguacacaggcagcuaucgaccagauuaacggcaaauugaacagacucauagguaagaccaaugagaaauuccaucagaucgaaaaggaguuuagcgaaguggaggggaggauucaaaaccuggaaaaguauguagaggauacgaaaaucgacuuaugguccuacaaugccgagcugcucguggcucuugaaaaccagcacaccaucgaucugacagacucugagaugaauaaguuguucgaaaagacuaagaaacagcuacgggagaacgccgaagauaugggcaauggaugcuuuaagauuuaucauaagugugacaacgcaugcauaggcagcauccgaaaugggaccuacgaucacgacgucuaucgcgaugaggcccugaacaauagauuccagauuaaaggaguggagcucaagucagguuacaaagacuggauccuguggauuaguuuugcuaucuccugcuuccuucuguguguugcguugcucggcuuuauaaugugggcaugccaaaaggggaacaucagguguaauauuugcaucuga

SEQ ID NO: 138861 - RNA, 1701 nt, Artificial Sequence; identical to SEQ ID NO: 138727
  derived and/or modified CDS sequence (opt3) from hemagglutinin__InfluenzaA__AHC61067

SEQ ID NO: 138862 - RNA, 1701 nt, Artificial Sequence; identical to SEQ ID NO: 137122
  derived and/or modified CDS sequence (opt3) from hemagglutinin__InfluenzaA__AHC61079

SEQ ID NO: 138863 - RNA, 1701 nt, Artificial Sequence; identical to SEQ ID NO: 135030
  derived and/or modified CDS sequence (opt3) from hemagglutinin__InfluenzaA__AHC61103

SEQ ID NO: 138864 - RNA, 1701 nt, Artificial Sequence; identical to SEQ ID NO: 135030
  derived and/or modified CDS sequence (opt3) from hemagglutinin__InfluenzaA__AHC61115

SEQ ID NO: 138865 - RNA, 1701 nt, Artificial Sequence; identical to SEQ ID NO: 135830
  derived and/or modified CDS sequence (opt3) from hemagglutinin__InfluenzaA__AHC61127

SEQ ID NO: 138866 - RNA, 1701 nt, Artificial Sequence
  derived and/or modified CDS sequence (opt3) from hemagglutinin__InfluenzaA__AHC61139
augaagaccaucauugcccugagcuacauacucugccuuguguucgcucagaaacugcccggcaacgacaauuccacagcaacuuuguguuuagggcaccaugccgucccuaacggaacgaucguuaagaccauuacaaaugaucaaaucgaggugacuaacgcgaccgaacugguacagucuucaaguacaggugagauuugcaauagcccacaccagauccuagacggcgaaaacuguacccucauagaugcucugcuuggggacccgcagugcgauggauuucaaaauaaaaagugggaccuguucguggagagauccaaagcccauucuaacuguuaucccuacgaugucccugacuaugcaucguugaggucacucguggccagcaguggcacucuggaauuuaauaacgaguccuucaauuggacagguguuacccagaacgggacgucuagcgcuugcauccggcgcuccaauaacucauuuuucagucgacugaauuggcucacucacuuaaacuuuaaguacccagcacugaacgugaccaugcccaauaacgagcaguucgauaaacuuuauauuuggggaguccaucacccuggcacagacaaggaucagaucuuuuuguacgcccaagcuagcggccguauuacugugucuacccagagaucccagcaggccguaaucccaaauauagggucaaggccccggguucgcaacauuccuagcagagugaguaucuauuggacaauugucaagccaggagacauccugcuaaucaauucuaccgguaaccucauugcgccgaggggcuacuucaaaauacgguccggaaagagcucgaucaugcgcucugaugcacccauugggaaauguaauuccgccugcaucacgccuaacggcucaauaccaaaugacaagcccuuucaaaacgugaaucgaauuacuuacggugcuuguccuagauaugugaagcagaacacacugaaacuugccaccgggaugaggaaugucccagaaaagcagacucggggaaucuucggcgcaaucgcuggcuuuauugagaacgggugggaaggaaugguugacgguugguacggcuuccgucaccaaaauagugaggggcgcggacaggccgcggaucugaaaagcacacaggccgcaaucgaccagauuaacggcaaguugaacagacucauagguaaaaccaaugagaaguuccaucaaaucgaaaaagaguuuuccgaaguggaggggaggauucaggaucuggaaaaguauguagaggacacgaagaucgauuuauggucuuacaacgcugagcugcucguggcccuugaaaaucagcacaccaucgaccugacagauagcgagaugaacaaauuguucgaaaagacuaaaaagcagcuacgggagaaugcugaagacaugggcaacggaugcuuuaaaauuuaucauaagugugauaaugccugcauaggcucaauccgaaacgggaccuacaaucacgacgucuaucgcgaugaggcacugaacaauagauuccaaauuaagggaguggagcucaaaagugguuacaaggacuggauccuguggauuuccuuugccaucagcugcuuccuucuguguguugcuuugcucggcuuuauaaugugggcgugccagaaagggaacaucagguguaauauuugcaucuga

SEQ ID NO: 138867 - RNA, 1701 nt, Artificial Sequence; identical to SEQ ID NO: 135030
  derived and/or modified CDS sequence (opt3) from hemagglutinin__InfluenzaA__AHC61151

SEQ ID NO: 138868 - RNA, 1701 nt, Artificial Sequence
  derived and/or modified CDS sequence (opt3) from hemagglutinin__InfluenzaA__AHC61163
augaagaccaucauugcccugagcuacauacucugccuuguguucgcucagaaacugcccggcaacgacaauuccacagcaacuuuguguuuagggcaccaugccgucccuaacggaacgaucguuaagaccauuacaaaugaucaaaucgaggugacuaacgcgaccgaacugguacagucuucaaguacaggugagauuugcaauagcccacaccagauccuagacggcgaaaacuguacccucauagaugcucugcuuggggacccgcagugcgauggauuucaaaauaaaaagugggaccuguucguggagagauccaaagcccauucuaacuguuaucccuacgaugucccugacuaugcaucguugaggucacucguggccagcaguggcacucuggaauuuaagaaugaguccuucaacuggacagguguuacccagaaugggacgucuagcgcuugcauccggcgcuccaacaauucauuuuucagucgacugaacuggcucacucacuuaaauuuuaaguacccagcacugaacgugaccaugcccaacaaugagcaguucgauaaacuuuauauuuggggaguccaucacccuggcacagacaaggaucagaucuuuuuguacgcccaagcuagcggccguauuacugugucuaccaaaagaucccagcaggccguaguuccaaacaucgggucaaggccccgggugcgcaauauaccuagcagagucaguauuuauuggacaaucgugaagccaggagacauucugcuaaucaacucuaccgguaaucucaucgcgccgaggggcuacuucaaaauucgguccggaaagagcucgauaaugcgcucugaugcacccaucgggaaguguaacuccgccugcauuacgccuaauggcucaaucccaaacgacaaacccuuucagaaugugaaccgaauaacuuacggugcuuguccuagauaugucaagcaaaauacacugaaacuugccaccgggaugaggaacguuccagaaaagcagacucggggaauuuucggcgcaaucgcuggcuuuaucgagaaugggugggaaggaaugguggacgguugguacggcuuccgucaccagaacagugaggggcgcggacaagccgcggaucugaaaagcacacaggccgcaauugaccagaucaauggcaaguugaacagacucauugguaaaaccaacgagaaguuccaucagauagaaaaggaguuuuccgaaguagaggggaggauccaagaucuggaaaaauauguggaggacacgaagauugauuuauggucuuacaaugcugagcugcucgucgcccuugaaaaccagcacaccaucgaccugacagauagcgagaugaauaaauuguucgaaaagacuaaaaagcagcuacgggagaacgcugaagacaugggcaauggaugcuuuaagaucuaucauaaaugugauaacgccugcauuggcucaauacgaaaugggaccuacgaccacgauguguaucgcgacgaggcacugaacaauagauuccagaucaagggaguugagcucaaaagugguuacaaggacuggauucuguggaucuccuuugccauuagcugcuuccuucuguguguggcuuugcucggcuuuaucaugugggcgugccaaaaagggaacauaagguguaauaucugcauuuga

SEQ ID NO: 138869 - RNA, 1701 nt, Artificial Sequence; identical to SEQ ID NO: 135830
  derived and/or modified CDS sequence (opt3) from hemagglutinin__InfluenzaA__AHC61175

SEQ ID NO: 138870 - RNA, 1701 nt, Artificial Sequence; identical to SEQ ID NO: 135030
  derived and/or modified CDS sequence (opt3) from hemagglutinin__InfluenzaA__AHC61187

SEQ ID NO: 138871 - RNA, 1701 nt, Artificial Sequence; identical to SEQ ID NO: 134903
  derived and/or modified CDS sequence (opt3) from hemagglutinin__InfluenzaA__AHC61199

SEQ ID NO: 138872 - RNA, 1701 nt, Artificial Sequence; identical to SEQ ID NO: 138666
  derived and/or modified CDS sequence (opt3) from hemagglutinin__InfluenzaA__AHC61211

SEQ ID NO: 138873 - RNA, 1701 nt, Artificial Sequence; identical to SEQ ID NO: 134903
  derived and/or modified CDS sequence (opt3) from hemagglutinin__InfluenzaA__AHC61223

SEQ ID NO: 138874 - RNA, 1701 nt, Artificial Sequence; identical to SEQ ID NO: 135030
  derived and/or modified CDS sequence (opt3) from hemagglutinin__InfluenzaA__AHC61235

SEQ ID NO: 138875 - RNA, 1701 nt, Artificial Sequence; identical to SEQ ID NO: 135830
  derived and/or modified CDS sequence (opt3) from hemagglutinin__InfluenzaA__AHC61247

SEQ ID NO: 138876 - RNA, 1701 nt, Artificial Sequence; identical to SEQ ID NO: 135830
  derived and/or modified CDS sequence (opt3) from hemagglutinin__InfluenzaA__AHC61259

SEQ ID NO: 138877 - RNA, 1701 nt, Artificial Sequence; identical to SEQ ID NO: 135030
  derived and/or modified CDS sequence (opt3) from hemagglutinin__InfluenzaA__AHC61271

SEQ ID NO: 138878 - RNA, 1701 nt, Artificial Sequence; identical to SEQ ID NO: 134903
  derived and/or modified CDS sequence (opt3) from hemagglutinin__InfluenzaA__AHC61283

SEQ ID NO: 138879 - RNA, 1701 nt, Artificial Sequence; identical to SEQ ID NO: 137122
  derived and/or modified CDS sequence (opt3) from hemagglutinin__InfluenzaA__AHC61295

SEQ ID NO: 138880 - RNA, 1701 nt, Artificial Sequence; identical to SEQ ID NO: 138734
  derived and/or modified CDS sequence (opt3) from hemagglutinin__InfluenzaA__AHC61307

SEQ ID NO: 138881 - RNA, 1701 nt, Artificial Sequence; identical to SEQ ID NO: 135030
  derived and/or modified CDS sequence (opt3) from hemagglutinin__InfluenzaA__AHC61319

SEQ ID NO: 138882 - RNA, 1701 nt, Artificial Sequence; identical to SEQ ID NO: 138666
  derived and/or modified CDS sequence (opt3) from hemagglutinin__InfluenzaA__AHC61331

SEQ ID NO: 138883 - RNA, 1701 nt, Artificial Sequence
  derived and/or modified CDS sequence (opt3) from hemagglutinin__InfluenzaA__AHC61343
augaagaccaucauugcccugagcuacauacucugccuuguguucgcucagaaacugcccggcaacgacaauuccacagcaacuuuguguuuagggcaccaugccgucccuaacggaacgaucguuaagaccauuacaaaugaucaaaucgaggugacuaacgcgaccgaacugguacagucuucaaguacaggugagauuugcaauagcccacaccagauccuagacggcgaaaacuguacccucauagaugcucugcuuggggacccgcagugcgauggauuucaaaauaaaaagugggaccuguucguggagagauccaaagcccauucuaacuguuaucccuacgaugucccugacuaugcaucguugaggucacucguggccagcaguggcacucuggaauuuaauaacgaguccuucaauuggacagguguuacccagaacgggacgucuagcgcuugcauccggggauccaauaacucauuuuucagucgccugaauuggcucacucacuuaaacuuuaaguacccagcacugaacgugaccaugcccaauaacgagcaguucgauaagcuguauauuuggggcguccaucacccuggcacagacaaagaucagaucuuuuuguacgcccaagcuagcgggcgaauuacugugucuaccaagcguucccagcaggccguaaucccaaauauaggaucaagacccaggguucggaacauuccuagccgcaucaguauuuauuggacaaucgugaaaccaggugacauccugcuaauuaauucuaccggcaaccucauagcgccgagaggguacuucaagaucagguccggaaaaagcucgauuaugcggucugaugcacccaucggcaaguguaauuccgccugcauaacgccuaacgguucaauuccaaaugacaagcccuuucagaacgucaaucgcaucacuuacggggcuuguccucgauaugugaaacaaaacacacugaaacuugccaccggaaugagaaaugugccagaaaaacagacuaggggcaucuucggcgcaauugcuggguuuaucgagaacggaugggaagguauggucgacggcugguacggguuccggcaccagaauagugagggacguggccaagccgcggaucuuaagagcacacaggccgcaauugaccagauaaacgguaaauugaaccgccucaucgggaagaccaaugagaaauuccaucagauugaaaaggaguuuuccgaaguugagggcagaauccaagaucuggaaaaguauguggaggacacgaaaaucgauuuauggucuuacaacgcugagcugcucguagcccuugaaaaucagcacaccauugaccugacagauagcgagaugaacaaguuguucgaaaagacuaagaaacagcuaagggagaaugcugaagacaugggaaacggcugcuuuaagauauaucauaagugugauaaugccugcaucgggucaauucggaacggaaccuacgaccacgauguguaucgagacgaggcacugaauaaccgcuuccagaucaaaggugucgagcucaagaguggcuacaaagacuggauucuguggaucuccuuugccauaagcugcuuccuucuguguguggcuuugcucggguuuaucaugugggcgugccaaaagggaaauauuagauguaacaucugcauuuga

SEQ ID NO: 138884 - RNA, 1701 nt, Artificial Sequence; identical to SEQ ID NO: 134903
  derived and/or modified CDS sequence (opt3) from hemagglutinin__InfluenzaA__AHC61355

SEQ ID NO: 138885 - RNA, 1701 nt, Artificial Sequence; identical to SEQ ID NO: 134903
  derived and/or modified CDS sequence (opt3) from hemagglutinin__InfluenzaA__AHC61367

SEQ ID NO: 138886 - RNA, 1701 nt, Artificial Sequence; identical to SEQ ID NO: 135030
  derived and/or modified CDS sequence (opt3) from hemagglutinin__InfluenzaA__AHC61379

SEQ ID NO: 138887 - RNA, 1701 nt, Artificial Sequence; identical to SEQ ID NO: 134903
  derived and/or modified CDS sequence (opt3) from hemagglutinin__InfluenzaA__AHC61391

SEQ ID NO: 138888 - RNA, 1701 nt, Artificial Sequence
  derived and/or modified CDS sequence (opt3) from hemagglutinin__InfluenzaA__AHC61403
augaagaccaucauugcccugagcuacauacucugccuuguguucgcucagaaacugcccggcaacgacaauuccacagcaacuuuguguuuagggcaccaugccgucccuaacggaacgaucguuaagaccauuacaaaugaucaaaucgaggugacuaacgcgaccgaacugguacagucuucaaguacaggugagauuugcaauagcccacaccagauccuagacggcgaaaacuguacccucauagaugcucugcuuggggacccgcagugcgauggauuucaaaauaaaaagugggaccuguucguggagagauccaaagcccauucuaacuguuaucccuacgaugucccugacuaugcaucguugaggucacucguggccagcaguggcacucuggaauuuaauaacgaguccuucaauuggacagguguuacccagaacgggacgucuagcgcuugcauccggcgcuccaauaacucauuuuucagucgacugaauuggcucacucacuuaaacuuuaaguacccagcacugaacgugaccaugcccaauaacgagcaguucgauaaacuuuauauuuggggaguccaucacccuggcacagacaaagaucagaucuuuuuguacgcccaagcuagcggccguauuacugugucuaccaagagaucccagcaggccguaaucccaaauauagggucaaggccccggguucgcaacauuccuagcagagugaguaucuauuggacaauugucaaaccaggagacauccugcuaaucaauucuaccgguaaccucauugcgccgaggggcuacuucaagauacgguccgggaaaagcucgaucaugcgcucugaugcacccauuggaaaguguaauuccgccugcaucacgccuaacggcucaauaccaaaugacaagcccuuucagaacgugaaucgaauuacuuacggugcuuguaguagauaugugaaacaaaacacacugaaacuugccaccgggaugaggaaugucccugaaaagcagacucggggaaucuucggcgcaaucgcuggcuuuauugagaacgggugggaaggaaugguugacgguugguacggcuuccgucaccagaauagcgaggggcgcggacaagccgcggaucugaaguccacacaggccgcaaucgaccagauuaacggcaaauugaacagacucauagguaagaccaaugagaaauuccaucagaucgaaaaggaguuuucugaaguggaggggaggauucaagaucuggaaaaguauguagaggacacgaaaaucgauuuauggagcuacaacgcugagcugcucguggcccuugaaaaucagcacaccaucgaccugacagauucagagaugaacaaguuguucgaaaagacuaagaaacagcuacgggagaaugcugaagacaugggcaacggaugcuuuaagauuuaucauaagugugauaaugccugcauaggcaguauccgaaacgggaccuacgaccacgaugucuaucgcgacgaggcacugaauaacagauuccagauuaaaggaguggagcucaaguccgguuacaaagacuggauccuguggauuagcuuugccaucucuugcuuccuucuguguguugcuuugcucggcuuuauaaugugggcgugccaaaaggggaauaucagguguaacauuugcaucuga

SEQ ID NO: 138889 - RNA, 1701 nt, Artificial Sequence; identical to SEQ ID NO: 135030
  derived and/or modified CDS sequence (opt3) from hemagglutinin__InfluenzaA__AHC61415

SEQ ID NO: 138890 - RNA, 1701 nt, Artificial Sequence
  derived and/or modified CDS sequence (opt3) from hemagglutinin__InfluenzaA__AHC61427
augaagaccaucauugcccugagcuacauacucugccuuguguucgcucagaaacugcccggcaacgacaauuccacagcaacuuuguguuuagggcaccaugccgucccuaacggaacgaucguuaagaccauuacaaaugaucaaaucgaggugacuaacgcgaccgaacugguacagucuucaaguacaggugagauuugcaauagcccacaccagauccuagacggcgaaaacuguacccucauagaugcucugcuuggggacccgcagugcgauggauuucaaaauaacaaaugggaccuguucguggagagauccaaggcccauucuaauuguuaucccuacgaugucccugacuaugcaucguugaggucacucguggccagcaguggcacucuggaauuuaacaaugaguccuucaacuggacagguguuacccagaaugggacgucuagcgcuugcauccggcgcuccaacaauucauuuuucagucgacugaacuggcucacucacuuaaacuuuaaauacccagcacugaaugugaccaugcccaacaaugagcaguucgauaaacuuuauauuuggggaguccaucacccuggcacagacaaggaucagaucuuuuuguacgcccaagcugccggccguauuacugugagcaccaagagaucucagcaggcgguaaucccaaacauaggguccaggccccggguucgcaauauuccuucaagagugagcaucuauuggacaauugucaagccaggagacauccugcuaaucaacaguaccgguaaucucauugcaccgaggggcuacuucaaaauacggucugggaaguccagcaucauucgcucggaugcccccaucggaaaauguaacucugcuugcauaacgccuaauggcuccauuccaaacgacaagcccuuucagaaugugaaccgaaucacuuacggugccuguccuagauaugugaagcaaaauacacugaaacuugcaaccgggaugaggaacgucccagaaaagcagacucggggaaucuucggcgcuauugccggcuuuaucgagaaugggugggaaggaaugguugacgguugguacggcuuccgucaccagaacucagaggggcgcggacaagcggccgaucugaaaaguacacaggcagcuauugaccagauaaacggcaaguugaauagacucaucgguaaaaccaacgagaaguuccaucagauugaaaaagaguuuagcgaaguggaggggaggauccaagaucuggaaaaguauguagaggacacgaagaucgauuuaugguccuacaaugccgagcugcucguggcucuugaaaaccagcacaccauugaccugacagauucugagaugaauaaauuguucgaaaagacuaaaaagcagcuacgggagaacgccgaagacaugggcaauggaugcuuuaaaauauaucauaagugugauaacgcaugcaucggcagcauucgaaaugggaccuacgaccacgaugucuaucgcgacgaggcccugaacaauagauuccagaucaagggaguggagcucaaaucagguuacaaggacuggauucuguggaucaguuuugcuauauccugcuuccuucuguguguugcguugcucggcuuuaucaugugggcaugccaaaaagggaacauuagguguaauaucugcauuuga

SEQ ID NO: 138891 - RNA, 1701 nt, Artificial Sequence
  derived and/or modified CDS sequence (opt3) from hemagglutinin__InfluenzaA__AHC61439
augaagaccaucauugcccugagcuacauacucugccuuguguucgcucagaaacugcccggcaacgacaauuccacagcaacuuuguguuuagggcaccaugccgucccuaacggaacgaucguuaagaccauuacaaaugaucaaaucgaggugacuaacgcgaccgaacugguacagucuucaaguacaggugagauuugcaauagcccacaccagauccuagacggcgaaaacuguacccucauagaugcucugcuuggggacccgcagugcgauggauuucaaaauaaaaagugggaccuguucguggagagauccaaagcccauucuaacuguuaucccuacgaugucccugacuaugcaucguugaggucacucguggccagcaguggcacucuggaauuuaauaacgaguccuucaauuggacagguguuacccagaacgggacgucuagcgcuugcauccggcgcuccaauaacucauuuuucagucgacugaauuggcucacucacuuaaacuuuaaguacccagcacugaacgugaccaugcccaauaacgagcaguucgauaaacuuuauauuuggggaguccaucacccuggcacagacaaagaucagaucuuuuuguacgcccaagcugccggccguauuacugugagcaccaagagaucucagcaggcgguaaucccaaauauaggguccaggccccggguucgcaacauuccuucaagagugagcaucuauuggacaauugucaaaccaggagacauccugcuaaucaauaguaccgguaaccucauugcaccgaggggcuacuucaagauacggucugggaaauccagcaucaugcgcucggaugcccccauuggaaaguguaauucuacgugcaucacuccuaacggcuccauaccaaaugacaagcccuuucagaacgugaaucgaauuacauacggugcuuguccuagauaugugaaacaaaacacccugaaacuugccacugggaugaggaaugucccagaaaagcagacacggggaaucuucggcgcaaucgcuggcuuuauugagaacgggugggaaggaaugguugacgguugguacggcuuccgucaccaaaauucagaggggcgcggacaggccgcggaucugaagaguacccaggccgcaaucgaccagauuaacggcaaauugaacagacucauagguaagacgaaugagaaauuccaucagaucgaaaaggaguuuagcgaaguggaggggaggauucaagaucuggaaaaguauguagaggacaccaaaaucgauuuaugguccuacaacgcugagcugcucguggcccuugaaaaucagcacacaaucgaccugacugauucugagaugaacaaguuguucgaaaagaccaagaaacagcuacgggagaaugcugaagacaugggcaacggaugcuuuaagauuuaucauaagugugauaaugccugcauaggcagcauccgaaacgggacauacgaccacgaugucuaucgcgacgaggcacugaauaacagauuccagauuaaaggaguggagcucaagucagguuacaaagacuggauccuguggauuaguuuugccaucuccugcuuccuucuguguguugcuuugcucggcuuuauaaugugggcgugccaaaaggggaauaucagguguaacauuugcaucuga

SEQ ID NO: 138892 - RNA, 1701 nt, Artificial Sequence; identical to SEQ ID NO: 134903
  derived and/or modified CDS sequence (opt3) from hemagglutinin__InfluenzaA__AHC61451

SEQ ID NO: 138893 - RNA, 1701 nt, Artificial Sequence; identical to SEQ ID NO: 134903
  derived and/or modified CDS sequence (opt3) from hemagglutinin__InfluenzaA__AHC61463

SEQ ID NO: 138894 - RNA, 1701 nt, Artificial Sequence; identical to SEQ ID NO: 135830
  derived and/or modified CDS sequence (opt3) from hemagglutinin__InfluenzaA__AHC61475

SEQ ID NO: 138895 - RNA, 1701 nt, Artificial Sequence; identical to SEQ ID NO: 135030
  derived and/or modified CDS sequence (opt3) from hemagglutinin__InfluenzaA__AHC61487

SEQ ID NO: 138896 - RNA, 1701 nt, Artificial Sequence; identical to SEQ ID NO: 135830
  derived and/or modified CDS sequence (opt3) from hemagglutinin__InfluenzaA__AHC61499

SEQ ID NO: 138897 - RNA, 1701 nt, Artificial Sequence; identical to SEQ ID NO: 134903
  derived and/or modified CDS sequence (opt3) from hemagglutinin__InfluenzaA__AHC61511

SEQ ID NO: 138898 - RNA, 1701 nt, Artificial Sequence; identical to SEQ ID NO: 137122
  derived and/or modified CDS sequence (opt3) from hemagglutinin__InfluenzaA__AHC61523

SEQ ID NO: 138899 - RNA, 1701 nt, Artificial Sequence
  derived and/or modified CDS sequence (opt3) from hemagglutinin__InfluenzaA__AHC61535
augaagaccaucauugcccugagcuacauacucugccuuguguucgcucagaaacugcccggcaacgacaauuccacagcaacuuuguguuuagggcaccaugccgucccuaacggaacgaucguuaagaccauuacaaaugaucaaaucgaggugacuaacgcgaccgaacugguacagucuucaaguacaggugagauuugcaauagcccacaccagauccuagacggcgaaaacuguacccucauagaugcucugcuuggggacccgcagugcgauggauuucaaaauaaaaagugggaccuguucguggagagauccaaagcccauucuaacuguuaucccuacgaugucccugacuaugcaucguugaggucacucguggccagcaguggcacucuggaauuuaauaacgaguccuucaauuggacagguguuacccagaacgggacgucuagcgcuugcauccggcgcuccaauaacucauuuuucagucgacugaauuggcucacucacuuaaacuuuaaguacccagcacugaacgugaccaugcccaauaacgagcaguucgauaagcuguauauuuggggaguccaucacccuggcacagacaaagaucagaucuuuuuguacgcccaagcuagcggccguauuacugugucuaccaagagaucccagcaggccguaaucccaaauauagggucaaggccccggguucgcaacauuccuagcagagugaguaucuauuggacaauugucaaaccaggagacauccugcuaaucaauucuaccgguaaccucauugcgccgaggggcuacuucaagauacgguccgggaaaagcucgaucaugcgcucugaugcacccauuggaaaguguaauuccgccugcaucacgccuaacggcucaauaccaaaugacaagcccuuucagaacgugaaucgaauuacuuacggugcuuguccuagauaugugaaacaaaacacacugaaacuugccaccgggaugaggaaugucccagaaaaacagacucggggaaucuucggcgcaaucgcuggcuuuauugagaacgggugggaaggaaugguugacgguugguacggcuuccgucaccagaauagugaggggcgcggacaagccgcggaucuuaagagcacacaggccgcaaucgaccagauuaacggcaaauugaacagacucauagguaagaccaaugagaaauuccaucagaucgaaaaggaguuuuccgaaguggaggggaggauucaagaucuggaaaaguauguagaggacacgaaaaucgauuuauggucuuacaacgcugagcugcucguggcccuugaaaaucagcacaccaucgaccugacagauagcgagaugacuaaguuguucgaaaagaccaagaaacagcuacgggagaacgcugaagacaugggcaauggaugcuuuaagauuuaucauaagugugauaacgccugcauaggcucaauccgaaaugggacauacgaccacgaugucuaucgcgacgaggcacugaacaauagauuccagauuaaaggaguggagcucaagagugguuacaaagacuggauccuguggauuuccuuugccaucagcugcuuccuucuguguguugcuuugcucggcuuuauaaugugggcgugccaaaaggggaacaucagguguaauauuugcaucuga

SEQ ID NO: 138900 - RNA, 1701 nt, Artificial Sequence; identical to SEQ ID NO: 134903
  derived and/or modified CDS sequence (opt3) from hemagglutinin__InfluenzaA__AHC61547

SEQ ID NO: 138901 - RNA, 1701 nt, Artificial Sequence
  derived and/or modified CDS sequence (opt3) from hemagglutinin__InfluenzaA__AHC61559
augaagaccaucauugcccugagcuacauacucugccuuguguucgcucagaaacugcccggcaacgacaauuccacagcaacuuuguguuuagggcaccaugccgucccuaacggaacgaucguuaagaccauuacaaaugaucaaaucgaggugacuaacgcgaccgaacugguacaaaauucuucaacaggugagauuugcgacaguccacaccagaucauagauggcgaaaacuguacccuaaucgacgcucuccugggggauccgcagugcgacggauuucagaauaaaaagugggaucuuuucguggagagaagcaaagccuauuccaacuguuaccccuaugacgucccugauuacgcaucucugaggucguugguggccucaagcggcacucucgaauuuaauaacgagaguuucaauuggacagguguuacccagaacgggacguccucugcuugcauucggcgcagcaauaacuccuuuuucucacgacugaauuggcugacucaucucaacuuuaaguauccagcauuaaacgugaccaugcccaauaacgagcaguucgacaagcuguacaucuggggaguccaccauccuggcacagauaaagaccagauuuuucuuuaugcccaagcuaguggccguaucacugugagcaccaagagaucucagcaggccguaauaccaaauauuggguccaggccccggguucgcaacaucccuucaagaauuagcaucuacuggacaaucgugaaaccaggagauauuuugcugauaaauaguaccgguaaccuaaucgcgccgaggggcuacuucaagauucggucugggaaauccagcaucaugcgcucggacgcacccauaggaaaguguaauucugaaugcauuacgccuaacggcuccaucccaaaugacaagcccuuucagaacgucaaucgaaucacuuauggugccuguccuagauacgugaaacaaaacacacucaagcuggcuaccgggaugaggaaugugccagagaaacagacucggggaauuuucggcgccaucgcaggcuuuauugaaaacgggugggagggaauggucgaugguugguauggcuuccgucaccaaaauucagaggggcgcggacaggcugccgaccuuaagaguacacaggcggccauagaucagaucaacggcaaacugaacagauugauuaggaagaccaaugaaaaauuccaccagaucgagaaggaauuuagcgagguugaaggucggauccaagaccucgagaaguacguggaggauacgaaaauugaccugugguccuauaacgcagaauuacugguagcucucgagaaucagcauaccauagaucuuacagacucugaaaugaacaagcuguucgagaaaacuaagaaacaguugcgagaaaaugccgaggauauggggaacggcugcuuuaagaucuaccacaagugugacaaugcuugcauuggaagcauccgcaacggcaccuaugaucaugacguguacagagacgaggcccuaaauaacagguuccagauuaaaggggucgaacugaagucaggacacaaagauuggauccucuggauaaguuuugcaaucuccugcuuccugcuuuguguggcccuguuggguuuuauuaugugggcuugccaaaagggcaauauccgguguaacauuugcaucuga

SEQ ID NO: 138902 - RNA, 1701 nt, Artificial Sequence; identical to SEQ ID NO: 137122
  derived and/or modified CDS sequence (opt3) from hemagglutinin__InfluenzaA__AHC61571

SEQ ID NO: 138903 - RNA, 1701 nt, Artificial Sequence; identical to SEQ ID NO: 134903
  derived and/or modified CDS sequence (opt3) from hemagglutinin__InfluenzaA__AHC61583

SEQ ID NO: 138904 - RNA, 1701 nt, Artificial Sequence; identical to SEQ ID NO: 137122
  derived and/or modified CDS sequence (opt3) from hemagglutinin__InfluenzaA__AHC61595

SEQ ID NO: 138905 - RNA, 1701 nt, Artificial Sequence
  derived and/or modified CDS sequence (opt3) from hemagglutinin__InfluenzaA__AHC61607
augaagaccaucauugcccugagcuacauacucugccuuguguucgcucagaaacugcccggcaacgacaauuccacagcaacuuuguguuuagggcaccaugccgucccuaacggaacgaucguuaagaccauuacaaaugaucaaaucgaggugacuaacgcgaccgaacugguacaaaauucuucaacaggugagauuugcgacaguccacaccagauccuagauggcgaaaacuguacccucauagacgcucugcuuggggauccgcagugcgacggauuucagaauaaaaagugggaucuguucguggagagaagcaaagccuauuccaacuguuaccccuaugacgucccugauuacgcaucuuugaggucgcucguggccucaagcggcacucuggaauuuaauaacgagaguuucaauuggacagguguuacccagaacgggacguccucugcuugcauccggcgcagcaauaacuccuuuuucucacgacugaauuggcucacucauuuaaacuuuaaguauccagcacugaacgugaccaugcccaauaacgagcaguucgacaaacuuuacauuuggggaguccaccauccuggcacagauaaggaccagaucuuuuuguaugcccaagcuaguggccguauuacugugagcaccaagagaucucagcaggccguaaucccaaauauaggguccaggccccggguucgcaacauuccuucaagaaucagcauuuacuggacaaucgugaaaccaggagauauccugcuaauuaauaguaccgguaaccucauagcgccgaggggcuacuucaagauccggucugggaaauccagcauuaugcgcucggacgcacccaucggaaaguguaauucugaaugcauaacgccuaacggcuccauuccaaaugacaagcccuuucagaacgucaaucgaaucacuuauggugccuguccuagauacgugaaacaacacacacugaaacuugcuaccgggaugaggaacgugccagagaagcagacucggggaaucuucggcgccauugcaggcuuuaucgaaaaugggugggagggaauggucgaugguugguauggcuuccgucaccagaacucagaggggcgcggacaagcugccgaccugaagaguacacaggcggccauugaucagauaaauggcaaauugaacagacucaucgguaagaccaacgaaaaauuccaucagauugagaaggaauuuagcgagguugaagggaggauccaagaccuggagaaguacguggaggauacgaaaaucgacuuaugguccuauaaugcagaacugcucguagcucuugagaaccagcacaccauugaucugacagacucugaaaugaauaaguuguucgagaaaacuaagaaacagcuacgggaaaacgccgaggauaugggcaauggaugcuuuaagauauaccauaagugugacaacgcuugcaucggcagcauucgaaaugggaccuaugaucacgacguguaccgcgacgaggcccugaacaauagauuccagaucaaaggagucgaacucaagucagguuacaaagauuggauucuguggaucaguuuugcaauauccugcuuccuucuguguguggccuugcucggcuuuaucaugugggcuugccaaaaggggaacauuagguguaauaucugcauuuga

SEQ ID NO: 138906 - RNA, 1701 nt, Artificial Sequence; identical to SEQ ID NO: 137122
  derived and/or modified CDS sequence (opt3) from hemagglutinin__InfluenzaA__AHC61619

SEQ ID NO: 138907 - RNA, 1701 nt, Artificial Sequence
  derived and/or modified CDS sequence (opt3) from hemagglutinin__InfluenzaA__AHC61631
augaagaccaucauugcccugagcuacauacucugccuuguguucgcucagaaacugcccggcaacgacaauuccacagcaacuuuguguuuagggcaccaugccgucccuaacggaacgaucguuaagaccauuacaaaugaucaaaucgaggugacuaacgcgaccgaacugguacagucuucaaguacaggugagauuugcaauagcccacaccagauccuagacggcgaaaacuguaccauaaucgaugcucuccugggggacccgcagugcgauggauuucaaaauaaaaagugggaccuuuucguggagagauccaaagcccauucuaacuguuaucccuacgaugucccugacuaugcaucgcugaggucauugguggccagcaguggcacucucgaauuuaauaacgaguccuucaauuggacagguguuacccagaacgggacgucuagcgcuugcauucggcgcuccaauaacucauuuuucagucgacugaauuggcugacucaccucaacuuuaaguacccagcauuaaacgugaccaugcccaauaacgagcaguucgauaagcuguauaucuggggaguccaucacccuggcacagacaaagaucagauuuuucuuuacgcccaagcugccggccguaucacugugagcaccaagagaucucagcaggcgguaauaccaaauauuggguccaggccccggguucgcaacaucccuucaagagugagcauuuauuggacaaucgucaaaccaggagacaucuugcugauuaauaguaccgguaaccuaauagcaccgaggggcuacuucaagauccggucugggaaauccagcauuaugcgcucggaugcccccaucggaaaguguaauucugcuugcauaacgccuaacggcuccauuccaaaugacaagcccuuucagaacgugaaucgaaucacuuacggugccuguccuagauaugugaaacaaaacacacucaagcuggcaaccgggaugaggaaugucccagaaaaacagacucggggaaucuucggcgcuauugccggcuuuaucgagaacgggugggaaggaaugguugacgguugguacggcuuccgucaccaaaauucagaggggcgcggacaggcggccgaucuuaagaguacacaggcagcuauugaccagauaaacggcaaacugaacagauugaucgguaagaccaaugagaaauuccaucagauugaaaaggaguuuagcgaaguggaggggaggauccaagaucucgaaaaguauguagaggacacgaaaaucgaucugugguccuacaacgccgaguuacugguggcucucgaaaaucagcacaccauugaccuuacagauucugagaugaacaagcuguucgagaaaacuaagaaacaguugcgggaaaaugccgaagacaugggcaacggaugcuuuaagauauaucauaagugugauaaugcaugcaucggcagcauucgaaacgggaccuacgaccacgaugucuaucgcgacgaggcccuaaauaacagauuccagaucaaaggaguggagcugaagucagguuacaaagacuggauucucuggaucaguuuugcuauauccugcuuccugcuuuguguugcgcuguugggcuuuaucaugugggcaugccaaaaggggaauauuagguguaacaucugcauuuga

SEQ ID NO: 138908 - RNA, 1701 nt, Artificial Sequence
  derived and/or modified CDS sequence (opt3) from hemagglutinin__InfluenzaA__AHC61643
augaagaccaucauugcccugagcuacgugcucugccuugucuucgcucagaaacugcccggcaacgacaauuccacagcaacuuuguguuuagggcaccaugccguuccuaacggaacgauagugaagaccaucacaaaugaucaaauugagguaacuaacgcgaccgaacuggugcagucuucaaguacaggugagaucugcaauagcccacaccagauucuagacggcgaaaacuguacccucaucgaugcucugcuuggggacccgcagugcgauggauuucaaaauaaaaagugggaccuguucgucgagagauccaaagcccauucuaacuguuaucccuacgaugugccugacuaugcaucguugaggucacucguugccagcaguggcacucuggaauuuaauaacgaguccuucaauuggacaggugugacccagaacgggacgucuagcgcuugcauacggcgcuccaauaacucauuuuucagucgacugaauuggcucacucacuuaaacuuuaaguacccagcacugaacgucaccaugcccaauaacgagcaguucgauaaguuguauaucuggggagugcaucacccuggcacagacaaagaucagauuuuucuuuacgcccaagcugccggccguaucacuguaagcaccaagagaucucagcaggcgguuauuccaaauaucggguccaggccccgggugcgcaacauaccuucaagagucagcauuuauuggacaaucgugaaaccaggagacauucugcuaaucaauaguaccgguaaccucaucgcaccgaggggcuacuucaagauucggucugggaaauccagcauaaugcgcucggaugcccccaucggaaaguguaauucugcuugcauuacgccuaacggcuccaucccaaaugacaagcccuuucagaacgugaaucgaauaacuuacggugccuguccuagauaugucaaacaaaacacacugaaacuugcaaccgggaugaggaauguuccagaaaaacagacucggggaauuuucggcgcuaucgccggcuuuaucgagaacgggugggaaggaaugguggacgguugguacggcuuccgucaccaaaauucagaggggcgcggacaggcggccgaucugaagaguacacaggcagcuauugaccagaucaacggcaaauugaacagacucauugguaagaccaaugagaaauuccaucagauagaaaaggaguuuagcgaaguagaggggaggauccaagaucuggaaaaguauguggaggacacgaaaauugauuuaugguccuacaacgccgagcugcucgucgcucuugaaaaucagcacaccaucgaccugacagauucugagaugaacaaguuguucgaaaagacuaagaaacagcuacgggagaaugccgaagacaugggcaacggaugcuuuaagaucuaucauaagugugauaaugcaugcauuggcagcauacgaaacgggaccuacgaccacgauguguaucgcgacgaggcccugaauaacagauuccagaucaaaggaguugagcucaagucagguuacaaagacuggauucuguggaucaguuuugcuauuuccugcuuccuucuguguguggcguugcucggcuuuaucaugugggcaugccaaaaggggaauauaagguguaacaucugcauuuga

SEQ ID NO: 138909 - RNA, 1701 nt, Artificial Sequence
  derived and/or modified CDS sequence (opt3) from hemagglutinin__InfluenzaA__AHC61655
augaagaccaucauugcccugagcuacauacucugccuuguguucacacagaaacugcccggcaacgacaauuccacugcuacguuguguuuagggcaccaugcagucccuaacggaaccaucguuaagacaauuacuaaugaucaaaucgaggugaccaacgccacagaacugguacagucuucaaguaccggugagauuugcaauagcccacaccagauccuagacggcgaaaacuguacucucauagaugcgcugcuuggggacccgcagugcgauggauuucaaaauaacaaaugggaccuguucguggagagauccaaggcucauucuaauuguuaucccuacgaugucccugacuaugccucguugaggucacucguggcaagcaguggcacacuggaauuuaacaaugaguccuucaacuggaccgguguuacgcagaaugggacuucuagcgccugcauccggcgcuccaacaauucauuuuucagucgacugaacuggcucacccacuuaaacuuuaaauacccagcucugaaugugacaaugcccaacaaugagcaguucgauaaacuuuauauuuggggaguccaucacccuggcacugacaaggaucagaucuuuuuguacgcacaagccgcuggccguauuaccgugagcacaaagagaucucagcaggccguaaucccaaacauaggguccaggccccggguucgcaauauuccuucaagagugagcaucuauuggaccauugucaagccaggagacauccugcuaaucaacaguacggguaaucucauugcgccgaggggcuacuucaaaauacggucugggaaguccagcaucauucgcucggaugcacccaucggaaaauguaacucugccugcauaacuccuaauggcuccauuccaaacgacaagcccuuucagaaugugaaccgaaucacauacggugcuuguccuagauaugugaagcaaaauacccugaaacuugccacugggaugaggaacgucccagaaaagcagacacggggaaucuucggcgcaauugcuggcuuuaucgagaaugggugggaaggaaugguugacgguugguacggcuuccgucaccagaacucagaggggcgcggacaagccgcggaucugaaaaguacccaggccgcaauugaccagauaaacggcaaguugaauagacucaucgguaaaacgaacgagaaguuccaucagauugaaaaagaguuuagcgaaguggaggggaggauccaagaucuggaaaaguauguagaggacaccaagaucgauuuaugguccuacaaugcugagcugcucguggcccuugaaaaccagcacacaauugaccugacugauucugagaugaauaaauuguucgaaaagaccaaaaagcagcuacgggagaacgcugaagacaugggcaauggaugcuuuaaaauauaucauaagugugauaacgccugcaucggcagcauucgaaaugggacauacgaccacgaugucuaucgcgacgaggcacugaacaauagauuccagaucaagggaguggagcucaaaucagguuacaaggacuggauucuguggaucaguuuugccauauccugcuuccuucuguguguugcuuugcucggcuuuaucaugugggcgugccaaaaagggaacauuagguguaauaucugcauuuga

SEQ ID NO: 138910 - RNA, 1701 nt, Artificial Sequence
  derived and/or modified CDS sequence (opt3) from hemagglutinin__InfluenzaA__AHC61667
augaagaccaucauugcccugagcuacauacucugccuuguguucgcucagaaacugcccggcaacgacaauuccacagcaacuuuguguuuagggcaccaugccgucccuaacggaacgaucguuaagaccauuacaaaugaucaaaucgaggugacuaacgcgaccgaacugguacagucuucaaguacaggugagauuugcgacagcccacaccagauccuagauggcgaaaauuguacccucauagacgcucugcuuggggauccgcagugcgacggauuucaaaacaaaaagugggaucuguucguggagagauccaaagccuauucuaauuguuaccccuaugacgucccugauuacgcaucguugaggucacucguggccagcaguggcacucuggaauuuaacaaugaguccuucaacuggacagguguuacccagaaugggacgucuagcgcuugcauccggcgcuccaacaauucauuuuucagucgacugaacuggcucacucauuuaaauuuuaaguauccagcacugaacgugaccaugcccaacaaugagcaguucgacaaacuuuacauuuggggaguccaccauccuggcacagauaaggaccagaucuuuuuguaugcccaaagcucuggccguauuacuguguccaccaagagaucacagcaggcuguaaucccaaacauagggagcaggccccggauucgcaauaucccuaguagaauuucuaucuacuggacaaucguuaaaccaggagauauucugcuaauaaacuccaccgguaaucucaucgccccgaggggcuacuucaagauucggagcgggaaaucgucuaucaugcgcuccgacgcgcccauaggaaaguguaacucagaaugcauuacgccuaauggcaguaucccaaacgacaagcccuuucagaaugugaaccgaaucacuuauggugcauguccuagauacgucaaacaaagcacacugaaacuugccaccgggaugaggaaugugccagagaagcagacucggggaauuuucggcgcuaucgccggcuuuauugaaaacgggugggagggaaugguggaugguugguauggcuuccgucaccaaaauuccgaggggcgcggacaggcagcugaccugaagucuacacaggccgcgauagaucagaucaacggcaaauugaauagacucauugguaagaccaacgaaaaauuccaccagaucgagaaggaauuuagcgaggucgaagggaggauccaagaccuggagaaguacguugaggauacgaaaauugacuuauggucauauaacgccgaacugcucguggcacuugagaaucagcauaccauagaucugacagacagugaaaugaacaaguuguucgagaaaacuaagaaacagcuacgggaaaaugcugaggauaugggcaacggaugcuuuaagaucuaccacaagugugacaaugccugcauuggcuccauccgaaacgggaccuauaaucaugauguauaccgcgacgaggcucugaacaauagauuccagauuaaaggaguggaacucaagagcgguuacaaagacuggauccuguggauaucuuuugccaucucaugcuuccuucugugugucgcauugcucggcuuuauuaugugggccugccaaaaggggaacaucagguguaauauuugcaucuga

SEQ ID NO: 138911 - RNA, 1701 nt, Artificial Sequence; identical to SEQ ID NO: 138666
  derived and/or modified CDS sequence (opt3) from hemagglutinin__InfluenzaA__AHC61679

SEQ ID NO: 138912 - RNA, 1701 nt, Artificial Sequence; identical to SEQ ID NO: 137122
  derived and/or modified CDS sequence (opt3) from hemagglutinin__InfluenzaA__AHC61691

SEQ ID NO: 138913 - RNA, 1701 nt, Artificial Sequence; identical to SEQ ID NO: 134903
  derived and/or modified CDS sequence (opt3) from hemagglutinin__InfluenzaA__AHC61703

SEQ ID NO: 138914 - RNA, 1701 nt, Artificial Sequence; identical to SEQ ID NO: 138699
  derived and/or modified CDS sequence (opt3) from hemagglutinin__InfluenzaA__AHC61715

SEQ ID NO: 138915 - RNA, 1701 nt, Artificial Sequence; identical to SEQ ID NO: 135830
  derived and/or modified CDS sequence (opt3) from hemagglutinin__InfluenzaA__AHC61727

SEQ ID NO: 138916 - RNA, 1701 nt, Artificial Sequence; identical to SEQ ID NO: 134903
  derived and/or modified CDS sequence (opt3) from hemagglutinin__InfluenzaA__AHC61739

SEQ ID NO: 138917 - RNA, 1701 nt, Artificial Sequence
  derived and/or modified CDS sequence (opt3) from hemagglutinin__InfluenzaA__AHC61751
augaagaccaucauugcccugagcuacauacucugccuuguguucgcucagaaacugcccggcaacgacaauuccacagcaacuuuguguuuagggcaccaugccgucccuaacggaacgaucguuaagaccauuacaaaugaucaaaucgaggugacuaacgcgaccgaacugguacaaaauucuucaacaggugagauuugcgacaguccacaccagauccuagauggcgaaaacuguacccucauagacgcucugcuuggggauccgcagugcgacggauuucagaauaaaaagugggaucuguucguggagagaagcaaagccuauuccaacuguuaccccuaugacgucccugauuacgcaucuuugaggucgcucguggccucaagcggcacucuggaauuuaauaacgagaguuucaauuggacagguguuacccagaacgggacguccucugcuugcauccggcgcagcaauaacuccuuuuucucacgacugaauuggcucacucauuuaaacuuuaaguauccagcacugaacgugaccaugcccaauaacgagcaguucgacaaacuuuacauuuggggaguccaccauccuggcacagauaaggaccagaucuuuuuguaugcccaagcuaguggccguauuacugugagcaccaagagaucucagcaggccguaaucccaaauguuggguccaggccccgggugcgcaacauaccuucaagaauuagcaucuacuggacaauugucaaaccaggagauauccugcuaaucaauaguaccgguaaccucauugcgccgaggggcuacuucaagauacggucugggaaauccagcaucaugcgcucggacgcacccauuggaaaguguaauucugaaugcaucacgccuaacggcuccauaccaaaugacaagcccuuucagaacgugaaucgaauuacuuauggugccuguccuagauacgugaaacaaaacacacugaaacuugcuaccgggaugaggaaugucccagagaagcagacucggggaaucuucggcgccaucgcaggcuuuauugaaaacgggugggagggaaugguugaugguugguauggcuuccgucaccaaaauucagaggggcgcggacaggcugccgaccugaagaguacacaggcggccaucgaucagauuaacggcaaauugaacagacucauagguaagaccaaugaaaaauuccaccagaucgagaaggaauuuagcgagguggaagggaggauucaagaccuggagaaguacguagaggauacgaaaaucgacuuaugguccuauaacgcagaacugcucguggcucuugagaaucagcauaccaucgaucugacagacucugaaaugaacaaguuguucgagaaaacuaagaaacagcuacgggaaaaugccgaggauaugggcaacggaugcuuuaagauuuaccacaagugugacaaugcuugcauaggcagcauccgaaacgggaccuaugaucaugacgucuaccgcgacgaggcccugaauaacagauuccagauuaaaggaguggaacucaagucagguuacaaagauuggauccuguggauuaguuuugcaaucuccugcuuccuucuguguguugccuugcucggcuuuauaaugugggcuugccaaaaggggaauaucagguguaacauuugcaucuga

SEQ ID NO: 138918 - RNA, 1701 nt, Artificial Sequence
  derived and/or modified CDS sequence (opt3) from hemagglutinin__InfluenzaA__AHC61763
augaagaccaucauugcccugagcuacauacucugccuuguguucgcucagaaacugcccggcaacgacaauuccacagcaacuuuguguuuagggcaccaugccgucccuaacggaacgaucguuaagaccauuacaaaugaucaaaucgaggugacuaacgcgaccgaacugguacagucuucaaguacaggugagauuugcaauagcccacaccagauccuagacggcgaaaacuguacccucauagaugcucugcuuggggacccgcagugcgauggauuucaaaauaaaaagugggaccuguucguggagagauccaaagcccauucuaacuguuaucccuacgaugucccugacuaugcaucguugaggucacucguggccagcaguggcacucuggaauuuaauaacgaguccuucaauuggacagguguuacccagaacgggacgucuagcgcuugcauccggcgcuccaauaacucauuuuucagucgacugaauuggcucacucacuuaaacuuuaaguacccagcacugaacgugaccaugcccaauaacgagcaguucgauaaacuuuauauuuggggaguccaucacccuggcacagacaaagaucagaucuuuuuguacgcccaagcugccggccguauuacugugagcaccaagagaucucagcagacaguaaucccaaauauaggguccaggccccggguucgcaacauuccuucaagagugagcaucuauuggaccauugucaaaccaggagacauccugcuaaucaauaguacggguaaccucauugcgccgaggggcuacuucaagauacggucugggaaauccagcaucaugcgcucggaugcacccauuggaaaguguaauucugccugcaucacuccuaacggcuccauaccaaaugacaagcccuuucagaacgugaaucgaauuacauacggugcuuguccuagauaugugaaacaaaacacccugaaacuugccacugggaugaggaaugucccagaaaagcagacacggggaaucuucggcgcaaucgcuggcuuuauugagaacgggugggaaggaaugguugacgguugguacggcuuccgucaccaaaauucagaggggcgcggacaggccgcggaucugaagaguacccaggccgcaaucgaccagauuaacggcaaauugaacagacucauagguaagacgaaugagaaauuccaucagaucgaaaaggaguuuagcgaaguggaggggaggauucaagaucuggaaaaguauguagaggacaccaaaaucgauuuaugguccuacaacgcugagcugcucguggcccuugaaaaucagcacacaaucgaccugacugauucugagaugaacaaguuguucgaaaagaccaagaaacagcuacgggagaaugcugaagacaugggcaacggaugcuuuaagauuuaucauaagugugauaaugccugcauaggcagcauccgaaacgggacauacgaccacgaugucuaucgcgacgaggcacugaauaacagauuccagauuaaaggaguggagcucaagucagguuacaaagacuggauccuguggauuaguuuugccaucuccugcuuccuucuguguguugcuuugcucggcuuuauaaugugggcgugccaaaaggggaauaucagguguaacauuugcaucuga

SEQ ID NO: 138919 - RNA, 1701 nt, Artificial Sequence; identical to SEQ ID NO: 135030
  derived and/or modified CDS sequence (opt3) from hemagglutinin__InfluenzaA__AHC61775

SEQ ID NO: 138920 - RNA, 1701 nt, Artificial Sequence; identical to SEQ ID NO: 135830
  derived and/or modified CDS sequence (opt3) from hemagglutinin__InfluenzaA__AHC61787

SEQ ID NO: 138921 - RNA, 1701 nt, Artificial Sequence; identical to SEQ ID NO: 138666
  derived and/or modified CDS sequence (opt3) from hemagglutinin__InfluenzaA__AHC61799

SEQ ID NO: 138922 - RNA, 1701 nt, Artificial Sequence
  derived and/or modified CDS sequence (opt3) from hemagglutinin__InfluenzaA__AHC61823
augaagaccaucauugcccugagcuacauacucugccuuguguucgcucagaaacugcccggcaacgacaauuccacagcaacuuuguguuuagggcaccaugccgucccuaacggaacgaucguuaagaccauuacaaaugaucaaaucgaggugacuaacgcgaccgaacugguacagucuucaaguacaggugagauuugcgacagcccacaccagauccuagauggcgaaaauuguacccucauagacgcucugcuuggggauccgcagugcgacggauuucaaaacaaaaagugggaucuguucguggagagauccaaagccuauucuaauuguuaccccuaugacgucccugauuacgcaucguugaggucacucguggccagcaguggcacucuggaauuuaacaaugaguccuucaacuggacagguguuacccagaaugggacgucuagcgcuugcauccggcgcuccaacucaaguuucuuuagccgacugaauuggcucacucauuuaaacuuuaaguauccagcacugaaugugaccaugcccaacaacgagcaguucgacaaacuuuacauuuggggaguccaccauccuggcacagauaaggaccagaucuuuuuguaugcccaaucuuccggccguauuacugugucaaccaagagaagccagcaggcuguaaucccaaauauagggaguaggccccggauucgcaacaucccuucuagaauuuccaucuacuggacaaucguuaaaccaggagauauucugcuaauaaauagcaccgguaaccucaucgccccgaggggcuacuucaagauucggucggggaaaucuuccaucaugaagucagacgcgcccauagacaaguguaauagugaaugcauuacgccuaacggaagcaucccaaaugauaaacccuuucagaacgugaaucgcaucacuuauggcgcauguccucgauacgucaagcaauccacacugaaacuugccaccgguaugagaaacgugccagagaagcagacuagggggauuuucggagcuaucgccggcuuuauugaaaauggcugggaggggaugguggacggaugguaugguuuccggcaccagaacucugagggccgugggcaagcagcugaucugaaaagcacacaggccgcgauagaccagaucaauggaaaguugaaccgccucauuggcaaaaccaaugaaaaguuccaccagaucgagaaggaauuuucagaggucgaagguagaauccaagaucuggagaaauacguugaggacacgaagauugauuuauggaguuauaacgccgaacugcucguggcacuugagaaccagcauaccauagaccugacagauuccgaaaugaauaaauuguucgagaagacuaaaaagcagcuaagggaaaacgcugaggacauggggaauggcugcuuuaagaucuaccacaaaugugauaacgccugcauuggaagcauccggaauggcaccuauaaccaugacguauaccgagacgaggcucugaauaaccgcuuccagauuaaggggguggaacucaaaucuggauacaaggauuggauccuguggauaucauuugccaucaguugcuuccuucugugugucgcauugcucgguuuuauuaugugggccugccaaaaaggcaauaucagauguaacauuugcaucuga

SEQ ID NO: 138923 - RNA, 1701 nt, Artificial Sequence; identical to SEQ ID NO: 135830
  derived and/or modified CDS sequence (opt3) from hemagglutinin__InfluenzaA__AHC61835

SEQ ID NO: 138924 - RNA, 1701 nt, Artificial Sequence; identical to SEQ ID NO: 135030
  derived and/or modified CDS sequence (opt3) from hemagglutinin__InfluenzaA__AHC61847

SEQ ID NO: 138925 - RNA, 1701 nt, Artificial Sequence; identical to SEQ ID NO: 134903
  derived and/or modified CDS sequence (opt3) from hemagglutinin__InfluenzaA__AHC61859

SEQ ID NO: 138926 - RNA, 1701 nt, Artificial Sequence; identical to SEQ ID NO: 135830
  derived and/or modified CDS sequence (opt3) from hemagglutinin__InfluenzaA__AHC61871

SEQ ID NO: 138927 - RNA, 1701 nt, Artificial Sequence
  derived and/or modified CDS sequence (opt3) from hemagglutinin__InfluenzaA__AHC61883
augaagaccaucauugcccugagcuacauacucugccuuguguucgcucagaaacugcccggcaacgacaauuccacagcaacuuuguguuuagggcaccaugccgucccuaacggaacgaucguuaagaccauuacaaaugaucaaaucgaggugacuaacgcgaccgaacugguacagucuucaaguacaggugagauuugcgacagcccacaccagauccuagauggcgaaaauuguacccucauagacgcucugcuuggggauccgcagugcgacggauuucaaaacaaaaagugggaucuguucguggagagauccaaagccuauucuaauuguuaccccuaugacgucccugauuacgcaucguugaggucacucguggccagcaguggcacucuggaauuuaacaaugaguccuucaacuggacagguguuacccagaaugggacgucuagcgcuugcauccggcgcuccaacucaaguuucuuuagccgacugaauuggcucacucauuuaaacuuuaaguauccagcacugaaugugaccaugcccaacaacgagcaguucgacaagcuguacauuuggggaguccaccauccuggcacagauaaagaccagaucuuuuuguaugcccaaucuuccggccguauuacugugucaaccaagagaagccagcaggcuguaaucccaaauauagggaguaggccccggauucgcaacaucccuucuagaauuuccaucuacuggacaaucguuaaaccaggagauauucugcuaauaaauagcaccgguaaccucaucgccccgaggggcuacuucaagauucggucggggaaaucuuccaucaugcgcucagacgcgcccauaggaaaguguaauagugaaugcauuacgccuaacggcagcaucccaaaugacaagcccuuucagaacgugaaucgaaucacuuauggugcauguccuagauacgucaaacaauccacacugaaacuugccaccgggaugaggaacgugccagagaagcagacucggggaauuuucggcgcuaucgccggcuuuauugaaaaugggugggagggaaugguggaugguugguauggcuuccgucaccagaacucugaggggcgcggacaagcagcugaccuuaagagcacacaggccgcgauagaucagaucaauggcaaauugaacagacucauugguaagaccaaugaaaaauuccaccagaucgagaaggaauuuucagaggucgaagggaggauccaagaccuggagaaguacguugaggauacgaaaauugacuuauggaguuauaacgccgaacugcucguggcacuugagaaccagcauaccauagaucuggcugacuccgaaaugaauaaguuguucgagaaaacaaagaaacagcuacgggaaaacgccgaggauaugggcaauggaugcuuuaagaucuaccacaagugugacaacgcuugcauuggcagcauccgaaaugggacuuauaaccaugauguauaccgcgacgaggcccugaauaacagauuccagauuaaaggaguggaacucaagucugguuacaaagacuggauccuguggauaucauuugcaaucaguugcuuccuucugugugucgccuugcucggcuuuauuaugugggcuugccaaaaggggaauaucagguguaacauuugcaucuga

SEQ ID NO: 138928 - RNA, 1701 nt, Artificial Sequence; identical to SEQ ID NO: 135030
  derived and/or modified CDS sequence (opt3) from hemagglutinin__InfluenzaA__AHC61895

SEQ ID NO: 138929 - RNA, 1701 nt, Artificial Sequence; identical to SEQ ID NO: 135030
  derived and/or modified CDS sequence (opt3) from hemagglutinin__InfluenzaA__AHC61907

SEQ ID NO: 138930 - RNA, 1701 nt, Artificial Sequence
  derived and/or modified CDS sequence (opt3) from hemagglutinin__InfluenzaA__AHC61931
augaagaccaucauugcccugagcuacauacucugccuuguguucgcucagaaacugcccggcaacgacaauuccacagcaacuuuguguuuagggcaccaugccgucccuaacggaacgaucguuaagaccauuacaaaugaucaaaucgaggugacuaacgcgaccgaacugguacagucuucaaguacaggugagauuugcaauagcccacaccagauccuagacggcgaaaacuguacccucauagaugcucugcuuggggacccgcagugcgauggauuucaaaauaaaaagugggaccuguucguggagagauccaaagcccauucuaacuguuaucccuacgaugucccugacuaugcaucguugaggucacucguggccagcaguggcacucuggaauuuaauaacgaguccuucaauuggacagguguuacccagaacgggacgucuagcgcuugcauccggcgcuccaauaacucauuuuucagucgacugaauuggcucacucacuuaaacuuuaaguacccagcacugaacgugaccaugcccaauaacgagcaguucgauaaacuuuauauuuggggaguccaucacccuggcacagacaaagaucagaucuuuuuguacgcccaagcugccggccguauuacugugagcaccaagagaucucagcaggcgguaaucccaaauauaggguccaggccccggguucgcaacauuccuucaagagugagcaucuauuggacaauugucaaaccaggagacauccugcuaaucaauaguaccgguaaccucauugcaccgaggggcuacuucaagauacggucugggaaauccagcaucaugcgcucggaugcccccauuggaaaguguaauucugcuugcaucacgccuaacggcuccauaccaaaugacaagcccuuucagaacgugaaucgaauuacuuacggugccuguccuagauaugugaaacaaaacacacugaaacuugcaaccgggaugaggaaugucccagaaaagcagacucggggaaucuucggcgcuaucgccggcuuuauugagaacgggugggaaggaaugguugacgguugguacggcuuccgucaccaaaauucagaggggcgcggacaggcggccgaucugaagaguacacaggcagcuaucgaccagauuaacggcaaauugaacagacucauagguaagaccaaugagaaauuccaucagaucgaaaaggaguuuagcgaaguggaggggaggauucaagaucuggaaaaguauguagaggacacgaaaaucgauuuaugguccuacaacgccgagcugcucguggcucuugaaaaucagcacaccaucgaccugacagauucugagaugaacaaguuguucgaaaagacuaagaaacagcuacgggagaaugccgaagacaugggcaacggaugcuuuaagauuuaucauaagugugauaaugcaugcauaggcagcauccgaaacgggaccuacgaccacgaugucuaucgcgacgaggcccugaauaacagauuccagauuaaaggaguggagcucaagucagguuacaaaggcuggauccuguggauuaguuuugcuaucuccugcuuccuucuguguguugcguugcucggguuuauaaugugggcaugccaaaagggaaauaucagguguaacauuugcaucuga

SEQ ID NO: 138931 - RNA, 1701 nt, Artificial Sequence; identical to SEQ ID NO: 135830
  derived and/or modified CDS sequence (opt3) from hemagglutinin__InfluenzaA__AHC61943

SEQ ID NO: 138932 - RNA, 1701 nt, Artificial Sequence; identical to SEQ ID NO: 137122
  derived and/or modified CDS sequence (opt3) from hemagglutinin__InfluenzaA__AHC61955

SEQ ID NO: 138933 - RNA, 1701 nt, Artificial Sequence; identical to SEQ ID NO: 135830
  derived and/or modified CDS sequence (opt3) from hemagglutinin__InfluenzaA__AHC61967

SEQ ID NO: 138934 - RNA, 1701 nt, Artificial Sequence; identical to SEQ ID NO: 134903
  derived and/or modified CDS sequence (opt3) from hemagglutinin__InfluenzaA__AHC61979

SEQ ID NO: 138935 - RNA, 1701 nt, Artificial Sequence; identical to SEQ ID NO: 135030
  derived and/or modified CDS sequence (opt3) from hemagglutinin__InfluenzaA__AHC61991

SEQ ID NO: 138936 - RNA, 1701 nt, Artificial Sequence; identical to SEQ ID NO: 138741
  derived and/or modified CDS sequence (opt3) from hemagglutinin__InfluenzaA__AHC62003

SEQ ID NO: 138937 - RNA, 1701 nt, Artificial Sequence; identical to SEQ ID NO: 135830
  derived and/or modified CDS sequence (opt3) from hemagglutinin__InfluenzaA__AHC62015

SEQ ID NO: 138938 - RNA, 1701 nt, Artificial Sequence; identical to SEQ ID NO: 137122
  derived and/or modified CDS sequence (opt3) from hemagglutinin__InfluenzaA__AHC62027

SEQ ID NO: 138939 - RNA, 1701 nt, Artificial Sequence
  derived and/or modified CDS sequence (opt3) from hemagglutinin__InfluenzaA__AHC62039
augaagaccaucauugcccugagcuacauacucugccuuguguucgcucagaaacugcccggcaacgacaauuccacagcaacuuuguguuuagggcaccaugccgucccuaacggaacgaucguuaagaccauuacaaaugaucaaaucgaggugacuaacgcgaccgaacugguacagucuucaaguacaggugagauuugcaauagcccacaccagauccuagacggcgaaaacuguacccucauagaugcucugcuuggggacccgcagugcgauggauuucaaaauaaaaagugggaccuguucguggagagauccaaagcccauucuaacuguuaucccuacgaugucccugacuaugcaucguugaggucacucguggccagcaguggcacucuggaauuuaauaacgaguccuucaauuggacagguguuacccagaacgggacgucuagcgcuugcauccggggauccaauaacucauuuuucagucgccugaauuggcucacucacuuaaacuuuaaguacccagcacugaacgugaccaugcccaauaacgagcaguucgauaaacuuuauauuuggggcguccaucacccuggcacagacaaggaucagaucuuuuuguacgcccaagcuagcgggcgaauuacugugucuaccaagcguucccagcaggccguaaucccaaauauaggaucaagacccaggguucggaacauuccuagccgcgugaguaucuauuggacaauugucaaaccaggugacauccugcuaaucaauucuaccggcaaccucauugcgccgagaggguacuucaagauaagguccggaaaaagcucgaucaugaagucugaugcacccauuggcaaguguaauuccgccugcaucacgccuaacgguucaauaccaaaugacaaacccuuucagaacgugaaucggauuacuuacggggcuuguccucgcuaugugaagcaaaacacacugaaacuugccaccggaaugcgaaaugucccagaaaagcagacuagaggcaucuucggcgcaaucgcuggguuuauugagaacggaugggaagguaugauggacggcugguacggguucaggcaccagaauagugagggacggggccaagccgcggaucugaaaagcacacaggccgcaaucgaccagauuaacgguaaguugaaccgucucauagggaaaaccaaugagaaguuccaucagaucgaaaaggaguuuuccgaaguugagggccgcauucaagaucuggaaaaauauguggaggacacgaagaucgauuuauggucuuacaacgcugagcugcucguagcccuugaaaaucagcacaccaucgaccugacagauagcgagaugaacaaauuguucgaaaagacuaaaaagcagcuaagagagaaugcugaagacaugggaaacggcugcuuuaagauuuaucauaaaugugauaaugccugcauagggucaaucaggaacggaaccuacgaccacgauguguaucgggacgaggcacugaauaaccgauuccagauuaagggugucgagcucaaaaguggcuacaaggacuggauccuguggauuuccuuugccaucagcugcuuccuucuguguguggcuuugcucggguuuauaaugugggcgugccaaaaaggaaauauccgcuguaacauuugcaucuga

SEQ ID NO: 138940 - RNA, 1701 nt, Artificial Sequence
  derived and/or modified CDS sequence (opt3) from hemagglutinin__InfluenzaA__AHC62050
augaagaccaucauugcccugagcuacauacucugccuuguguucgcucagaaacugcccggcaacgacaauuccacagcaacuuuguguuuagggcaccaugccgucccuaacggaacgaucguuaagaccauuacaaaugaucaaaucgaggugacuaacgcgaccgaacugguacagucuucaaguacaggugagauuugcaauagcccacaccagauccuagacggcgaaaacuguacccucauagaugcucugcuuggggacccgcagugcgauggauuucaaaauaaaaagugggaccuguucguggagagauccaaagcccauucuaacuguuaucccuacgaugucccugacuaugcaucguugaggucacucguggccagcaguggcacucuggaauuuaauaacgaguccuucaauuggacagguguuacccagaacgggacgucuagcgcuugcauccggcgcuccaauaacucauuuuucagucgacugaauuggcucacucacuuaaacuuuaaguacccagcacugaacgugaccaugcccaauaacgagcaguucgauaagcuguauauuuggggaguccaucacccuggcacagacaaagaucagaucuuuuuguacgcccaagcuagcggccguauuacugugucuaccaagagaucccagcaggccguaaucccaaauauagggucaaggccccggguucgcaacgugccuagcagagucaguauuuauuggacaaucgugaaaccaggagacauucugcuaaucaauucuaccgguaaccucaucgcgccgaggggcuacuucaagauucgguccgggaaaagcucgauaaugcgcucugaugcacccaucggaaaguguaauuccgccugcauuacgccuaacggcucaaucccaaaugacaagcccuuucagaacgugaaucgaauaacuuacggugcuuguccuagauaugucaaacaaaacacacugaaacuugccaccgggaugaggaauguuccagaaaaacagacucggggaauuuucggcgcaaucgcuggcuuuaucgagaacgggugggaaggaaugguggacgguugguacggcuuccgucaccagaauagugaggggcgcggacaagccgcggaucuuaagagcacacaggccgcaauugaccagaucaacggcaaauugaacagacucauugguaagaccaaugagaaauuccaucagauagaaaaggaguuuuccgaaguagaggggaggauccaagaucuggaaaaguauguggaggacacgaaaauugauuuauggucuuacaacgcugagcugcucgucgcccuugaaaaucagcacaccaucgaccugacagauagcgagaugaacaaguuguucgaaaagacuaagaaacagcuacgggagaaugcugaagacaugggcaacggaugcuuuaagaucuaucauaagugugauaaugccugcauuggcucaauacgaaacgggaccuacgaccacgauguguaucgcgacgaggcacugaauaacagauuccagaucaaaggaguugagcucaagagugguuacaaagacuggauucuguggaucuccuuugccauuagcugcuuccuucuguguguggcuuugcucggcuuuaucaugugggcgugccaaaaggggaauauaagguguaacaucugcauuuga

SEQ ID NO: 138941 - RNA, 1701 nt, Artificial Sequence; identical to SEQ ID NO: 137122
  derived and/or modified CDS sequence (opt3) from hemagglutinin__InfluenzaA__AHC62062

SEQ ID NO: 138942 - RNA, 1701 nt, Artificial Sequence
  derived and/or modified CDS sequence (opt3) from hemagglutinin__InfluenzaA__AHC62074
augaagaccaucauugcccugagcuacauacucugccuuguguucgcucagaaacugcccggcaacgacaauuccacagcaacuuuguguuuagggcaccaugccgucccuaacggaacgaucguuaagaccauuacaaaugaucaaaucgaggugacuaacgcgaccgaacugguacagucuucaaguacaggugagauuugcgacagcccacaccagauccuagauggcgaaaauuguacccucauagacgcucugcuuggggauccgcagugcgacggauuucaaaacaaaaagugggaucuguucguggagagauccaaagccuauucuaauuguuaccccuaugacgucccugauuacgcaucguugaggucacucguggccagcaguggcacucuggaauuuaacaaugaguccuucaacuggacagguguuacccagaaugggacgucuagcgcuugcauccggcgcuccaacaauucauuuuucagucgacugaacuggcucacucauuuaaauuuuaaguauccagcacugaacgugaccaugcccaacaaugagcaguucgacaaacuuuacauuuggggaguccaccauccuggcacagauaaggaccagaucuuuuuguaugcccaagcuagcggccguauuacugugucuaccaagagaaaccagcaggccguaaucccaaauauaggguccaggccccggguucgcaacauuccuucaagaaucagcauuuacuggacaaucgugaaaccaggagauauccugcuaauuaauaguaccgguaaccucauagcgccgaggggcuacuucaagauccggucugggaaauccagcauuaugcgcucggacgcacccaucggaaaguguaauucugaaugcauaacgccuaacggcuccauuccaaaugacaagcccuuucagaacgucaaucgaaucacuuauggugccuguccuagauacgugaaacaaaacacacugaaacuugcuaccgggaugaggaaugugccagagaagcagacucggggaaucuucggcgccauugcaggcuuuaucgaaaacgggugggagggaauggucgaugguugguauggcuuccgucaccaaaauucagaggggcgcggacaggcugccgaccugaagaguacacaggcggccauugaucagauaaacggcaaauugaacagacucaucgguaagaccaaugaaaaauuccaccagauugagaaggaauuuagcgagguugaagggaggauccaagaccuggagaaguacguggaggauacgaaaaucgacuuaugguccuauaacgcagaacugcucguagcucuugagaaucagcauaccauugaucugacagacucugaaaugaacaaguuguucgagaaaacuaagaaacagcuacgggaaaaugccgaggauaugggcaacggaugcuuuaagauauaccacaagugugacaaugcuugcaucggcagcauucgaaacgggaccuauaaucaugauguguaccgcgacgaggcccugaacaauagauuccagaucaaaggagucgaacucaagucagguuacaaagacuggauucuguggaucaguuuugcaauauccugcuuccuucuguguguggccuugcucggcuuuaucaugugggcuugccaaaaggggaacauuagguguaauaucugcauuuga

SEQ ID NO: 138943 - RNA, 1701 nt, Artificial Sequence; identical to SEQ ID NO: 134903
  derived and/or modified CDS sequence (opt3) from hemagglutinin__InfluenzaA__AHC62086

SEQ ID NO: 138944 - RNA, 1701 nt, Artificial Sequence; identical to SEQ ID NO: 135830
  derived and/or modified CDS sequence (opt3) from hemagglutinin__InfluenzaA__AHC62098

SEQ ID NO: 138945 - RNA, 1701 nt, Artificial Sequence; identical to SEQ ID NO: 134903
  derived and/or modified CDS sequence (opt3) from hemagglutinin__InfluenzaA__AHC62110

SEQ ID NO: 138946 - RNA, 1701 nt, Artificial Sequence
  derived and/or modified CDS sequence (opt3) from hemagglutinin__InfluenzaA__AHC62122
augaagaccaucauugcccugagcuacauacucugccuuguguucgcucagaaacugcccggcaacgacaauuccacagcaacuuuguguuuagggcaccaugccgucccuaacggaacgaucguuaagaccauuacaaaugaucaaaucgaggugacuaacgcgaccgaaaugguacagucuucaaguacaggugagauuugcaauagcccacaccagauccuggacggcgaaaacuguacccuaauagaugcucuccugggggacccgcagugcgauggauuucaaaauaaaaagugggaccuuuucguggagagauccaaagcccauucuaacuguuaucccuacgaugucccugacuaugcaucgcugaggucauugguggccagcaguggcacucucgaauuuaauaacgaguccuucaauuggacagguguuacccagaacgggacgucuagcgcuugcauccggggauccaauaacucauuuuucagucgccugaauuggcugacucacagcaacuuuaaguacccagcacucaacgugaccaugcccaauaacgagcaguucgauaaguuauauauuuggggcguccaucacccuggcacagacaaagaucagaucuuucuguacgcccaggcuucugggcgaauuacuguguccaccaagcguucacaacaggccguaaucccaaauauaggaagcagacccaggguucggaacauuccuagucgcgugucuaucuauuggacaauugucaaaccaggugacauccuuuugaucaauuccaccggcaaccugauugcgccgagaggguacuucaagauaaggagcggaaaaucgucuaucaugcgguccgaugcacccauuggcaaguguaauucagccugcaucacgccuaacgguaguauaccaaaugacaagcccuuucagaacgugaaucgcauuacuuacggggcuuguccucgauaugugaaacaaaacacacuaaagcucgccaccggaaugagaaaugucccagaaaaacagacuaggggcaucuucggcgcaaucgcuggguuuauugagaacggaugggaagguaugguugacggcugguacggguuccggcaccagaauagcgagggacguggccaagccgcggaucugaaguccacacaggccgcaaucgaccagauuaacgguaaacuuaaccgccugauagggaagaccaaugagaaauuccaucagaucgaaaaggaguuuucugaaguggagggcaggauucaagauuuggaaaaguauguagaggacacgaaaaucgaucucuggagcuacaacgcugagcuguuaguggcccuggaaaaucagcacaccaucgaccucacagauucagagaugaacaaacuuuucgaaaagacuaagaaacagcugagagagaaugcugaagacaugggaaacggcugcuuuaagauuuaucauaagugugauaaugccugcauagggaguauccggaacggaaccuacgaccacgaugucuaucgagacgaggcauugaauaaccgcuucagaauuaaagguguggagcuaaaguccggcuacaaagacuggauccuguggauuagcuuugccaucucuugcuuccuccuguguguugcgcuucugggguuuauaaugugggcuugccagaagggaaauaucagguguaacauuugcaucuga

SEQ ID NO: 138947 - RNA, 1701 nt, Artificial Sequence; identical to SEQ ID NO: 134903
  derived and/or modified CDS sequence (opt3) from hemagglutinin__InfluenzaA__AHC62134

SEQ ID NO: 138948 - RNA, 1701 nt, Artificial Sequence
  derived and/or modified CDS sequence (opt3) from hemagglutinin__InfluenzaA__AHC62146
augaagaccaucauugcccugagcuacauacucugccuuguguucgcucagaaacugcccggcaacgacaauuccacagcaacuuuguguuuagggcaccaugccgucccuaacggaacgaucguuaagaccauuacaaaugaucaaaucgaggugacuaacgcgaccgaacugguacagucuucaaguacaggugagauuugcaauagcccacaccagauccuagacggcgaaaacuguacccucauagaugcucugcuuggggacccgcagugcgauggauuucaaaauaaaaagugggaccuguucguggagagauccaaagccuauucuaacuguuaccccuaugaugucccugacuacgcaucguugaggucacucguggccagcaguggcacucuggaauuuaauaacgaguccuucaauuggacagguguuacccagaacgggacgucuagcgcuugcauccggcgcuccaauucaaguuucuuuagccgacugaacuggcucacucauuuaaauuuuaaguauccagcacugaacgugaccaugcccaacaaugagcaguucgauaaacuuuacauuuggggaguccaccauccuggcacagacaaggaucagaucuuuuuguaugcccaaucuuccggccguauuacugugucaaccaagagaagccagcaggcuguaaucccaaacauagggaguaggccccggauucgcaauaucccuucuagaauuuccaucuacuggacaaucguuaaaccaggagacauucugcuaauaaacagcaccgguaaucucaucgccccgaggggcuacuucaagauucggucggggaaaucuuccaucaugcgcucagaugcgcccauaggaaaguguaacagugaaugcauuacgccuaauggcagcaucccaaacgacaagcccuuucagaaugugaaccgaaucacuuauggugcauguccuagauacgucaaacaauccacacugaaacuugccaccgggaugaggaaugugccagagaagcagacucggggaauuuucggcgcuaucgccggcuuuauugaaaacgggugggagggaaugguggacgguugguauggcuuccgucaccagaauuacgaggggcgcggacaagcagcugaucugaagucuacacaggccgcgauagaccagaucaacggcaaauugaauagacucauugguaagaccaacgaaaaauuccaccagaucgagaaggaauuuagcgaggucgaagggaggauccaagaucuggagaaguauguugaggacacgaaaauugauuuauggucauacaacgccgaacugcucguggcacuugagaaucagcauaccauagaccugacagauagugaaaugaacaaguuguucgagaaaacuaagaaacagcuacgggaaaaugcugaggacaugggcaacggaugcuuuaagaucuaucacaagugugauaaugccugcauuggcuccauccgaaacgggaccuacaaucaugacguauaccgcgaugaggcucugaacaauagauuccagauuaaaggaguggaacucaagagcgguuauaaagacuggauccuguggauaucuuuugccaucucaugcuuccuucugugugucgcauugcucggcuuuauuaugugggccugccaaaaggggaacaucagguguaauauuugcaucuga

SEQ ID NO: 138949 - RNA, 1701 nt, Artificial Sequence; identical to SEQ ID NO: 135030
  derived and/or modified CDS sequence (opt3) from hemagglutinin__InfluenzaA__AHC62158

SEQ ID NO: 138950 - RNA, 1701 nt, Artificial Sequence
  derived and/or modified CDS sequence (opt3) from hemagglutinin__InfluenzaA__AHC62170
augaagaccaucauugcccugagcuacauacucugccuuguguucgcucagaaacugcccggcaacgacaauuccacagcaacuuuguguuuagggcaccaugccgucccuaacggaacgaucguuaagaccauuacaaaugaucaaaucgaggugacuaacgcgaccgaacugguacagucuucaaguacaggugagauuugcaauagcccacaccagauccuagacggcgaaaacuguacccucauagaugcucugcuuggggacccgcagugcgauggauuucaaaauaaaaagugggaccuguucguggagagauccaaagcccauucuaacuguuaucccuacgaugucccugacuaugcaucguugaggucacucguggccagcaguggcacucuggaauuuaauaacgaguccuucaauuggacagguguuacccagaacgggacgucuagcgcuugcauccggggauccaauaacucauuuuucagucgccugaauuggcucacucacuuaaacuuuaaguacccagcacugaacgugaccaugcccaauaacgagcaguucgauaagcuguauauuuggggcguccaucacccuggcacagacaaagaucagaucuuuuuguacgcccaagcuagcgggcgaauuacugugucuaccaagcguucccagcaggccguaaucccaaauauaggaucaagacccaggguucggaacauuccuagccgcgugaguaucuauuggacaauugucaaaccaggugacauccugcuaaucaauucuaccggcaaccucauugcgccgagaggguacuucaagauaagguccggaaaaagcucgaucaugcggucugaugcacccauuggcaaguguaauuccgccugcaucacgccuaacgguucaauaccaaaugacaagcccuuucagaacgugaaucgcauuacuuacggggcuuguccucgauaugugaaacaaaacacacugaaacuugccaccggaaugagaaaugucccagaaaaacagacuaggggcaucuucggcgcaaucgcuggguuuauugagaacggaugggaagguaugauggacggcugguacggguuccggcaccagaauagugagggacguggccaagccgcggaucuuaagagcacacaggccgcaaucgaccagauuaacgguaaauugaaccgccucauagggaagaccaaugagaaauuccaucagaucgaaaaggaguuuuccgaaguugagggcaggauucaagaucuggaaaaguauguggaggacacgaaaaucgauuuauggucuuacaacgcugagcugcucguagcccuugaaaaucagcacaccaucgaccugacagauagcgagaugaacaaguuguucgaaaagacuaagaaacagcuaagagagaaugcugaagacaugggaaacggcugcuuuaagauuuaucauaagugugauaaugccugcauagggucaauccggaacggaaccuacgaccacaauguguaucgagaugaggcacugaacaaucgcuuccagauuaaaggugucgagcucaagaguggcuacaaagacuggauccuguggauuuccuuugccaucagcugcuuccuucuguguguggcuuugcucggguuuauaaugugggcgugccaaaagggaaacaucagauguaauauuugcaucuga

SEQ ID NO: 138951 - RNA, 1701 nt, Artificial Sequence; identical to SEQ ID NO: 134903
  derived and/or modified CDS sequence (opt3) from hemagglutinin__InfluenzaA__AHC62182

SEQ ID NO: 138952 - RNA, 1701 nt, Artificial Sequence; identical to SEQ ID NO: 137122
  derived and/or modified CDS sequence (opt3) from hemagglutinin__InfluenzaA__AHC62194

SEQ ID NO: 138953 - RNA, 1701 nt, Artificial Sequence
  derived and/or modified CDS sequence (opt3) from hemagglutinin__InfluenzaA__AHC62206
augaagaccaucauugcccugagcuacauacucugccuuguguucgcucagaaacugcccggcaacgacaauuccacagcaacuuuguguuuagggcaccaugccgucccuaacggaacgaucguuaagaccauuacaaaugaucaaaucgaggugacuaacgcgaccgaacugguacagucuucaaguacaggugagauuugcgacagcccacaccagauccuagauggcgaaaauuguacccucauagacgcucugcuuggggauccgcagugcgacggauuucaaaacaaaaagugggaucuguucguggagagauccaaagccuauucuaauuguuaccccuaugacgucccugauuacgcaucguugaggucacucguggccagcaguggcacucuggaauuuaacaaugaguccuucaucuggacagguguuacccagaacgggacgucuagcgcuugcauucggcgcuccaauucaaguuucuuuagccgacugaacuggcucacucauuuaaauuuuaaguauccagcacugaacgugaccaugcccaauaacgagcaguucgacaagcuguacaucuggggaguccaccauccuggcacagauaaagaccagauuuuucuuuaugcccaaucuuccggccguaucacugugucaaccaagagaagccagcaggcuguaauaccaaacauugggaguaggccccggauccgcaauauuccuucuagaaucuccaucuacuggacaauuguuaaaccaggagauauacugcuaaucaacagcaccgguaaucucauugccccgaggggcuacuucaagauccggucggggaaaucuuccauaaugcgcucagacgcgcccauuggaaaguguaacagugaaugcaucacgccuaauggcagcaucccaaacgacaagcccuuucagaaugugaaccgaauuacuuauggugcauguccuagauacgucaaacaauccacacugaaguuggccaccgggaugaggaaugugccagagaaacagacucggggaaucuucggcgcuauugccggcuuuauagaaaacgggugggagggaaugguggaugguugguauggcuuccgucaccaaaauucugaggggcgcggacaggcagcugaccuuaagagcacacaggccgcgaucgaucagauuaacggcaaauugaauagacucaucgguaagaccaacgaaaaauuccaccagaucgagaaggaauuuucagaggucgaagggaggauucaagaccuggagaaguacguugaggauacgaaaauagacuuauggaguuauaaugccgaacugcucguggcacuugagaaccagcauaccaucgaucugacagacuccgaaaugaacaaguuguucgagaaaacuaagaaacagcuacgggaaaaugcugaggauaugggcaacggaugcuuuaagauuuaccacaagugugacaaugccugcaucggcagcauucgaaacgggaccuauaaucaugauguauaccgcgacgaggcucugaacaauagauuccagaucaaaggaguggaacucaagucugguuacaaagacuggauacuguggaucucauuugccauuaguugcuuccuucugugugucgcauugcucggcuuuaucaugugggccugccaaaaggggaacauuagguguaauaucugcauauga

SEQ ID NO: 138954 - RNA, 1701 nt, Artificial Sequence; identical to SEQ ID NO: 135030
  derived and/or modified CDS sequence (opt3) from hemagglutinin__InfluenzaA__AHC62218

SEQ ID NO: 138955 - RNA, 1701 nt, Artificial Sequence
  derived and/or modified CDS sequence (opt3) from hemagglutinin__InfluenzaA__AHC62242
augaagaccaucauugcccugagcuacauacucugccuuguguucgcucagaaaauccccggcaacgacaauuccacagcaacucuguguuuggggcaccaugccgucccuaacggaacgauuguuaagaccaucacaaaugaucaaauugaggugacuaacgcgaccgaauuaguacaaaauucuucaacaggugagaucugcgacaguccacaccagauacuggauggcgaaaacuguacccuaaucgacgcucuccugggggauccgcagugcgacggauuucagaauaaaaagugggaucuuuucguggagagaagcaaagccuauuccaacuguuaccccuaugacgucccugauuacgcaucucugaggucguugguggccucaagcggcacucucgaauuuaauaacgagaguuucaauuggacagguguuacccagaacgggacguccucugcuugcauucggcgcagcaauaacuccuuuuucucacgacugaauuggcugacucaucucaacuuuaaguauccagcauuaaacgugaccaugcccaauaacgagcaguucgacaagcuguacaucuggggaguccaccauccuggcacagauaaagaccagauuuuucuuuaugcccaagcuaguggccguaucacugugagcaccaagagaucucagcaggccguaauaccaaauauuggguccaggccccggguucgcaacaucccuucaagaauuagcaucuacuggacaaucgugaaaccaggagauauuuugcugauaaauaguaccgguaaccuaaucgcgccgaggggcuacuucaagauucggucugggaaauccagcaucaugcgcucggacgcacccauaggaaaguguaauucugaaugcauuacgccuaacggcuccaucccaaaugacaagcccuuucagaacgucaaucgaaucacuuauggugccuguccuagauacgugaaacaaaacacacucaagcuggcuaccgggaugaggaaugugccagagaaacagacucggggaauuuucggcgccaucgcaggcuuuauugaaaacgggugggagggaauggucgaugguugguauggcuuccgucaccaaaauucagaggggcgcggacaggcugccgaccuuaagaguacacaggcggccauagaucagaucaacggcaaacugaacagauugauugguaagaccaaugaaaaauuccaccagaucgagaaggaauuuagcgagguugaagggaggauccaagaccucgagaaguacguggaggauacgaaaauugaccugugguccuauaacgcagaauuacugauagcucucgagaaucagcauaccaucgaucuuacagacucugaaaugaacaagcuguucgagaaaacuaagaaacaguugcgggaaaaugccgaggauaugggcaacggaugcuuuaagauuuaccacaagugugacaaugcuugcaucggcagcauucgaaacgggaccuaugaucaugacguauaccgcgacgaggcccuaaauaacagauuccagaucaaaggaguggaacugaagucagguuacaaagauuggauacucuggaucaguuuugcaauuuccugcuuccugcuuugugucgcccuguugggcuuuaucaugugggcuugccaaaaggggaauauuagguguaacaucugcauauga

SEQ ID NO: 138956 - RNA, 1701 nt, Artificial Sequence; identical to SEQ ID NO: 138665
  derived and/or modified CDS sequence (opt3) from hemagglutinin__InfluenzaA__AHC62254

SEQ ID NO: 138957 - RNA, 1701 nt, Artificial Sequence; identical to SEQ ID NO: 135030
  derived and/or modified CDS sequence (opt3) from hemagglutinin__InfluenzaA__AHC62266

SEQ ID NO: 138958 - RNA, 1701 nt, Artificial Sequence; identical to SEQ ID NO: 138829
  derived and/or modified CDS sequence (opt3) from hemagglutinin__InfluenzaA__AHC62278

SEQ ID NO: 138959 - RNA, 1701 nt, Artificial Sequence
  derived and/or modified CDS sequence (opt3) from hemagglutinin__InfluenzaA__AHC62290
augaagaccaucauugcccugagcuacauacucugccuuaucuucgcucagaaacugcccggcaacgacaauuccacagcaacuuuguguuuagggcaccaugccgugccuaacggaacgauugucaagaccaucacaaaugaucaaauugagguuacuaacgcgaccgaacuggugcagucuucaaguacaggugagaucugcaauagcccacaccagauacuagacggcgaaaacuguacccucaucgaugcucugcuuggggacccgcagugcgauggauuucaaaauaaaaagugggaccuguucguagagagauccaaagcccauucuaacuguuaucccuacgaugugccugacuaugcaucguugaggucacucgucgccagcaguggcacucuggaauuuaauaacgaguccuucaauuggacaggugugacccagaacgggacgucuagcgcuugcauucggcgcuccaauaacucauuuuucagucgacugaauuggcucacucacuuaaacuuuaaguacccagcacugaacguuaccaugcccaauaacgagcaguucgauaagcuguauaucuggggagugcaucacccuggcacagacaaagaucagaucuuuuuguacgcccaagcuagcggccguauuacugucucuaccaagagaucccagcaggccgugauaccaaauauugggucaaggccccggguacgcaacaucccuagcagaguuaguauuuauuggacaaucgugaaaccaggagacauccugcuaauuaauucuaccgguaaccucauagcgccgaggggcuacuucaagauccgguccgggaaaagcucgauuaugcgcucugaugcacccaucggaaaguguaauuccgccugcauaacgccuaacggcucaauuccaaaugacaagcccuuucagaacgucaaucgaaucacuuacggugcuuguccuagauaugugaaacaaaacacacugaaacuugccaccgggaugaggaaugugccagaaaaacagacucggggaaucuucggcgcaauugcuggcuuuaucgagaacgggugggaaggaauggucgacgguugguacggcuuccgucaccagaauagugaggggcgcggacaagccgcggaucuuaagagcacacaggccgcaauugaccagauaaacggcaaauugaacagacucaucgguaagaccaaugagaaauuccaucagauugaaaaggaguuuuccgaaguugaggggaggauccaagaucuggaaaaguauguggaggacacgaaaaucgauuuauggucuuacaacgcugagcugcucguagcccuugaaaaucagcacaccauugaccugacagauagcgagaugaacaaguuguucgaaaagacuaagaaacagcuacgggagaaugcugaagacaugggcaacggaugcuuuaagauauaucauaagugugauaaugccugcaucggcucaauucgaaacgggaccuacgaccacgauguguaucgcgacgaggcacugaauaacagauuccagaucaaaggagucgagcucaagagugguuacaaagacuggauucuguggaucuccuuugccauaagcugcuuccuucuguguguggcuuugcucggcuuuaucaugugggcgugccaaaaggggaauauuagguguaacaucugcauuuga

SEQ ID NO: 138960 - RNA, 1701 nt, Artificial Sequence
  derived and/or modified CDS sequence (opt3) from hemagglutinin__InfluenzaA__AHC62302
augaagaccaucauugcccugagcuacauacucugccuuguguucgcucagaaacugcccggcaacgacaauuccacagcaacuuuguguuuagggcaccaugccgucccuaacggaacgaucguuaagaccauuacaaaugaucaaaucgaggugacuaacgcgaccgaacugguacagucuucaaguacaggugagauuugcaauagcccacaccagauccuagacggcgaaaacuguacccucauagaugcucugcuuggggacccgcagugcgauggauuucaaaauaaaaagugggaccuguucguggagagauccaaagcccauucuaacuguuaucccuacgaugucccugacuaugcaucguugaggucacucguggccagcaguggcacucuggaauuuaauaacgaguccuucaauuggacagguguuacccagaacgggacgucuagcgcuugcauccggcgcuccaauaacucauuuuucagucgacugaauuggcucacucacuuaaacuuuaaguacccagcacugaacgugaccaugcccaauaacgagcaguucgauaaacuuuauauuuggggaguccaucacccuggcacagacaaagaucagaucuuuuuguacgcccaagcugccggccguauuacugugagcaccaagagaucucagcaggcgguaaucccaaauauaggguccaggccccggguucgcaacauuccuucaagagugagcaucuauuggacaauugucaaaccaggagacauccugcuaaucaauaguaccgguaaccucauugcaccgaggggcuacuucaagauacggaaugggaaaucuuccaucaugcgcagcgaugcccccauuggaaaguguaacucggcuugcaucacgccuaauggcucuauaccaaacgacaagcccuuucagaaugugaaccgaauuacuuacggugccuguccuagauaugugaaacaaaauacacugaaacuugcaaccgggaugaggaacgucccagaaaagcagacucggggaaucuucggcgcuaucgccggcuuuauugagaaugggugggaaggaaugguugacgguugguacggcuuccgucaccagaacuccgaggggcgcggacaagcggccgaucugaagucaacacaggcagcuaucgaccagauuaacggcaaauugaauagacucauagguaagaccaacgagaaauuccaucagaucgaaaaggaguuuagugaaguggaggggaggauucaagaucuggaaaaguauguagaggacacgaaaaucgauuuauggagcuacaaugccgagcugcucguggcucuugaaaaccagcacaccaucgaccugacagauuccgagaugaauaaguuguucgaaaagacuaagaaacagcuacgggagaacgccgaagacaugggcaauggaugcuuuaagauuuaucauaagugugauaacgcaugcauaggcucuauccgaaaugggaccuacgaccacgaugucuaucgcgacgaggcccugaacaauagauuccagauuaaaggaguggagcucaagagcgguuacaaagacuggauccuguggauuucauuugcuaucaguugcuuccuucuguguguugcguugcucggcuuuauaaugugggcaugccaaaaggggaacaucagguguaauauuugcaucuga

SEQ ID NO: 138961 - RNA, 1701 nt, Artificial Sequence
  derived and/or modified CDS sequence (opt3) from hemagglutinin__InfluenzaA__AHC62314
augaagaccaucauugcccugagcuacauacucugccuuguguucgcucagaaacugcccggcaacgacaauuccacagcaacuuuguguuuagggcaccaugccgucccuaacggaacgaucguuaagaccauuacaaaugaucaaaucgaggugacuaacgcgaccgaacugguacaaaauucuucaacaggugagauuugcgacaguccacaccagauccuagauggcgaaaacuguacccucauagacgcucugcuuggggauccgcagugcgacggauuucagaauaaaaagugggaucuguucguggagagaagcaaagccuauuccaacuguuaccccuaugacgucccugauuacgcaucuuugaggucgcucguggccucaagcggcacucuggaauuuaauaacgagaguuucaauuggacagguguuacccagaacgggacguccucugcuugcauccggcgcagcaauaacuccuuuuucucacgacugaauuggcucacucauuuaaacuuuaaguauccagcacugaacgugaccaugcccaauaacgagcaguucgacaaacuuuacauuuggggaguccaccauccuggcacagauaaggaccagaucuuuuuguaugcccaagcuaguggccguauuacugugagcaccaagagaucucagcaggccguaaucccaaauauaggguccaggccccggguucgcaacauuccuucaagaaucagcauuuacuggacaaucgugaaaccaggagauauccugcuaauuaauaguaccgguaaccucauagcgccgaggggcuacuucaagauccggucugggaaauccagcauuaugcgcucggacgcacccaucggaaaguguaauucugaaugcauaacgccuaacggcuccauuccaaaugacaagcccuuucagaacgucaaucgaaucacuuauggugccuguccuagauacgugaaacaaaacacacugaaacuugcuaccgggaugaggaaugugccagagaagcagacucggggaaucuucggcgccauugcaggcuuuaucgaaaacgggugggagggaauggucgaugguugguauggcuuccgucaccaaaauucagaggggcgcggacaggcugccgaccugaagaguacacaggcggccauugaucagauaaacggcaaauugaacagacucaucgguaagaccaaugaaaaauuccaccagauugagaaggaauuuagcgagguugaagggaggauccaagaccuggagaaguacguggaggauacgaaaaucgacuuaugguccuauaacgcagaacugcucguagcucuugagaaucagcauaccauugaucugacagacucugaaaugaacaaguuguucgagaaaacuaagaaacagcuacgggaaaaugccgaggauaugggcaacggaugcuuuaagauauaccacaagugugacaaugcuugcaucggcagcauucgaaacgggaccuaugaucaugacguguaccgcgacgaggcccugaauaacagauuccagaucaggggagucgaacucaaaucagguuacaaggauuggauucuguggaucaguuuugcaauauccugcuuccuucuguguguggccuugcucggcuuuaucaugugggcuugccaaaaagggaauauucgguguaacaucugcauuuga

SEQ ID NO: 138962 - RNA, 1701 nt, Artificial Sequence; identical to SEQ ID NO: 138826
  derived and/or modified CDS sequence (opt3) from hemagglutinin__InfluenzaA__AHC62326

SEQ ID NO: 138963 - RNA, 1701 nt, Artificial Sequence; identical to SEQ ID NO: 135830
  derived and/or modified CDS sequence (opt3) from hemagglutinin__InfluenzaA__AHC62338

SEQ ID NO: 138964 - RNA, 1701 nt, Artificial Sequence; identical to SEQ ID NO: 134903
  derived and/or modified CDS sequence (opt3) from hemagglutinin__InfluenzaA__AHC62350

SEQ ID NO: 138965 - RNA, 1701 nt, Artificial Sequence; identical to SEQ ID NO: 135830
  derived and/or modified CDS sequence (opt3) from hemagglutinin__InfluenzaA__AHC62362

SEQ ID NO: 138966 - RNA, 1701 nt, Artificial Sequence; identical to SEQ ID NO: 135830
  derived and/or modified CDS sequence (opt3) from hemagglutinin__InfluenzaA__AHC62374

SEQ ID NO: 138967 - RNA, 1701 nt, Artificial Sequence; identical to SEQ ID NO: 138829
  derived and/or modified CDS sequence (opt3) from hemagglutinin__InfluenzaA__AHC62386

SEQ ID NO: 138968 - RNA, 1701 nt, Artificial Sequence; identical to SEQ ID NO: 134903
  derived and/or modified CDS sequence (opt3) from hemagglutinin__InfluenzaA__AHC62398

SEQ ID NO: 138969 - RNA, 1701 nt, Artificial Sequence
  derived and/or modified CDS sequence (opt3) from hemagglutinin__InfluenzaA__AHC62410
augaagaccaucauugcccugagcuacauacucugccuuguguucgcucagaaacugcccggcaacgacaauuccacagcaacuuuguguuuagggcaccaugccgucccuaacggaacgaucguuaagaccauuacaaaugaucaaaucgaggugacuaacgcgaccgaacugguacagucuucaaguacaggugagauuugcaauagcccacaccagauccuagacggcgaaaacuguacccucauagaugcucugcuuggggacccgcagugcgauggauuucaaaauaaaaagugggaccuguucguggagagauccaaagcccauucuaacuguuaucccuacgaugucccugacuaugcaucguugaggucacucguggccagcaguggcacucuggaauuuaauaacgaguccuucaauuggacagguguuacccagaacgggacgucuagcgcuugcauccggcgcuccaauaacucauuuuucagucgacugaauuggcucacucacuuaaacuuuaaguacccagcacugaacgugaccaugcccaauaacgagcaguucgauaagcuguauauuuggggaguccaucacccuggcacagacaaagaucagaucuuuuuguacgcccaagcuagcggccguauuacugugucuaccaagagaucccagcaggccguaaucccaaauauagggucaaggccccggguucgcaacauuccuagcagagugaguaucuauuggacaauugucaaaccaggagacauccugcuaaucaauucuaccgguaaccucauugcgccgaggggcuacuucaagauacgguccgggaaaagcucgaucauucgcucugaugcacccaucggaaaguguaauuccgccugcauaacgccuaacggcucaauuccaaaugacaagcccuuucagaacgugaaucgaaucacuuacggugcuuguccuagauaugugaaacaaaacacacugaaacuugccaccgggaugaggaaugucccagaaaaacagacucggggaaucuucggcgcaauugcuggcuuuaucgagaacgggugggaaggaaugguugacgguugguacggcuuccgucaccagaauagugaggggcgcggacaagccgcggaucuuaagagcacacaggccgcaauugaccagauaaacggcaaauugaacagacucaucgguaagaccaaugagaaauuccaucagauugaaaaggaguuuuccgaaguggaggggaggauccaagaucuggaaaaguauguagaggacacgaaaaucgauuuauggucuuacaacgcugagcugcucguggcccuugaaaaucagcacaccauugaccugacagauagcgagaugaacaaguuguucgaaaagacuaagaaacagcuacgggagaaugcugaagacaugggcaacggaugcuuuaagauauaucauaagugugauaaugccugcaucggcucaauucgaaacgggaccuacgaccacgaugucuaucgcgacgaggcacugaauaacagauuccagaucaaaggaguggagcucaagagugguuacaaagacuggauucuguggaucuccuuugccauaagcugcuuccuucuguguguugcuuugcucggcuuuaucaugugggcgugccaaaaggggaauauuagguguaacaucugcauuuga

SEQ ID NO: 138970 - RNA, 1701 nt, Artificial Sequence; identical to SEQ ID NO: 138772
  derived and/or modified CDS sequence (opt3) from hemagglutinin__InfluenzaA__AHC62422

SEQ ID NO: 138971 - RNA, 1701 nt, Artificial Sequence
  derived and/or modified CDS sequence (opt3) from hemagglutinin__InfluenzaA__AHC62434
augaagaccaucauugcccugagcuacauacucugccuuguguucgcucagaaacugcccggcaacgacaauuccacagcaacuuuguguuuagggcaccaugccgucccuaacggaacgaucguuaagaccauuacaaaugaucaaaucgaggugacuaacgcgaccgaacugguacagucuucaaguacaggugagauuugcaauagcccacaccagauccuagacggcgaaaacuguacccucauagaugcucugcuuggggacccgcagugcgauggauuucaaaauaaaaagugggaccuguucguggagagauccaaagcccauucuaacuguuaucccuacgaugucccugacuaugcaucguugaggucacucguggccagcaguggcacucuggaauuuaauaacgaguccuucaauuggacagguguuacccagaacgggacgucuagcgcuugcauccggcgcuccaauaacucauuuuucagucgacugaauuggcucacucacuuaaacuuuaaguacccagcacugaacgugaccaugcccaauaacgagcaguucgauaaacuuuauauuuggggaguccaucacccuggcacagacaaagaucagaucuuuuuguacgcccaagcugccggccguauuacugugagcaccaagagaucucagcaggcgguaaucccaaauauaggguccaggccccggguucgcaacauuccuucaagagugagcaucuauuggacaauugucaaaccaggagacauccugcuaaucaauaguaccgguaaccucauugcaccgaggggcuacuucaagauacagucugggaaauccagcaucaugcggucggaugcccccauuggaaaguguaauucugcuugcaucacgccuaacggcuccauaccaaaugacaagcccuuucaaaacgugaaucgcauuacuuacggugccuguccucgauaugugaaacagaacacacugaaacuugcaaccgggaugagaaaugucccagaaaagcagacuaggggaaucuucggcgcuaucgccggcuuuauugagaacgggugggaaggaaugguugacgguugguacggcuuccggcaccaaaauucagaggggcguggacaggcggccgaucugaagaguacacaggcagcuaucgaccagauuaacggcaaauugaaccgccucauagguaagaccaaugagaaauuccaucaaaucgaaaaggaguuuagcgaaguggaggggaggauucaggaucuggaaaaguauguagaggacacgaaaaucgauuuaugguccuacaacgccgagcugcucguggcucuugaaaaucagcacaccaucgaccugacagauucugagaugaacaaguuguucgaaaagacuaagaaacagcuaagagagaaugccgaagacaugggcaacggaugcuuuaagauuuaucauaagugugauaaugcaugcauaggcagcauccggaacgggaccuacgaccacgaugucuaucgagacgaggcccugaauaaccgcuuccaaauuaaaggaguggagcucaagucagguuacaaagacuggauccuguggauuaguuuugcuaucuccugcuuccuucuguguguugcguugcucggcuuuauaaugugggcaugccagaaggggaauaucagauguaacauuugcaucuga

SEQ ID NO: 138972 - RNA, 1701 nt, Artificial Sequence; identical to SEQ ID NO: 134903
  derived and/or modified CDS sequence (opt3) from hemagglutinin__InfluenzaA__AHC62446

SEQ ID NO: 138973 - RNA, 1701 nt, Artificial Sequence; identical to SEQ ID NO: 135030
  derived and/or modified CDS sequence (opt3) from hemagglutinin__InfluenzaA__AHC62458

SEQ ID NO: 138974 - RNA, 1701 nt, Artificial Sequence
  derived and/or modified CDS sequence (opt3) from hemagglutinin__InfluenzaA__AHC62470
augaagaccaucauugcccugagcuacauacucugccuuguguucgcucagaaacugcccggcaacgacaauuccacagcaacuuuguguuuagggcaccaugccgucccuaacggaacgaucguuaagaccauuacaaaugaucaaaucgaggugacuaacgcgaccgaacugguacaaaauucuucaacaggugagauuugcgacaguccacaccagauccuagauggcgaaaacuguacccucauagacgcucugcuuggggauccgcagugcgacggauuucagaauaaaaagugggaucuguucguggagagaagcaaagccuauuccaacuguuaccccuaugacgucccugauuacgcaucuuugaggucgcucguggccucaagcggcacucuggaauuuaauaacgagaguuucaauuggacagguguuacccagaacgggacguccucugcuugcauccggcgcagcaauaacuccuuuuucucacgacugaauuggcucacucauuuaaacuuuaaguauccagcacugaacgugaccaugcccaauaacgagcaguucgacaaacuuuacauuuggggaguccaccauccuggcacagauaaggaccagaucuuuuuguaugcccaagcuaguggccguauuacugugagcaccaagagaucucagcaggccguaaucccaaauauaggguccaggccccggguucgcaacauuccuucaagaaucagcauuuacuggacaaucgugaaaccaggagauauccugcuaauuaauaguaccgguaaccucauagcgccgaggggcuacuucaagauccggucugggaaauccagcauuaugcgcucggacgcacccaucggaaaguguaauucugaaugcauaacgccuaacggcuccauuccaaaugguaagcccuuucagaacgucaaucgaaucacuuauggggccuguccuagauacgugaaacaaaacacacugaaacuugcuaccggaaugaggaaugugccagagaagcagacucggggcaucuucggcgccauugcaggguuuaucgaaaacggaugggaggguauggucgacggcugguauggguuccgucaccaaaauucagagggacgcggccaggcugccgaucugaagaguacacaggcggccauugaccagauaaacgguaaauugaacagacucaucgggaagaccaaugaaaaauuccaccagauugagaaggaauuuagcgagguugaaggcaggauccaagaucuggagaaguacguggaggacacgaaaaucgauuuaugguccuauaacgcagaacugcucguagcucuugagaaucagcauaccauugaccugacagauucugaaaugaacaaguuguucgagaaaacuaagaaacagcuacgggaaaaugccgaggacaugggaaacggcugcuuuaagauauaccacaagugugauaaugcuugcaucgggagcauucgaaacggaaccuaugaccaugauguguaccgcgacgaggcccugaauaacagauuccagaucaaaggugucgaacucaagucaggcuacaaagacuggauucuguggaucaguuuugcaauauccugcuuccuucuguguguggccuugcucggguuuaucaugugggcuugccaaaagggaaauauuagguguaacaucugcauuuga

SEQ ID NO: 138975 - RNA, 1701 nt, Artificial Sequence; identical to SEQ ID NO: 138727
  derived and/or modified CDS sequence (opt3) from hemagglutinin__InfluenzaA__AHC62482

SEQ ID NO: 138976 - RNA, 1701 nt, Artificial Sequence; identical to SEQ ID NO: 134903
  derived and/or modified CDS sequence (opt3) from hemagglutinin__InfluenzaA__AHC62506

SEQ ID NO: 138977 - RNA, 1701 nt, Artificial Sequence; identical to SEQ ID NO: 135030
  derived and/or modified CDS sequence (opt3) from hemagglutinin__InfluenzaA__AHC62518

SEQ ID NO: 138978 - RNA, 1701 nt, Artificial Sequence
  derived and/or modified CDS sequence (opt3) from hemagglutinin__InfluenzaA__AHC62530
augaagaccaucauugcccugagcuacauacucugccuuguguucgcucagaaaauccccggcaacgacaauuccacagcaacucuguguuuggggcaccaugccgucccuaacggaacgauuguuaagaccaucacaaaugaucaaauugaggugacuaacgcgaccgaauuaguacagucuucaaguacaggugagaucugcaauagcccacaccagauacuggacggcgaaaacuguacccuaaucgaugcucuccugggggacccgcagugcgauggauuucaaaauaaaaagugggaccuuuucguggagagauccaaagcccauucuaacuguuaucccuacgaugucccugacuaugcaucgcugaggucauugguggccagcaguggcacucucgaauuuaauaacgaguccuucaauuggacagguguuacccagaacgggacgucuagcgcuugcauucggcgcuccaauaacucauuuuucagucgacugaauuggcugacucaccucaacuuuaaguacccagcauuaaacgugaccaugcccaauaacgagcaguucgauaagcuguauaucuggggaguccaucacccuggcacagacaaagaucagauuuuucuuuacgcccaagcuagcggccguaucacugugucuaccaagagaucccagcaggccguaauaccaaauauugggucaaggccccggguucgcaacaucccuagcagagugaguauuuauuggacaaucgucaaaccaggagacaucuugcugauuaauucuaccgguaaccuaauagcgccgaggggcuacuucaagauccgguccgggaaaagcucgauuaugcgcucugaugcacccaucggaaaguguaauuccgccugcauaacgccuaacggcucaauuccaaaugacaagcccuuucagaacgugaaucgaaucacuuacggugcuuguccuagauaugugaaacaaaacacacucaagcuggccaccgggaugaggaaugucccagaaaaacagacucggggaaucuucggcgcaauugcuggcuuuaucgagaacgggugggaaggaaugguugacgguugguacggcuuccgucaccagaauagugaggggcgcggacaagccgcggaucuuaagagcacacaggccgcaauugaccagauaaacggcaaacugaacagauugaucgguaagaccaaugagaaauuccaucagauugaaaaggaguuuuccgaaguggaggggaggauccaagaucucgaaaaguauguagaggacacgaaaaucgaucuguggucuuacaacgcugaguuacugguggcccucgaaaaucagcacaccauugaccuuacagauagcgagaugaacaagcuguucgagaaaacuaagaaacaguugcgggaaaaugcugaagacaugggcaacggaugcuuuaagauauaucauaagugugauaaugccugcaucggcucaauucgaaacgggaccuacgaccacgaugucuaucgcgacgaggcacuaaauaacagauuccagaucaaaggaguggagcugaagagugguuacaaagacuggauucucuggaucuccuuugccauaagcugcuuccugcuuuguguugcucuguugggcuuuaucaugugggcgugccaaaaggggaauauuagguguaacaucugcauuuga

SEQ ID NO: 138979 - RNA, 1701 nt, Artificial Sequence; identical to SEQ ID NO: 138699
  derived and/or modified CDS sequence (opt3) from hemagglutinin__InfluenzaA__AHC62542

SEQ ID NO: 138980 - RNA, 1701 nt, Artificial Sequence; identical to SEQ ID NO: 134903
  derived and/or modified CDS sequence (opt3) from hemagglutinin__InfluenzaA__AHC62554

SEQ ID NO: 138981 - RNA, 1701 nt, Artificial Sequence
  derived and/or modified CDS sequence (opt3) from hemagglutinin__InfluenzaA__AHC62566
augaagaccaucauugcccugagcuacauacucugccuuguguucgcucagaaacugcccggcaacgacaauuccacagcaacuuuguguuuagggcaccaugccgucccuaacggaacgaugguuaagaccaucacaaaugaucaaauugaggugacuaacgcgaccgaacugguacaaaauucuucaacaggugagaucugcgacaguccacaccagauucuagauggcgaaaacuguacccucaucgacgcucugcuuggggauccgcagugcgacggauuucagaauaaaaagugggaucuguucguggagagaagcaaagccuauuccaacuguuaccccuaugacgucccugauuacgcaucuuugaggucgcucguggccucaagcggcacucuggaauuuaauaacgagaguuucaauuggacagguguuacccagaacgggacguccucugcuugcauacggcgcagcaauaacuccuuuuucucacgacugaauuggcucacucauuuaaacuuuaaguauccagcacugaacgugaccaugcccaauaacgagcaguucgacaaguuguacaucuggggaguccaccauccuggcacagauaaagaccagauuuuucuuuaugcccaagcuaguggccguaucacugugagcaccaagagaucucagcaggccguaauuccaaauaucggguccaggccccggguucgcaacauaccuucaagaauuagcaucuacuggacaauugugaaaccaggagauauccugcuaaucaauaguaccgguaaccucauugcgccgaggggcuacuucaagauacggucugggaaauccagcaucaugcgcucggacgcacccauuggaaaguguaauucugaaugcaucacgccuaacggcuccauaccaaaugacaagcccuuucagaacgucaaucgaauuacuuauggugccuguccuagauacgugaaacaaaacacacugaaacuugcuaccgggaugaggaaugugccagagaagcagacucggggaaucuucggcgccaucgcaggcuuuauugaaaacgggugggagggaauggucgaugguugguauggcuuccgucaccaaaauucagaggggcgcggacaggcugccgaccugaagaguacacaggcggccaucgaucagauuaacggcaaauugaacagacucauagguaagaccaaugaaaaauuccaccagaucgagaaggaauuuagcgagguugaagggaggauucaagaccuggagaaguacguggaggauacgaaaaucgacuuaugguccuauaacgcagaacugcucguagcucuugagaaucagcauaccaucgaucugacagacucugaaaugaacaaguuguucgagaaaacuaagaaacagcuacgggaaaaugccgaggauaugggcaacggaugcuuuaagauuuaccacaagugugacaaugcuugcauaggcagcauccgaaacgggaccuaugaucaugacguguaccgcgacgaggcccugaauaacagauuccagauuaaaggagucgaacucaagucagguuacaaagauuggauccuguggauuaguuuugcaaucuccugcuuccuucuguguguggccuugcucggcuuuauaaugugggcuugccaaaaggggaauaucagguguaacauuugcaucuga

SEQ ID NO: 138982 - RNA, 1701 nt, Artificial Sequence; identical to SEQ ID NO: 134903
  derived and/or modified CDS sequence (opt3) from hemagglutinin__InfluenzaA__AHC62578

SEQ ID NO: 138983 - RNA, 1701 nt, Artificial Sequence; identical to SEQ ID NO: 134903
  derived and/or modified CDS sequence (opt3) from hemagglutinin__InfluenzaA__AHC62590

SEQ ID NO: 138984 - RNA, 1701 nt, Artificial Sequence; identical to SEQ ID NO: 135030
  derived and/or modified CDS sequence (opt3) from hemagglutinin__InfluenzaA__AHC62602

SEQ ID NO: 138985 - RNA, 1701 nt, Artificial Sequence
  derived and/or modified CDS sequence (opt3) from hemagglutinin__InfluenzaA__AHC62614
augaagaccaucauugcccugagcuacauacucugccuuguguucgcucagaaacugcccggcaacgacaauuccacagcaacuuuguguuuagggcaccaugccgucccuaacggaacgaucguuaagaccauuacaaaugaucaaaucgaggugacuaacgcgaccgaacugguacagucuucaaguacaggugagauuugcaauagcccacaccagaucauagacggcgaaaacuguacccuaaucgaugcucuccugggggacccgcagugcgauggauuucaaaauaaaaagugggaccuuuucguggagagauccaaagcccauucuaacuguuaucccuacgaugucccugacuaugcaucgcugaggucauugguggccagcaguggcacucucgaauuuaauaacgaguccuucaauuggacagguguuacccagaacgggacgucuagcgcuugcauucggggauccaauaacucauuuuucagucgccugaauuggcugacucaccucaacuuuaaguacccagcauuaaacgugaccaugcccaauaacgagcaguucgauaagcuguauaucuggggcguccaucacccuggcacagacaaagaucagauuuuucuuuacgcccaagcuagcgggcgaaucacugugucuaccaagcguucccagcaggccguaauaccaaauauuggaucaagacccaggguucggaacaucccuagccgcgugaguauuuauuggacaaucgucaaaccaggugacaucuugcugauuaauucuaccggcaaccuaauagcgccgagaggguacuucaagaucagguccggaaaaagcucgauuaugcggucugaugcacccaucggcaaguguaauuccgccugcauaacgccuaacgguucaauuccaaaugacaagcccuuucagaacgugaaucgcaucacuuacggggcuuguccucgauaugugaaacaaaacacacucaagcuggccaccggaaugagaaaugucccagaaaaacagacuaggggcaucuucggcgcaauugcuggguuuaucgagaacggaugggaagguaugguugacggcugguacggguuccggcaccagaauagugagggacguggccaagccgcggaucuuaagagcacacaggccgcaauugaccagauaaacgguaaacugaaccgcuugaucgggaagaccaaugagaaauuccaucagauugaaaaggaguuuuccgaaguggagggcagaauccaagaucucgaaaaguauguagaggacacgaaaaucgaucuguggucuuacaacgcugaguuacugguggcccucgaaaaucagcacaccauugaccuuacagauagcgagaugaacaagcuguucgagaaaacuaagaaacaguugagggaaaaugcugaagacaugggaaacggcugcuuuaagauauaucauaagugugauaaugccugcaucgggucaauucggaacggaaccuacgaccacgaugucuaucgagacgaggcacuaaauaaccgcuuccagaucaaagguguggagcugaagaguggcuacaaagacuggauucucuggaucuccuuugccauaagcugcuuccugcuuuguguugcucuguugggguuuaucaugugggcgugccaaaagggaaauauuagauguaacaucugcauuuga

SEQ ID NO: 138986 - RNA, 1701 nt, Artificial Sequence; identical to SEQ ID NO: 138666
  derived and/or modified CDS sequence (opt3) from hemagglutinin__InfluenzaA__AHC62626

SEQ ID NO: 138987 - RNA, 1701 nt, Artificial Sequence; identical to SEQ ID NO: 135030
  derived and/or modified CDS sequence (opt3) from hemagglutinin__InfluenzaA__AHC62638

SEQ ID NO: 138988 - RNA, 1701 nt, Artificial Sequence; identical to SEQ ID NO: 138830
  derived and/or modified CDS sequence (opt3) from hemagglutinin__InfluenzaA__AHC62650

SEQ ID NO: 138989 - RNA, 1701 nt, Artificial Sequence
  derived and/or modified CDS sequence (opt3) from hemagglutinin__InfluenzaA__AHC62662
augaagaccaucauugcccugagcuacauacucugccuuguguucgcucagaaacugcccggcaacgacaauuccacagcaacuuuguguuuagggcaccaugccgucccuaacggaacgaucguuaagaccauuacaaaugaucaaaucgaggugacuaacgcgaccgaacugguacagucuucaaguacaggugagauuugcaauagcccacaccagauccuagacggcgaaaacuguacccucauagaugcucugcuuggggacccgcagugcgauggauuucaaaauaaaaagugggaccuguucguggagagauccaaagcccauucuucguguuaucccuacgaugucccugacuaugcaucauugaggagccucguggccaguuccggcacucuggaauuuaacaaugagucuuucaacuggacagguguuacccagaaugggacgagcuccgcuugcauccggggaucaaacaauagcuuuuucagucgccugaacuggcucacucacuuaaauuuuaaguacccagcacugaacgugaccaugcccaacaaugagcaguucgauaaacuuuauauuuggggcguccaucacccuggcacagacaaagaucagaucuuuuuguacgcccaggcuucugggcgaauuacuguguccaccaagcguucacaacaggccguaaucccaaacauaggaagcagacccaggguucggaauauuccuagucgcgugucuaucuauuggacaauugucaaaccaggugacauccugcuaaucaacuccaccggcaaucucauugcgccgagaggguacuucaagauaaggagcggaaaaucgucuaucaugcgguccgaugcacccauuggcaaguguaacucagccugcaucacgccuaaugguaguauaccaaacgacaagcccuuucagaaugugaaccgcauuacuuacggggcuuguccucgauaugugaaacaaaauacacugaaacuugccaccggaaugagaaacgucccagaaaagcagacuaggggcaucuucggcgcaaucgcuggguuuauugagaauggaugggaagguaugguugacggcugguacggguuccggcaccagaacagcgagggacguggccaagccgcggaucugaaguccacacaggccgcaaucgaccagauuaaugguaaauugaaccgccucauagggaagaccaacgagaaauuccaucagaucgaaaaggaguuuucugaaguggagggcaggauucaagaucuggaaaaguauguagaggacacgaaaaucgauuuauggagcuacaaugcugagcugcucguggcccuugaaaaccagcacaccaucgaccugacagauucagagaugaauaaguuguucgaaaagacuaagaaacagcuaagagagaacgcugaagacaugggaaauggcugcuuuaagauuuaucauaagugugauaacgccugcauagggaguauccggaauggaaccuacgaccacgaugucuaucgagacgaggcacugaacaaucgcuuccagauuaaagguguggagcucaaguccggcuacaaagacuggauccuguggauuagcuuugccaucucuugcuuccuucuguguguugcuuugcucggguuuauaaugugggcgugccaaaagggaaacaucagauguaauauuugcaucuga

SEQ ID NO: 138990 - RNA, 1701 nt, Artificial Sequence
  derived and/or modified CDS sequence (opt3) from hemagglutinin__InfluenzaA__AHC62674
augaagaccaucauugcccugagcuacauacucugccuuguguucgcucagaaacugcccggcaacgacaauuccacagcaacuuuguguuuagggcaccaugccgucccuaacggaacgaucguuaagaccauuacaaaugaucaaaucgaggugacuaacgcgaccgaacugguacagucuucaaguacaggugagauuugcaauagcccacaccagauccuagacggcgaaaacuguacccucauagaugcucugcuuggggacccgcagugcgauggauuucaaaauaaaaagugggaccuguucguggagagauccaaagcccauucuaacuguuaucccuacgaugucccugacuaugcaucguugaggucacucaucgccagcaguggcacucuggaauuuaauaacgaguccuucaauuggacaggugugacccagaacgggacgucuagcgcuugcauucggggauccaauaacucauuuuucagucgccugaauuggcucacucacuuaaacuuuaaguacccagcacugaacguuaccaugcccaauaacgagcaguucgauaagcuguauaucuggggcgugcaucacccuggcacagacaaagaucagaucuuuuuguacgcccaagcuagcgggcgaauuacugucucuaccaagcguucccagcaggccgugauaccaaauauuggaucaagacccaggguacggaacaucccuagccgcguuaguauuuauuggacaaucgugaaaccaggugacauccugcuaauuaauucuaccggcaaccucauagcgccgagaggguacuucaagaucagguccggaaaaagcucgauuaugcggucugaugcacccaucggcaaguguaauuccgccugcauaacgccuaacgguucaauuccaaaugacaagcccuuucagaacgucaaucgcaucacuuacggggcuuguccucgauaugugaaacaaaacacacugaaacuugccaccggaaugagaaaugugccagaaaaacagacuaggggcaucuucggcgcaauugcuggguuuaucgagaacggaugggaagguauggucgacggcugguacggguuccggcaccagaauagugagggacguggccaagccgcggaucuuaagagcacacaggccgcaauugaccagauaaacgguaaauugaaccgccucaucgggaagaccaaugagaaauuccaucagauugaaaaggaguuuuccgaaguugagggcagaauccaagaucuggaaaaguauguggaggacacgaaaaucgauuuauggucuuacaacgcugagcugcucguagcccuugaaaaucagcacaccauugaccugacagauagcgagaugaacaaguuguucgaaaagacuaagaaacagcuaagggagaaugcugaagacaugggaaacggcugcuuuaagauauaucauaagugugauaauaccugcaucgagucaauucggaacgggacauacgaccacgauguguaucgagacgaggcccugaauaaccgcuuccagaucaaaggagucgaacucaagagugguuacaaagacuggauucuguggaucuccuuugcaauaagcugcuuccuucuguguguggccuugcucggcuuuaucaugugggcuugccaaaaggggaauauuagauguaacaucugcauuuga

SEQ ID NO: 138991 - RNA, 1701 nt, Artificial Sequence; identical to SEQ ID NO: 138108
  derived and/or modified CDS sequence (opt3) from hemagglutinin__InfluenzaA__AHE37972

SEQ ID NO: 138992 - RNA, 1701 nt, Artificial Sequence
  derived and/or modified CDS sequence (opt3) from hemagglutinin__InfluenzaA__AHE37973
augaaggccauccuggugguccuccuuuacaccuucgcuacagcaaacgccgacacucugugcauuggcuaucacgcgaauaacagcacggauaccguugacacaguguuggagaaaaauguaacugugacccauuccgucaacuuacuggaagauaagcacaaugggaaacuauguaagcucagaggaguggcuccccugcaucuugguaaaugcaacauagccggcuggauccuggggaauccugagugugaaucuuugucaacagcaaguagcugguccuacauuguugagaccucuucgucagacaacggaacuugcuauccaggcgauuuuaucaauuacgaagaacucagggagcagcugagcaguguguccucuuucgaacgguuugagauuuucccgaagacaagcuccuggcccaaccacgacucaaauaagggugucaccgccgcuuguccucaugcagggacgaaaaguuuuuauaagaaccugaucuggcucgugaaaaagggaaauagcuacccaaaauuaucuaaguccuauauaaacgauaagggcaaagaaguacugguucuuuggggcauccaccaccccucaacuaccgccgaccaacagagcuuguaccagaaugcugaugccuacguguucgucgggacaagucgcuauucuaagaaauuuaagccugagauugcgauccgaccaaaagugcgugaccaggagggaagaauuaacuacuauuggacucugaucgaacccggugauaagauaaccuucgaggcaacaggcaaccuaguggucccuagguacgccuuugcuauggaacggaaugccggguccggaauuaucauuagcgacaccccaguucaugauugcaacacgacuugucaaacaccggagggcgcaaucaauaccucgcuccccuuccagaacauccacccuauuacuauagguaaaugcccaaaguaugugaagucuacaaaacugcgccuugcuaccgggcugagaaauguacccuccauccagucaaggggauuguuuggcgccauugcgggcuucaucgaagggggauggacggguaugguggacggcugguacggguaucaucaccagaacgagcaaggaaguggcuacgccgcagaccucaagagcacccagaaugcuauagauaaaauuacaaacaaggucaauuccgugaucgagaaaaugaacacucaguuuaccgccguugguaaggaguucaaucaccuggagaagcggaucgaaaacuuaaauaaaaagguggacgauggguuccuggacauuuggacauacaacgcugagcuccuuguccuguuggaaaaugagcgcacucuagauuaucaugacucuaacgugaaaaaccuguacgagaagguacgaaaucagcucaaaaacaaugccaaggaaaucggcaacggauguuuugaguucuaucacaagugcgauaauaccuguauggaaagcguuaaaaacggcacauacgacuauccuaaguacucagaggaagcaaaacugaauagagagaagauugauggggugaaacuugagaguaccaggauauaucaaauccuggccauuuacuccacugucgcuagcucuuuggugcucgucgugucacugggagcgaucaguuuuuggaugugcagcaacgguuccuuacagugccggaucuguauuuga

SEQ ID NO: 138993 - RNA, 1701 nt, Artificial Sequence
  derived and/or modified CDS sequence (opt3) from hemagglutinin__InfluenzaA__AHE37974
augaaggccauccuggugguccuccuuuacaccuucgcuacagcaaacgccgacacucugugcauuggcuaucacgcgaauaacagcacggauaccguugacacaguguuggagaagaauguaacugugacccauuccgucaacuuacuggaagauaagcacaaugggaaacuauguaagcucagaggaguggcuccccugcaucuugguaaaugcaacauagccggcuggauccuggggaauccugagugugaaucuuugucaacagcaaguagcugguccuacauuguugagaccucuucgucagacaacggaacuugcuauccaggcgauuuuaucaauuacgaagaacucagggagcagcugagcaguguguccucuuucgaacgguuugagauguucccgaagacaagcuccuggcccaaccacgacucaaauaagggugucaccgccgcuuguccucaugcaggggccaaaaguuuuuauaagaaccugauuuggcucgugaaaaagggaaauagcuacccaaaauuaucuaaguccuauaucaacgauaagggcaaagaaguacugguucuuuggggcauacaccaccccucaacgacugcugaccaacagagcuuguaccagaaugccgaugcguacguguucgucgggaccaguaaguauucuaaaaaguuuaaaccugagaucgcaauucgcccaaaggugcgagaccaggagggacguaugaacuacuauuggacacugaucgaacccggugauaaaauuacuuucgaggccaccggcaaccuaguggucccuagauacgcuuuugccauggaaaggaaugcaggguccggaaucauaauuagcgacacaccaguucaugauugcaacaccacgugucaaacuccggagggcgcuaucaauacaucgcuccccuuccagaacauucacccuaucaccaucgguaagugcccaaaguaugugaaaucuacuaagcugcggcuugccacagggcugcgcaauguacccuccauucagucaagaggauuguuuggcgcgauagccggcuucaucgaagggggauggaccgguaugguggacggcugguacggguaucaucaccagaacgagcaaggaaguggcuacgcagcugaccucaaaagcacgcagaaugccauugauaagaucaccaacaaagucaauuccgugauagagaagaugaacacacaguuuacugcuguugguaaggaguucaaucaccuggagaaaaggauugaaaacuuaaauaagaaaguggacgauggguuccuggacaucuggaccuacaacgccgagcuccuuguccuguuggaaaaugagcggacacuagauuaucaugacucuaacgugaagaaccuguacgagaaaguacgcaaucagcucaagaacaaugcaaaggaaaucggcaacggauguuuugaguucuaucacaaaugcgauaauacuuguauggaaagcguuaagaacggcaccuacgacuauccuaaauacucagaggaagccaagcugaaucgagagaaaauugauggggugaaacuugagaguacaagaaucuaucaaauucuggcuauauacuccaccgucgcgagcucuuuggugcucgucgugucacugggagcaaucaguuuuuggaugugcagcaacgguuccuuacagugcaggauuuguaucuga

SEQ ID NO: 138994 - RNA, 1701 nt, Artificial Sequence; identical to SEQ ID NO: 138088
  derived and/or modified CDS sequence (opt3) from hemagglutinin__InfluenzaA__AHE37975

SEQ ID NO: 138995 - RNA, 1701 nt, Artificial Sequence
  derived and/or modified CDS sequence (opt3) from hemagglutinin__InfluenzaA__AHE37976
augaaggccauccuggugguccuccuuuacaccuucgcuacagcaaacgccgacacucugugcauuggcuaucacgcgaauaacagcacggauaccguugacacaguguuggagaaaaauguaacugugacccauuccgucaacuuacuggaagauaagcacaaugggaaacuauguaagcucagaggaguggcuccccugcaucuugguaaaugcaacauagccggcuggauccuggggaauccugagugugaaucuuugucagcagccaguagcugguccuacauuguugagacaucuucgucaaacaauggaaccugcuauccaggcgacuuuaucaacuacgaagaacucagggagcagcugagcaguguguccucuuucgaacgguuugagauuuucccgaagacuagcuccuggcccaaucacgauucaaacaagggugucacagcugcauguccucaugccggggcuaaaaguuuuuauaagaaucugaucuggcucgugaaaaagggaaacagcuacccaaaauuaucuaaguccuauauaaaugacaagggcaaagaaauccugguacuuuggggcauucaccaccccucaaccacgacugaucaacagagcuuguaccagaacgccgacgcguacguuuucguggggaccagucgcuauucuaagaaauuuaagccugagaucgcaauucgaccaaaaguccgugaucaggagggaagaaugaacuacuauuggacacugaucgaacccggugacaagauaacuuucgaggccaccggcaaucuaguggugccuagguacgcuuuugccauggaacggaacgcaggguccggaauuaucauuagcgauacaccaguccaugacugcaauaccacgugucaaacuccggagggcgcuaucaacacaucgcuccccuuccagaauauccacccuauuaccauagguaaaugcccaaaguauguuaagucuacuaaacugcgccuugccacagggcugagaaacgugcccuccauccagucaaggggauuguuuggcgcgauugccggcuucaucgaagggggauggaccgguaugguagauggcugguacggguaucaucaccagaaugagcaaggaaguggcuacgcagcugaccucaagagcacgcagaacgccauagacaaaauuaccaauaaggugaacuccgucaucgagaaaaugaauacacaguuuacugcuguggguaaggaguucaaccaccuggagaagcggaucgaaaauuuaaacaaaaagguugaugacggguuccuggauauuuggaccuacaaugccgagcuccuugugcuguuggaaaacgagcgcacacuagacuaucaugauucuaacgucaaaaaucuguacgagaaggugcgaaaccagcucaaaaauaacgcaaaggaaaucggcaauggauguuuugaguucuaucacaagugcgacaacacuuguauggaaagcguuaaaaauggcaccuacgauuauccuaaguacucagaggaagccaaacugaacagagggaagauugacggaguaaaacuugagaguacaaggauauaucaaauccuggcuauuuacuccaccguggcgagcucuuugguccucguggucucacugggugcaaucaguuuuuggaugugcagcaauggcuccuuacagugccggaucuguauuuga

SEQ ID NO: 138996 - RNA, 1701 nt, Artificial Sequence; identical to SEQ ID NO: 138088
  derived and/or modified CDS sequence (opt3) from hemagglutinin__InfluenzaA__AHE37977

SEQ ID NO: 138997 - RNA, 1701 nt, Artificial Sequence; identical to SEQ ID NO: 138108
  derived and/or modified CDS sequence (opt3) from hemagglutinin__InfluenzaA__AHE37978

SEQ ID NO: 138998 - RNA, 1701 nt, Artificial Sequence; identical to SEQ ID NO: 138088
  derived and/or modified CDS sequence (opt3) from hemagglutinin__InfluenzaA__AHE37979

SEQ ID NO: 138999 - RNA, 1701 nt, Artificial Sequence
  derived and/or modified CDS sequence (opt3) from hemagglutinin__InfluenzaA__AHE37980
augaaggccauccuggugguccuccuuuacaccuucgcuacagcaaacgccgacacucugugcauuggcuaucacgcgaauaacagcacggauaccguugacacaguguuggagaaaaauguaacugugacccauuccgucaacuuacuggaagauaagcacaaugggaaacuauguaagcucagaggagugacaccccugcaucuugguaaaugcaacauagcuggcuggauccuggggaauccugagugugaaucuuugucaaccgccaguagcugguccuacauuguugagacuucuucgucagacaacggaacaugcuauccaggcgauuuuaucaauuacgaagaacucagggagcagcugagcaguguguccucuuucgaacgguuugagauuuucccgaagaccagcuccuggcccaaccacgacucaaauaagggugucacggcagccuguccucaugcuggggcaaaaaguuuuuauaagaaccugaucuggcucgugaaaaagggaaauagcuacccaaaauuaucuaaguccuauauaaacgauaagggcaaagaaguacugguucuuuggggcauccaccaccccucaacuaccgccgaccaacagagcuuguaccagaaugcugaugccuacguguucgucgggacaagucgcuauucuaagaaauuuaagccugagauugcgauccgaccaaaagugcgugaccaggagggaagaaugaacuacuauuggacucugauugaacccggugauaagaucaccuucgaggcaacaggcaaccuaguggucccuagguacgccuuugcuauggaacggaaugccggguccggaauaauuaucagcgacaccccaguucaugauugcaacacgacuugucaaacaccggagggcgcaauuaauaccucgcuccccuuccagaacauccacccuaucacuauugguaaaugcccaaaguaugugaagucuacaaaacugcgccuugcuaccgggcugagaaauguacccuccauacagucaaggggauuguuuggcgccaucgcgggcuucauugaagggggauggacggguaugguggacggcugguacggguaucaucaccagaacgagcaaggaaguggcuacgccgcagaccucaagagcacccagaaugcuaucgauaaaauaacaaacaaggucaauuccgugauugagaaaaugaacacucaguuuaccgccguugguaaggaguucaaucaccuggagaagcggaucgaaaacuuaaauaaaaagguggacgauggguuccuggacaucuggacauacaacgcugagcuccuuguccuguuggaaaaugagcgcacucuagauuaucaugacucuaacgugaaaaaccuguacgagaagguacgaaaucagcucaaaaacaaugccaaggaaauuggcaacggauguuuugaguucuaucacaagugcgauaauaccuguauggaaagcguuaaaaacggcacauacgacuauccuaaguacucagaggaagcaaaacugaauagagagaagaucgauggggugaaacuugagaguaccaggauuuaucaaauacuggccaucuacuccacugucgcuagcucuuuggugcucgucgugucacugggagcgauuaguuuuuggaugugcagcaacgguuccuuacagugccggaucuguaucuga

SEQ ID NO: 139000 - RNA, 1701 nt, Artificial Sequence
  derived and/or modified CDS sequence (opt3) from hemagglutinin__InfluenzaA__AHE37981
augaaggccauccuggugguccuccuuuacaccuucgcuacagcaaacgccgacacucugugcauuggcuaucacgcgaauaacagcacggauaccguugacacaguguuggagaagaauguaacugugacccauuccgucaacuuacuggaagauaagcacaaugggaaacuauguaagcucagaggaguggcuccccugcaucuugguaaaugcaacauagccggcuggauccuggggaauccugagugugaaucuuugucaacagcaaguagcugguccuacauuguugagaccucuucgucagacaacggaacuugcuauccaggcgauuuuaucaauuacgaagaacucagggagcagcugagcaguguguccucuuucgaacgguuugagauguucccgaagacaagcuccuggcccaaccacgacucaaauaagggugucaccgccgcuuguccucaugcaggggccaaaaguuuuuauaagaaccugauuuggcucgugaaaaagggaaauagcuacccaaaauuaucuaaguccuauaucaacgauaagggcaaagaaguacugguucuuuggggcauacaccaccccucaacgacugcugaccaacagagcuuguaccagaaugccgaugcguacguguucgucgggaccaguaaguauucuaaaaaguuuaaaccugagaucgcaauucgcccaaaggugcgagaccaggagggacguaugaacuacuauuggacacugaucgaacccggugauaaaauuacuuucgaggccaccggcaaccuaguggucccuagauacgcuuuugccauggaaaggaaugcaggguccggaaucauaauuagcgacacaccaguucaugauugcaacaccacgugucaaacuccggagggcgcuaucaauacaucgcuccccuuccagaacauucacccuaucaccaucgguaagugcccaaaguaugugaaaucuacuaagcugcggcuugccacagggcugcgcaauguacccuccauucagucaagaggauuguuuggcgcgauagccggcuucaucgaagggggauggaccgguaugguggacggcugguacggguaucaucaccagaacgagcaaggaaguggcuacgcagcugaccucaaaagcacgcagaaugccauugauaagaucaccaacaaagucaauuccgugauagagaagaugaacauucaguuuacagcuguugguaaggaguucaaucaccuggagaaaaggaucgaaaacuuaaauaagaaaguggacgauggguuccuggacaucuggacuuacaacgccgagcuccuuguccuguuggaaaaugagcggacccuagauuaucaugacucuaacgugaagaaccuguacgagaaaguacgcaaucagcucaagaacaaugcaaaggaaauuggcaacggauguuuugaguucuaucacaaaugcgauaauacauguauggaaagcguuaagaacggcacuuacgacuauccuaaauacucagaggaagccaagcugaaucgagagaaaaucgauggggugaaacuugagaguaccagaauuuaucaaauacuggcuaucuacuccacagucgcgagcucuuuggugcucgucgugucacugggagcaauuaguuuuuggaugugcagcaacgguuccuuacagugcaggaucuguaucuga

SEQ ID NO: 139001 - RNA, 1701 nt, Artificial Sequence; identical to SEQ ID NO: 138088
  derived and/or modified CDS sequence (opt3) from hemagglutinin__InfluenzaA__AHE37982

SEQ ID NO: 139002 - RNA, 1701 nt, Artificial Sequence
  derived and/or modified CDS sequence (opt3) from hemagglutinin__InfluenzaA__AHE37983
augaaggccauccuggugguccuccuuuacaccuucgcuacagcaaacgccgacacucugugcauuggcuaucacgcgaauaacagcacggauaccguugacacaguguuggagaagaauguaacugugacccauuccgucaacuuacuggaagauaagcacaaugggaaacuauguaagcucagaggaguggcuccccugcaucuugguaaaugcaacauagccggcuggauccuggggaauccugagugugaaucuuugucaacagcaaguagcugguccuacauuguugagaccucuucgucagacaacggaacuugcuauccaggcgauuuuaucaauuacgaggagcucagggagcagcugagcaguguguccucuuucgaacgguuugagauuuucccgaagacaagcuccuggcccaaccacgacucaaauaagggugucaccgccgcuuguccucaugcaggggccaaaaguuuuuauaagaaccugaucuggcucgugaaaaagggaaauagcuacccaaaauuaucugaauccuauauaaacgauaagggcaaggagguacugguucuuuggggcauccaccaccccucaacgacugcugaccaacagagcuuguaccagaaugccgaugcguacguguucgucgggaccagucgcuauucuaaaaaguuuaaaccugagauugcaauccgaccaaaggugcgugaccaggaaggaagaaugaacuacuauuggacacugauugagcccggugauaaaaucacuuucgaagccaccggcaaccuaguggucccuagguacgcuuuugccauggagcggaaugcaggguccggaauaauuaucagcgacacaccaguucaugauugcaacaccacgugucaaacuccggaaggcgcuauuaauacaucgcuccccuuccagaacauccacccuaucaccauugguaagugcccaaaauaugugaagucuacuaagcugcgccuugccacagggcugagaaauguacccuccauacagucaaggggauuguuuggcgcgaucgccggcuucauugaagggggauggaccgguaugguggacggcugguacggguaucaucaccagaacgagcaaggaaguggcuacgcagcugaccucaaaagcacgcagaaugccaucgauaagauaaccaacaaagucaauuccgugauugaaaagaugaacacacaguuuacugcuguugguaaagaguucaaucaccuggaaaagcggaucgagaacuuaaauaagaaaguggacgauggguuccuggacaucuggaccuacaacgccgaacuccuuguccuguuggagaaugagcgcacacuagauuaucaugacucuaacgugaagaaccuguacgaaaaaguacgaaaucagcucaagaacaaugcaaaagagauuggcaacggauguuuugaguucuaucacaagugcgauaauacuuguauggaaagcguuaagaacggcaccuacgacuauccuaaauacucagaagaggccaagcugaauagagagaaaaucgauggggugaaacuugaaaguacaaggauuuaucaaauacuggcuaucuacuccaccgucgcgagcucuuuggugcucgucgugucacugggagcaauuaguuuuuggaugugcagcaacgguuccuuacagugccggaucuguaucuga

SEQ ID NO: 139003 - RNA, 1701 nt, Artificial Sequence
  derived and/or modified CDS sequence (opt3) from hemagglutinin__InfluenzaA__AHE37984
auggaggccauccuggugguccuccuuuacaccuucgcuacagcaaacgccgacacucugugcauuggcuaucacgcgaauaacagcacggauaccguugacacaguguuggaaaagaauguaacugugacccauuccgucaacuuacuggaggauaagcacaaugggaagcuauguaaacucagaggaguggcuccccugcaucuugguaagugcaacauagccggcuggauccuggggaauccugaaugugagucuuugucaacagcaaguagcugguccuacauuguugaaaccucuucgucagacaacggaacuugcuauccaggcgauuuuaucaauuacgaggagcucagggaacagcugagcaguguguccucuuucgagcgguuugaaauuuucccgaaaacaagcuccuggcccaaccacgacucaaauaagggugucaccgccgcuuguccucaugcaggggccaagaguuuuuauaaaaaccugaucuggcucgugaagaaaggaaauagcuacccaaaguuaucuaaauccuauauaaacgauaagggcaaggagguacugguucuuuggggcauccaccaccccucaacgacugcugaccaacagagcuuguaccagaaugccgaugcguacguguucgucgggaccagucgcuauucuaaaaaguuuaaaccugagauugcaauccgaccaaaggugcgugaccaggaaggaagaaugaacuacuauuggacacugauugagcccggugauaaaaucacuuucgaagccaccggcaaccuaguggucccuagguacgcuuuugccauggagcggaaugcaggguccggaauaauuaucagcgacacaccaguucaugauugcaacaccacgugucaaacuccggaaggcgcuauuaauacaucgcuccccuuccagaacauccacccuaucaccauugguaagugcccaaaauaugugaagucuacuaagcugcgccuugccacagggcugagaaauguacccuccauacagucaaggggauuguuuggcgcgaucgccggcuucauugaagggggauggaccgguaugguggacggcugguacggguaucaucaccagaacgagcaaggaaguggcuacgcagcugaccucaaaagcacgcagaaugccaucgauaagauaaccaacaaagucaauuccgugauugaaaagaugaacacacaguuuacugcuguugguaaagaguucaaucaccuggaaaagcggaucgagaacuuaaauaagaaaguggacgauggguuccuggacaucuggaccuacaacgccgaacuccuuguccuguuggagaaugagcgcacacuagauuaucaugacucuaacgugaagaaccuguacgaaaaaguacgaaaucagcucaagaacaaugcaaaagagauuggcaacggauguuuugaguucuaucacaagugcgauaauacuuguauggagagcguuaagaacggcaccuacgacuauccuaaauacucagaagaggccaagcugaauagagagaaaaucgauggggugaaacuugaaaguacaaggauuuaucaaauacuggcuaucuacuccaccgucgcgagcucuuuggugcucgucgugucacugggagcaauuaguuuuuggaugugcagcaacgguuccuuacagugccggaucuguaucuga

SEQ ID NO: 139004 - RNA, 1701 nt, Artificial Sequence
  derived and/or modified CDS sequence (opt3) from hemagglutinin__InfluenzaA__AHE37985
augaagaccaucauugcccugagcuacauacucugccuuguguucgcucaggagcugcccggcaacgacgauuccacagcaacuuuguguuuagggcaccaugccgucccuaauggaacgaucguuaaaaccauuacaaacgaccaaaucgaagugacuaaugcgaccgagcugguacagucuucaaguacaggugaaauuugcaacagcccacaccagauccuagauggcgagaauuguacccucauagacgcucugcuuggggauccgcagugcgacggauuucaaaacaagaaaugggaucuguucguggaaagauccaaggcccauucuaauuguuaucccuacgacgucccugauuaugcaucguugaggucacucguggccagcaguggcacucuggaguuuaacaaugaguccuucaacuggacagguguuacccagaaugggacgucuagcgcuugcauccggcgcuccaacaauucauuuuucagucgacugaacuggcucacucacuuaaauuuuaaauacccagcacugaacgugaccaugcccaacaaugaacaguucgacaagcuguauauuuggggaguccaucacccuggcacagauaaggaccagaucuuuuuguacgcccaagcuagcggccguauuacugugucuaccaaaagaucccagcaggccguaaucccaaacauagggucaaggccccggguucgcaauauuccuagcagagugaguaucuauuggacaauugucaagccaggagauauccugcuaaucaacucuaccgguaaucucauugcgccgaggggcuacuucaaaauacgguccggaaagagcucgaucaugaaaucugacgcacccauugggaaguguaacuccgccugcaucacgccuaauggcucaauaccaaacgacaagcccuuucagaaugugaaccgcauuacuuacggugcuuguccucgauaugugaaacaaaauacacugaaacuugccaccgggaugagaaacgucccagagaagcagacuaggggaaucuucggcgcaaucgcuggcuuuauugaaaaugggugggagggaaugguugaugguugguacggcuuccggcaccagaacagugaggggcguggacaagccgcggaccuuaagagcacacaggccgcaaucgaucagauuaauggcaaauugaaccgccucauagguaagaccaacgaaaaauuccaucagaucgagaaggaauuuuccgagguggaagggaggauucaagaccuggagaaguauguagaggauacgaaaaucgacuuauggucuuacaaugcugaacugcucguggcccuugagaaccagcacaccaucgaucugacagacagcgaaaugaauaaguuguucgagaaaacuaagaaacagcuaagagaaaacgcugaggauaugggcaauggaugcuuuaagauuuaucauaagugugacaacgccugcauaggcucaauccggaaugggaccuacgaucacgacgucuaucgagacgaggcacugaacaaucgcuuccagauuaaaggaguggaacucaagagugguuacaaagauuggauccuguggauuuccuuugccaucagcugcuuccuucuguguguugcuuugcucggcuuuauaaugugggcgugccaaaaggggaacaucagauguaauauuugcaucuga

SEQ ID NO: 139005 - RNA, 1701 nt, Artificial Sequence; identical to SEQ ID NO: 137970
  derived and/or modified CDS sequence (opt3) from hemagglutinin__InfluenzaA__AHE37986

SEQ ID NO: 139006 - RNA, 1701 nt, Artificial Sequence; identical to SEQ ID NO: 137906
  derived and/or modified CDS sequence (opt3) from hemagglutinin__InfluenzaA__AHE37987

SEQ ID NO: 139007 - RNA, 1701 nt, Artificial Sequence
  derived and/or modified CDS sequence (opt3) from hemagglutinin__InfluenzaA__AHE37988
augaagaccaucauugcccugagcuacauacucugccuuguguucgcucagaaacugcccggcaacgacaauuccacagcaacuuuguguuuagggcaccaugccgucccuaacggaacgaucguuaagaccauuacaaaugauagaaucgaggugacuaacgcgaccgaacugguacaaaauucuucaauuggugagaucugcgacaguccacaccagauacuagauggcgaaaacuguacacucaucgacgcucugcuuggggauccgcagugcgacggauuucagaauaaaaagugggaucuguucguggagaggagcaaagccuauuccaacuguuaccccuaugacgucccugauuacgcaucuuugcggucgcucguggccucaagcggcacccuggaauuuaauaacgagaguuucaauuggacugguguuacacaaaacgggaccuccucugcuugcauucgccgaagcaauuccucauuuuucagucgucugaacuggcucacgcauuuaaauuuuaaguauccagcacugaacgugacuaugcccaacaaugagcaguucgacaaacuuuacaucuggggaguccaccauccuggcaccgauaaagaccagaucuuuuuguaugcccagagcucuggcagaauuacaguguccacuaagaggucacaacaggcuguaauaccaaacauugggagccggccccgcaucagaaauauuccuaguaggaucucuaucuacuggaccauuguuaaaccaggagauauacugcuaaucaacuccacagguaaucucauugccccgcggggcuacuucaagauccgcagcgggaaaucgucuauaaugcgauccgacgcgcccauuggaaaguguaagucagaaugcaucaccccuaacggcaguaucccaaaugacaaacccuuucagaacgugaauagaauuacguauggugcauguccuagguacgucaagcagagcacucugaaacuugccacagggaugcggaacgugccagagaagcaaacccguggaaucuucggcgcuauugccggcuuuauagaaaaugggugggagggaaugauggaugguugguauggcuuccgccaccagaacuccgaggggagaggacaggcagcugaccugaaaucuacucaagccgcgaucgaucagauuaauggcaaguugaacaggcucaucgguaaaacaaaugaaaaguuccaccagaucgagaaggaauuuagcgagguggaagggcggauucagaaccuggagaaauacgucgaggacaccaagauagauuuauggucauauaacgccgaacugcucguugcacuugagaaucaacauacgaucgaccugaccgauagugaaaugaacaaauuguucgagaagacaaagaagcagcuacgagaaaaugcugaggacaugggcaacggaugcuuuaagauuuaccacaaaugugauaaugccugcaucggcuccauucgcaacgggacuuaugaccauaauguguacagagaugaggcucugaacaauagguuccagaucaagggaguagaacucaaaagcgguuacaaggacuggauacuguggaucucuuuugccauuucaugcuuccuucuguguguggcauugcucggcuuuaucaugugggccugccagaaagggaacauucgguguaauaucugcauauga

SEQ ID NO: 139008 - RNA, 1701 nt, Artificial Sequence; identical to SEQ ID NO: 138042
  derived and/or modified CDS sequence (opt3) from hemagglutinin__InfluenzaA__AHE37989

SEQ ID NO: 139009 - RNA, 1701 nt, Artificial Sequence; identical to SEQ ID NO: 137906
  derived and/or modified CDS sequence (opt3) from hemagglutinin__InfluenzaA__AHE37990

SEQ ID NO: 139010 - RNA, 1701 nt, Artificial Sequence; identical to SEQ ID NO: 137906
  derived and/or modified CDS sequence (opt3) from hemagglutinin__InfluenzaA__AHE37991

SEQ ID NO: 139011 - RNA, 1701 nt, Artificial Sequence
  derived and/or modified CDS sequence (opt3) from hemagglutinin__InfluenzaA__AHE37992
augaagaccaucauugcccugagcuacauacucugccuuguguucgcucaggagcugcccggcaacgacgauuccacagcaacuuuguguuuagggcaccaugccgucccuaauggaacgaucguuaaaaccauuacaaacgaccaaaucgaagugacuaaugcgaccgagcugguacagucuucaaguacaggugaaauuugcaacagcccacaccagauccuagauggcgagaauuguacccucauagacgcucugcuuggggauccgcagugcgacggauuucaaaacaagaaaugggaucuguucguggaaagauccaaggcccauucuaauuguuaucccuacgacgucccugauuaugcaucguugaggucacucguggccagcaguggcacucuggaguuugacaacgaguccuucaauuggacagguguuacccagaacgggacgucuagcgcuugcauccggcgcuccaauaacucauuuuucagucgacugaauuggcucacucacuuaaacuuuaaauacccagcacugaaugugaccaugcccaacaacgaacaguucgauaaacuuuauauuuggggaguccaucacccuggcacagacaaggaucagaucuuuuuguacgcccaagcuagcggccguauuacugugucuaccaagagaucccagcaggccguaaucccaaauauagggucaaggccccggguucgcaacauuccuagcagagugaguaucuauuggacaauugucaagccaggagacauccugcuaaucaauucuaccgguaaccucauugcgccgaggggcuacuucaaaauacgguccggaaagagcucgaucaugcgcucugacgcacccauugggaaauguaauuccgccugcaucacgccuaacggcucaauaccaaaugauaagcccuuucagaacgugaaucgaauuacuuacggugcuuguccuagauaugugaagcaaaacacacugaaacuugccaccgggaugaggaaugucccagagaagcagacucggggaaucuucggcgcaaucgcuggcuuuauugaaaacgggugggagggaaugguugacgguugguacggcuuccgucaccagaauagugaggggcgcggacaagccgcggaucugaaaagcacacaggccgcaaucgaccagauuaacggcaaguugaauagacucauagguaaaaccaacgaaaaguuccaucagaucgagaaagaauuuuccgagguggaagggaggauucaagaucuggagaaguauguagaggacacgaagaucgauuuauggucuuacaacgcugaacugcucguggcccuugagaaucagcacaccaucgaccugacagauagcgaaaugaacaaauuguucgagaagacuaaaaagcagcuacgggaaaaugcugaggacaugggcaacggaugcuuuaaaauuuaucauaagugugauaaugccugcauaggcucaauccgaaacgggaccuacgaccacgacgucuaucgcgaugaggcacugaauaacagauuccagauuaagggaguggaacucaaaagugguuacaaggacuggauccuguggauuuccuuugccaucagcugcuuccuucuguguguugcuuugcucggcuuuauaaugugggcgugccaaaaagggaauaucagguguaacauuugcaucuga

SEQ ID NO: 139012 - RNA, 1701 nt, Artificial Sequence; identical to SEQ ID NO: 138088
  derived and/or modified CDS sequence (opt3) from hemagglutinin__InfluenzaA__AHE38023

SEQ ID NO: 139013 - RNA, 1701 nt, Artificial Sequence
  derived and/or modified CDS sequence (opt3) from hemagglutinin__InfluenzaA__AHE38024
augaaggccauccuggugguccuccuuuacaccuucgcuacagcaaacgccgacacucugugcauuggcuaucacgcgaauaacagcacggauaccguugacacaguguuggagaagaauguaacugugacccauuccgucaacuuacuggaagauaagcacaaugggaaacuauguaagcucagaggaguggcuccccugcaucuugguaaaugcaacauagccggcuggauccuggggaauccugagugugaaucuuugucaacagcaaguagcugguccuacauuguugagaccucuucgucagacaacggaacuugcuauccaggcgauuuuaucaauuacgaagaacucagggagcagcugagcaguguguccucuuucgaacgguuugagauuuucccgaagacaagcuccuggcccaaccacgacucaaauaagggugucaccgccgcuuguccucaugcaggggccaaaaguuuuuauaagaaccugaucuggcucgugaaaaagggaaauagcuacccaaaauuaucucaauccuauauaaacgauaagggcaaggaaguacugguucuuuggggcauccaccaccccucaacgacugcugaccagcagagcuuguaccagaaugccgaugcguacguguucgucgggaccagucgcuauucuaaaaaguuuaaaccugagauugcaacacgaccaaaggugcgugaccaagagggaagaaugaacuacuauuggacucugguggaacccggugauaaaaucaccuucgaggccacaggcaaccuagucguuccuagguacgcuuuuaccauggaacggaaugccggguccggaauuaucauaagcgacacgccagugcaugauugcaacacuacaugucagaccccggagggcgcaauuaauacuucgcuccccuuccagaacauccacccuauuacaaucgguaagugcccaaaauauguaaagucuaccaagcugcgccuugcuacggggcugagaaaugugcccuccauccagucaaggggauuguuuggcgccauugcgggcuucauagaagggggauggaccgguauggucgacggcugguacggguaucaucaccaaaacgagcagggaaguggcuacgccgcagaccucaaaagcacacagaaugcuaucgauaagauuacuaacaaaguuaauuccgugaucgagaagaugaacacccaguuuacagccguggguaaagaguucaaucaccuggagaagcggauagaaaacuuaaauaagaaagucgacgauggguuccuggacauuuggacuuacaacgcugagcuccuugugcuguuggaaaaugagcgcacccuagauuaucaugacucuaacguaaagaaccuguacgagaaaguucgaaaucaacucaagaacaaugccaaagaaaucggcaacggauguuuugaguucuaucacaagugcgauaauacauguauggaaagcgugaagaacggcaccuacgacuauccuaaauacucagaggaagcaaagcugaauagagagaaaaucgauggggucaaacuugagaguacuaggauuuaucagauccuggccauuuacuccacgguggcuagcucuuugguccucgugguuucacugggagcgauaaguuuuuggaugugcagcaacgguuccuuacagugccggaucuguauuuga

SEQ ID NO: 139014 - RNA, 1701 nt, Artificial Sequence
  derived and/or modified CDS sequence (opt3) from hemagglutinin__InfluenzaA__AHE38026
augaaggccauccuggugguccuccuuuacaccuucgcuacagcaaacgccgacacucugugcauuggcuaucacgcgaauaacagcacggauaccguugacacaguguuggagaagaauguaacugugacccauuccgucaacuuacuggaagauaagcacaaugggaaacuauguaagcucagaggaguggcuccccugcaucuugguaaaugcaacauagccggcuggauccuggggaauccugagugugaaucuuugucaacagcaaguagcugguccuacauuguugagaccucuucgucagacaacggaacuugcuauccaggcgauuuuaucaauuacgaggagcucagggagcagcugagcaguguguccucuuucgaacgguuugagauuuucccgaagacaagcuccuggcccaaccacgacucaaauaagggugucaccgccgcuuguccucaugcaggggccaaaaguuuuuauaagaaccugaucuggcucgugaaaaagggaaauagcuacccaaaauuaucucaauccuauauaaacgaaaagggcaaggagguacugguucuuuggggcauccaccaccccucaacgacugcugaucagcagagcuuguaccagaaugccgacgcguacguguucgucgggaccagucgcuauucuaaaaaguuuaaaccugagauugcaauccgaccaaaggugcgugaucaagaaggaagaaugaacuacuauuggacacugguggagcccggugacaaaauuacuuucgaagccaccggcaaccuagucguuccuagguacgcuuuuacaauggagcggaaugccggguccggaaucauaauuagcgauaccccagugcaugacugcaacacgacuugucagacaccggaaggcgcaaucaauaccucgcuccccuuccagaacauucacccuaucacuaucgguaagugcccaaaauauguaaagucuacaaagcugcgccuugcuaccgggcugagaaaugugcccuccauucagucaaggggauuguuuggcgccauagcgggcuucaucgaagggggauggacggguauggucgauggcugguacggguaucaucaccaaaacgagcagggaaguggcuacgccgcagaccucaaaagcacccagaaugcuauugacaagaucacaaacaaaguuaauuccgugauagaaaagaugaacacucaguuuaccgccguggguaaagaguucaaucaccuggaaaagcggauugagaacuuaaauaagaaagucgaugacggguuccuggauaucuggacauacaacgcugaacuccuugugcuguuggagaaugagcgcacucuagacuaucaugauucuaacguaaagaaccuguacgaaaaaguucgaaaucaacucaagaacaaugccaaagagaucggcaacggauguuuugaguucuaucacaagugcgacaauaccuguauggaaagcgugaagaacggcacauacgauuauccuaaauacucagaagaggcaaagcugaauagagagaaaauugacggggucaaacuugaaaguaccaggaucuaucagauucuggccauauacuccacuguggcuagcucuuugguccucgugguuucacugggagcgaucaguuuuuggaugugcagcaacgguuccuuacagugccggauuuguaucuga

SEQ ID NO: 139015 - RNA, 1701 nt, Artificial Sequence; identical to SEQ ID NO: 137931
  derived and/or modified CDS sequence (opt3) from hemagglutinin__InfluenzaA__AHE38027

SEQ ID NO: 139016 - RNA, 1683 nt, Artificial Sequence
  derived and/or modified CDS sequence (opt3) from hemagglutinin__InfluenzaA__AHF20558
augaacacccagauccugguguucgcccucauugcuauaauccccacaaaugcagacaagauuugccuuggccaccaugccgucagcaacgggacuaaaguuaauacgcugaccgagagaggaguggaaguagugaacgcgacagagacugucgaaaggaccaauaucccucggauuuguuccaaggguaaacgcacaguggauuugggccaaugcggguuacugggaaccaucacuggcccaccgcagugugaccaguuucuagaguucucugcugaucucauaaucgaacgacgugaggguucagacguuugcuaccccgggaaguuugugaacgaggaagcccugagacagauucuuagggagaguggaggcaucgauaaagaagcaaugggcuucacauauagcgggauucggaccaauggagccacguccgcuugucgcagaucugguucgucauuuuacgcagagaugaaguggcuguugagcaacacugacaaugccgcuuucccucaaaugaccaagaguuauaaaaacacaaggaaguccccagcccucaucgucuggggcauacaccauucugugagcacugcggagcagaccaaacuguacggguccggaaauaagcugguaacaguuggcucaaguaacuaucagcagagcuuugugcccucuccuggugcacggccacaagucaaugggcucuccggacgcauugauuuccacugguuaaugcugaaccccaaugacaccgugacguuuucauucaacggcgccuuuaucgcuccugaucgagccagcuuccuuagaggcaaaaguauggggauucagucuggagugcaggucgacgcaaacugcgaaggugauuguuaccauuccggcgggacuaucaucagcaauuugccauuucagaacauugacucgagggcuguuggaaagugcccgcgguaugugaagcaacguucucugcuacucgccacaggcaugaaaaauguacccgagauaccuaagggucgcgggcuguucggcgcgaucgccggauucauugaaaacggcugggaggggcuuaucgauggaugguacgguuuuagacaccagaaugcacagggcgaagggaccgcugccgacuacaaauccacucaaucagcuauagaccagauuacaggaaagcugaacagguugaucgagaaaaccaaucagcaguucgagcucaucgauaacgaauuuaaugagguggaaaagcaaauuggcaacgucaucaauuggacgcgggacaguauuaccgagguguggagcuauaacgccgaacuguuaguugcaauggagaaucagcacacaauagaucuggccgacuccgagauggauaaacucuacgaacgagugaagcgccagcuuagagagaacgcugaagaggacgguacuggguguuucgaaaucuuucauaagugcgaugacgauuguauggcgucuauuaggaauaacaccuaugaccacagcaaauaccgggaggaggcaaugcagaaccgcauccaaaucgauccagucaagcugucaaguggcuauaaagacgugauuuugugguucuccuuuggagccagcugcuucauacuacuggcuaucguaaugggccucguuuuuauuugcgugcagaaugggaacaugagauguacaaucggaauuuga

SEQ ID NO: 139017 - RNA, 1683 nt, Artificial Sequence
  derived and/or modified CDS sequence (opt3) from hemagglutinin__InfluenzaA__AHF20568
augaacacccagauccugguguucgcccucauugcuauaauccccacaaaugcagacaagauuugccuuggccaccaugccgucagcaacgggacuaaaguuaauacgcugaccgagagaggaguggaaguagugaacgcgacagagacugucgaaaggaccaauaucccucggauuuguuccaaggguaaacgcacaguggauuugggccaaugcggguuacugggaaccaucacuggcccaccgcagugugaccaguuucuagaguucucugcugaucucauaaucgaacgacgugaggguucagacguuugcuaccccgggaaguuugugaacgaggaagcccugagacagauucuuagggagaguggaggcaucgauaaagaagcaaugggcuucacauauagcgggauucggaccaauggagccacguccgcuugucgcagaucugguucgucauuuuacgcagagaugaaguggcuguugagcaacacugacaaugccgcuuucccucaaaugaccaagaguuauaaaaacacaaggaaguccccagcccucaucgucuggggcauacaccauucugugagcacugcggagcagaccaaacuguacggguccggaaauaagcugguaacaguuggcucaaguaacuaucagcagagcuuugugcccucuccuggugcacggccacaagucaaugggcucuccggacgcauugauuuccacugguuaaugcugaaccccaaugacaccgugacguuuucauucaacggcgccuuuaucgcuccugaucgagccagcuuccuuagaggcaaaaguauggggauucagucuggagugcaggucgacgcaaacugcgaaggugauuguuaccauuccggcgggacuaucaugagcaauuugccauuucagaacaucgacucgagggcuguuggaaagugcccgcgguaugugaagcaacguucucugcuacucgccacaggcaugaaaaauguacccgagauuccuaagggucgcgggcuguucggcgcgauagccggauucaucgaaaacggcugggaggggcuuauugauggaugguacgguuuuagacaccagaaugcacagggcgaagggaccgcugccgacuacaaauccacucaaucagcuaucgaccagauaacaggaaagcugaacagguugauugagaaaaccaaucagcaguucgagcucaucgauaacgaauuuaaugagguggaaaagcaaaucggcaacgucauuaauuggacgcgggacaguaucaccgagguguggagcuauaacgccgaacuguuaguugcaauggagaaucagcacacaauugaucuggccgacuccgagauggauaaacucuacgaacgagugaagcgccagcuuagagagaacgcugaagaggacgguacuggguguuucgaaauauuucauaagugcgaugacgauuguauggcgucuaucaggaauaacaccuaugaccacagcaaauaccgggaggaggcaaugcagaaccgcauucaaaucgauccagucaagcugucaaguggcuauaaagacgugaucuugugguucuccuuuggagccagcugcuucauucuacuggcuauaguaaugggccucguuuuuaucugcgugaagaaugggaacaugagauguacaauuugcaucuga

SEQ ID NO: 139018 - RNA, 1698 nt, Artificial Sequence; identical to SEQ ID NO: 135841
  derived and/or modified CDS sequence (opt3) from hemagglutinin__InfluenzaA__AHG96108

SEQ ID NO: 139019 - RNA, 1698 nt, Artificial Sequence; identical to SEQ ID NO: 135841
  derived and/or modified CDS sequence (opt3) from hemagglutinin__InfluenzaA__AHG96120

SEQ ID NO: 139020 - RNA, 1698 nt, Artificial Sequence; identical to SEQ ID NO: 135841
  derived and/or modified CDS sequence (opt3) from hemagglutinin__InfluenzaA__AHG96132

SEQ ID NO: 139021 - RNA, 1698 nt, Artificial Sequence
  derived and/or modified CDS sequence (opt3) from hemagglutinin__InfluenzaA__AHG96144
augaaggugaaacugcucguccuucugugcaccuucacagccacuuacgcugacacgaucuguauuggcuaucacgcaaacaauagcaccgauacaguugacacuguguuggagaagaacguaaccgugacacauuccgucaauuuacuggaaaacucucacaaugggaaacuaugccuccugaagggaauagcgccccuucagcuggguaacuguucaguggccggcuggaucuuggggaauccugagugcgaacuccugauuaguaaagagagcugguccuacaucguugaaaagccaaacccggagaauggaaccuguuaucccggccauuuugcugauuacgaggaacugagagagcaacucucuucggugagcucauucgaaagguuugagauuuucccuaaggagaguuccuggccaaaccacacugucacaggugugucugccagcugcucccauaauggggaaucaaguuuuuaucggaacuuacuguggcuuaccggcaaaaauggauuguaccccaaccugagcaagucuuaugcaaauaacaaagagaaggaaguucuaguacucuggggcgugcaccacccuccaaacaucgggguccagaaagcccuguaccauacggagaaugcuuacguguccguggucucaagccacuauagucgcaaguucacucccgaaauagcaaagcgaccuaaaguucgugaccaggagggaagaaucaacuacuauuggacccuucuggagccaggugauacaauuaucuuugaagccaauggcaacuugauugcuccgagguacgccuucgcgcucucucggggguuuggauccggcaucauaaauagcaacgcacccauggacaagugugaugccaaaugccagacuccucaaggugcuauuaauucgucucugccauuccagaacgugcaucccguaaccaucggggaguguccuaaguaugugcgcuccgccaaauuaagaauggucacaggacugaggaauauuccaucaauccagagucggggccucuuuggcgcaaucgcuggguucauugaaggagguuggaccggcaugguggacgggugguacggauaucaccaccagaacgagcaaggcagcgguuacgccgcggaucagaaguccacgcagaaugccauaaacgggaucacuaauaaaguuaacucugugauugaaaagaugaauacacaguuuaccgcagucggcaaggaguucaacaaacuugagcgccgaauggaaaaccugaauaagaaaguggacgauggauucaucgacauauggacuuacaacgcugaguugcuaguacugcucgaaaaugagagaacacuggauuuucaugacagcaacguuaagaaucuuuaugaaaaagugaagucacaacugaagaacaaugccaaagagauuggcaacgggugcuucgaguuuuaccacaaguguaaugacgaaugcauggagagugucaaaaacggaaccuaugauuaccccaaguauuccgaagagagcaaauugaauagggagaagaucgacggugugaagcucgaaucuaugggcgucuaccagauccuggcuauuuauucaacgguggccaguagcuuaguucugcuagugucccucggggcaaucucuuucuggaugugcucgaacggaagccugcagugucggauuugcauauga

SEQ ID NO: 139022 - RNA, 1698 nt, Artificial Sequence; identical to SEQ ID NO: 135841
  derived and/or modified CDS sequence (opt3) from hemagglutinin__InfluenzaA__AHG96156

SEQ ID NO: 139023 - RNA, 1698 nt, Artificial Sequence; identical to SEQ ID NO: 135841
  derived and/or modified CDS sequence (opt3) from hemagglutinin__InfluenzaA__AHG96168

SEQ ID NO: 139024 - RNA, 1698 nt, Artificial Sequence; identical to SEQ ID NO: 135841
  derived and/or modified CDS sequence (opt3) from hemagglutinin__InfluenzaA__AHG96180

SEQ ID NO: 139025 - RNA, 1698 nt, Artificial Sequence; identical to SEQ ID NO: 135841
  derived and/or modified CDS sequence (opt3) from hemagglutinin__InfluenzaA__AHG96192

SEQ ID NO: 139026 - RNA, 1698 nt, Artificial Sequence; identical to SEQ ID NO: 135841
  derived and/or modified CDS sequence (opt3) from hemagglutinin__InfluenzaA__AHG96204

SEQ ID NO: 139027 - RNA, 1698 nt, Artificial Sequence; identical to SEQ ID NO: 135841
  derived and/or modified CDS sequence (opt3) from hemagglutinin__InfluenzaA__AHG96216

SEQ ID NO: 139028 - RNA, 1698 nt, Artificial Sequence; identical to SEQ ID NO: 135841
  derived and/or modified CDS sequence (opt3) from hemagglutinin__InfluenzaA__AHG96228

SEQ ID NO: 139029 - RNA, 1698 nt, Artificial Sequence; identical to SEQ ID NO: 139021
  derived and/or modified CDS sequence (opt3) from hemagglutinin__InfluenzaA__AHG96240

SEQ ID NO: 139030 - RNA, 1698 nt, Artificial Sequence; identical to SEQ ID NO: 135841
  derived and/or modified CDS sequence (opt3) from hemagglutinin__InfluenzaA__AHG96252

SEQ ID NO: 139031 - RNA, 1698 nt, Artificial Sequence; identical to SEQ ID NO: 135841
  derived and/or modified CDS sequence (opt3) from hemagglutinin__InfluenzaA__AHG96264

SEQ ID NO: 139032 - RNA, 1698 nt, Artificial Sequence; identical to SEQ ID NO: 135841
  derived and/or modified CDS sequence (opt3) from hemagglutinin__InfluenzaA__AHG96276

SEQ ID NO: 139033 - RNA, 1698 nt, Artificial Sequence; identical to SEQ ID NO: 135841
  derived and/or modified CDS sequence (opt3) from hemagglutinin__InfluenzaA__AHG96288

SEQ ID NO: 139034 - RNA, 1698 nt, Artificial Sequence; identical to SEQ ID NO: 135841
  derived and/or modified CDS sequence (opt3) from hemagglutinin__InfluenzaA__AHG96300

SEQ ID NO: 139035 - RNA, 1701 nt, Artificial Sequence
  derived and/or modified CDS sequence (opt3) from hemagglutinin__InfluenzaA__AHG96312
augaaggccauccuggugguccuccuuuacaccuucgcuacagcaaacgccgacacucugugcauuggcuaucacgcgaauaacagcacggauaccguugacacaguguuggagaaaaauguaacugugacccauuccgucaacuuacuggaagauaagcacaaugggaaacuauguaagcucagaggagugguuccccugcaucuugguaaaugcaacauagcuggcuggauccuggggaauccugagugugaaucuuugucaacagccaguagcugguccuacauuguggagaccucuucgucagacaacggaacuugcuauccaggcgauuuuaucaauuacgaagaacucagggagcagcugagcagugucuccucuuucgaacgguuugagauuuucccgaagacaagcuccuggcccaaccacgacucaaauaagggugugaccgcagccuguccucaugcuggggcaaaaaguuuuuauaagaaccugaucuggcucguaaagaagggaaauagcuacccaaaauuaucucaauccuauauaaacgauaagggcaaggaaguucuggugcuuuggggcauccaccaccccucaacgacugccgaccagcagagcuuguaccagaaugcugaugccuacgucuucguggggaccagucgcuauucuaaaaaguuuaaaccugagauugcgauccgaccaaaggugcgugaccaagagggaagaaugaacuacuauuggacacuggucgaacccggugauaaaauuacuuucgaggcaaccggcaaccuaguugugccuagguacgccuuuacaauggaacggaaugcuggguccggaaucauaauuagcgacaccccaguacaugauugcaacacgacuugucagacaccggagggcgccaucaauaccucgcuccccuuccagaacauucacccuaucacuaucgguaagugcccaaaauaugugaagucuacaaagcugcgccuugcaaccgggcugagaaauguccccuccauucagucaaggggauuguuuggcgcuauagccggcuucaucgaagggggauggacggguaugguggacggcugguacggguaucaucaccaaaacgagcagggaaguggcuacgcggccgaccucaaaagcacccagaaugcaauugauaagaucacaaacaaaguuaauuccgugauagagaagaugaacacucaguuuaccgcugucgguaaagaguucaaucaccuggagaagcggauugaaaacuuaaauaagaaaguggacgauggguuccuggacaucuggacauacaacgccgagcuccuuguacuguuggaaaaugagcgcacucuagauuaucaugacucuaacguuaagaaccuguacgagaaagugcgaaaucaacucaagaacaaugcuaaagaaaucggcaacggauguuuugaguucuaucacaagugcgauaauaccuguauggaaagcgucaagaacggcacauacgacuauccuaaauacucagaggaagccaagcugaauagagagaaaauugauggggugaaacuugagaguaccaggaucuaucagauucuggcaauauacuccacugucgccagcucuuuggugcucguugugucacugggagcuaucaguuuuuggaugugcagcaacgguuccuuacagugccggauuuguaucuga

SEQ ID NO: 139036 - RNA, 1701 nt, Artificial Sequence; identical to SEQ ID NO: 138088
  derived and/or modified CDS sequence (opt3) from hemagglutinin__InfluenzaA__AHG96313

SEQ ID NO: 139037 - RNA, 1701 nt, Artificial Sequence
  derived and/or modified CDS sequence (opt3) from hemagglutinin__InfluenzaA__AHG96314
augaaggccauccuggugguccuccuuuacaccuucgcuacagcaaacgccgacacucugugcauuggcuaucacgcgaauaacagcacggauaccguugacacaguguuggagaagaauguaacugugacccauuccgucaacuuacuggaagauaagcacaaugggaaacuauguaagcucagaggaguggcuccccugcaucuugguaaaugcaacauagccggcuggauccuggggaauccugagugugaaucuuugucaacagcaaguagcugguccuacauuguugagaccucuucgucagacaacggaacuugcuauccaggcgauuuuaucaauuacgaggaacucagggagcagcugagcaguguguccucuuucgaacgguuugagauuuucccgaagacaagcuccuggcccaaccacgacucaaauaagggugucaccgccgcuuguccucaugcaggggccaaaaguuuuuauaagaaccugaucuggcucgugaaaaagggaaauagcuacccaaaauuaucucaauccuauauaaacgauaagggcaaggaaguacugguucuuuggggcauccaccaccccucaacgacugcugaccagcagagcuuguaccagaaugccgaugcguacguguucgucgggaccagucgcuauucuaaaaaguuuaaaccugagauugcaauccgaccaaaggugcgugaccaagagggaagaaugaacuacuauuggacacugguggaacccggugauaaaauuacuuucgaggccaccggcaaccuagucguuccuagguacgcuuuuacaauggaacggaaugccggguccggaaucauaauuagcgacaccccagugcaugauugcaacacgacuugucagacaccggagggcgcaaucaauaccucgcuccccuuccagaacauucacccuaucacuaucgguaagugcccaaaauauguaaagucuacaaagcugcgccuugcuaccgggcugagaaaugugcccuccauucagucaaggggauuguuuggcgccauagcgggcuucaucgaagggggauggacggguauggucgacggcugguacggguaucaucaccaaaacgagcagggaaguggcuacgccgcagaccucaaaagcacccagaaugcuauugauaagaucacaaacaaaguuaauuccgugauagagaagaugaacacucaguacaccgccguggguaaagaauuuaaucaccuggagaagcggauugaaaacuuaaauaagaaagucgacgauggguuccuggacaucuggacauauaacgcugagcuccuugugcuguuggaaaaugagcgcacucuagauuaccaugacucuaacguaaagaaccuguaugagaaaguucgaaaucaacucaagaacaaugccaaagaaaucggcaacggauguuucgaguuuuaccacaagugcgauaauaccuguauggaaagcgugaagaacggcacauaugacuacccuaaauauucagaggaagcaaagcugaauagagagaaaauugauggggucaaacuugagaguaccaggaucuaccagauucuggccauauacuccacuguggcuagcucuuugguccucgugguuucacugggagcgaucaguuucuggaugugcagcaacgguuccuuacagugccggauuuguaucuga

SEQ ID NO: 139038 - RNA, 1701 nt, Artificial Sequence; identical to SEQ ID NO: 138088
  derived and/or modified CDS sequence (opt3) from hemagglutinin__InfluenzaA__AHG96315

SEQ ID NO: 139039 - RNA, 1701 nt, Artificial Sequence; identical to SEQ ID NO: 138088
  derived and/or modified CDS sequence (opt3) from hemagglutinin__InfluenzaA__AHG96316

SEQ ID NO: 139040 - RNA, 1701 nt, Artificial Sequence; identical to SEQ ID NO: 138088
  derived and/or modified CDS sequence (opt3) from hemagglutinin__InfluenzaA__AHG96317

SEQ ID NO: 139041 - RNA, 1701 nt, Artificial Sequence; identical to SEQ ID NO: 138088
  derived and/or modified CDS sequence (opt3) from hemagglutinin__InfluenzaA__AHG96320

SEQ ID NO: 139042 - RNA, 1701 nt, Artificial Sequence; identical to SEQ ID NO: 138088
  derived and/or modified CDS sequence (opt3) from hemagglutinin__InfluenzaA__AHG96321

SEQ ID NO: 139043 - RNA, 1701 nt, Artificial Sequence; identical to SEQ ID NO: 138088
  derived and/or modified CDS sequence (opt3) from hemagglutinin__InfluenzaA__AHG96322

SEQ ID NO: 139044 - RNA, 1701 nt, Artificial Sequence; identical to SEQ ID NO: 138088
  derived and/or modified CDS sequence (opt3) from hemagglutinin__InfluenzaA__AHG96324

SEQ ID NO: 139045 - RNA, 1701 nt, Artificial Sequence; identical to SEQ ID NO: 138088
  derived and/or modified CDS sequence (opt3) from hemagglutinin__InfluenzaA__AHG96325

SEQ ID NO: 139046 - RNA, 1701 nt, Artificial Sequence
  derived and/or modified CDS sequence (opt3) from hemagglutinin__InfluenzaA__AHG96326
augaaggccauccuggugguccuccuuuacaccuucgcuacagcaaacgccgacacucugugcauuggcuaucacgcgaauaacagcacggauaccguugacacaguguuggagaagaauguaacugugacccauuccgucaacuuacuggaagauaagcacaaugggaaacuauguaagcucagaggaguggcuccccugcaucuugguaaaugcaacauagccggcuggauccuggggaauccugagugugaaucuuugucaacagcaaguagcugguccuacauuguugagaccucuaacucggacaauggaacuugcuauccaggcgauuuuaucaacuacgaagaacucagggagcagcugucaagcgugaguuccuucgaacgguuugagauuuucccgaagacaucuagcuggcccaaucacgacuccaacaagggugucaccgccgcuuguccucaugcaggggccaaaucauuuuauaagaaucugaucuggcucgugaaaaagggaaacaguuacccaaaauuaagccaaucuuauauaaaugauaagggcaaggaaguacugguucuuuggggcauccaccaccccuccacgacugcugaccagcagucauuguaccagaacgccgaugcguacguguucgucgggaccagccgcuauaguaaaaaguuuaaaccugagauugcaauccgaccaaaggugcgugaccaagagggaagaaugaacuacuauuggacacugguggaacccggugauaaaauuacuuucgaggccaccggcaaucuagucguuccuagguacgcuuuuacaauggaacggaacgccgggucuggaaucauaauuuccgacaccccagugcaugauugcaauacgacuugucagacaccggagggcgcaaucaacaccagccuccccuuccagaauauucacccuaucacuaucgguaagugcccaaaauauguaaagucgacaaagcugcgccuugcuaccgggcugagaaacgugcccucuauucaguccaggggauuguuuggcgccauagcgggcuucaucgaagggggauggacggguauggucgacggcugguacggguaucaucaccaaaaugagcagggaucaggcuacgccgcagaccucaaaaguacccagaacgcuauugauaagaucacaaauaaagugaacagcguuauagagaagaugaauacucaguuuaccgccguggguaaagaguucaaccaccuggagaagcggauugaaaauuuaaacaagaaagucgacgauggguuccuggacaucuggacauacaaugcugagcuccuugugcuguuggaaaacgagcgcacucuagauuaucaugacuccaacguaaagaaucuguacgagaaaguucgaaaccaacucaagaauaacgccaaagaaaucggcaauggauguuuugaguucuaucacaagugcgauaacaccuguauggaaucugugaagaauggcacauacgacuauccuaaauacagcgaggaagcaaagcugaacagagagaaaauugauggggucaaacuugagucaaccaggaucuaucagauucuggccauauacaguacuguggcuuccagcuugguccucgugguuucucugggagcgaucucauuuuggaugugcaguaaugguagcuuacagugccggauuuguaucuga

SEQ ID NO: 139047 - RNA, 1701 nt, Artificial Sequence; identical to SEQ ID NO: 138088
  derived and/or modified CDS sequence (opt3) from hemagglutinin__InfluenzaA__AHG96327

SEQ ID NO: 139048 - RNA, 1701 nt, Artificial Sequence
  derived and/or modified CDS sequence (opt3) from hemagglutinin__InfluenzaA__AHG96329
augaaggccauccuggugguccuccuuuacaccuucacaacugcuaacgcagacacgcugugcauuggcuaucacgccaauaacagcaccgauacaguugacacuguguuggagaaaaauguaaccgugacacauuccgucaacuuacuggaagauaagcacaaugggaaacuauguaagcucagaggaguggcgccccugcaucuugguaaaugcaacauagcuggcuggauccuggggaauccugagugugaaucuuugucaaccgccaguagcugguccuacauuguugagacuucuucgucagacaacggaacaugcuauccaggcgauuuuaucaauuacgaagaacucagggagcagcugagcaguguguccucuuucgaacgguuugagauuuucccgaagaccagcuccuggcccaaccacgacucaaauaagggugucacggcagccuguccucaugcuggggcaaaaaguuuuuauaagaaccugaucuggcucgugaaaaagggaaauagcuacccaaaauuaucucaauccuauauaaacgauaagggcaaggaaguacugguucuuuggggcauccaccaccccucaacuaccgccgaccagcagagcuuguaccagaaugcugaugccuacguguucgucgggacaagucgcuauucuaaaaaguuuaaaccugagauugcgauccgaccaaaggugcgugaccaagagggaagaaugaacuacuauuggacucugguggaacccggugauaaaauuaccuucgaggcaacaggcaaccuagucguuccuagguacgccuuuaccauggaacggaaugcuggguccggaaucauaauuagcgacacgccagugcaugauugcaacacuacaugucagaccccggagggcgccaucaauacuucgcuccccuuccagaacauucacccuaucacaaucgguaagugcccaaaauauguaaagucuaccaagcugcgccuugcaacggggcugagaaaugugcccuccauucagucaaggggauuguuuggcgcuauagccggcuucaucgaagggggauggaccgguauggucgacggcugguacggguaucaucaccaaaacgagcagggaaguggcuacgcggccgaccucaaaagcacacagaaugcaauugauaagaucacuaacaaaguuaauuccgugauagagaagaugaacacccaguuuacagcuguggguaaagaguucaaucaccuggagaagcggauugaaaacuuaaauaagaaagucgacgauggguuccuggacaucuggacuuacaacgccgagcuccuugugcuguuggaaaaugagcgcacccuagauuaucaugacucuaacguaaagaaccuguacgagaaaauccgaaaucaacucaagaacaaugcuaaagaaauuggcaacggauguuuugaguucuaucacaagugcgauaauacauguauggaaagcguuaagaacggcaccuacgaguauccuaaauacucagaagaggccaagcugaauagagagaaaaucgacggggugaaacuugaaaguacuaagauuuaucagauacuggcaaucuacuccacggucgccagcucuuuggugcucgucgugucacugggagcuauuaguuuuuggaugugcagcaacgguuccuuacagugcaggaucuguaucuga

SEQ ID NO: 139049 - RNA, 1701 nt, Artificial Sequence
  derived and/or modified CDS sequence (opt3) from hemagglutinin__InfluenzaA__AHG96330
augaaggccauccuggugguccuccuuuacaccuucgcuacagcaacugccgacacgcugugcauuggcuaucacgcgaacaauagcaccgauacaguugacacuguguuggagaagaacguaaccgugacacauuccgucaauuuacuggaagauaagcacaacgggaaacuauguaagcucagaggaguggcuccccugcaucuugguaaaugcaauauagccggcuggauccuggggaacccugagugugaaucuuugucaaccgcaaguagcugguccuacauuguugagacuucuucgucagacaauggaacaugcuauccaggcgauuuuaucaacuacgaagaacucagggagcagcugagcaguguguccucuuucgaacgguuugagauuuucccgaagaccagcuccuggcccaaucacgacucaaacaagggugucacggccgcuuguccucaugcaggggccaaaaguuuuuauaagaaucugaucuggcucgugaaaaagggaaacagcuacccaaaauuaucucaauccuauauaaaugauaagggcaaggaaguacugguucuuuggggcauccaccaccccucaacuaccgcugaccagcagagcuuguaccagaacgccgaugcguacguguucgucgggacaagucgcuauucuaaaaaguuuaaaccugagauugcaauccgaccaaaggugcgugaccaagagggaagaaugaauuacuauuggacucugguggaacccggugauaaaauuaccuucgaggccacaggcaaccuagucguuccuagguacgcuuuuaccauggaacggaacgccggguccggaaucauaauuagcgacacgccagugcaugauugcaauacuacaugucagaccccggagggcgcaaucaacacuucgcuccccuuccagaauauucacccuaucacaaucgguaagugcccaaaauauguaaagucuaccaagcugucccuugcuacggggcugcgcaacgugcccucaauucagaguagaggauuguuuggcgccauagcgggcuucaucgaagggggauggaccgguauggucgacggcugguacggguaucaucaccaaaaugagcagggaagcggcuacgccgcagaccucaaauccacacagaacgcuauugauaagaucacuaauaaagugaacucuguuauagagaagaugaauacccaguuuacagccguggguaaagaguucaaccaccuggagaagaggauugaaaauuuaaacaagaaagucgacgauggguuccuggacaucuggacuuacaaugcugagcuccuugugcuguuggaaaacgagcggacccuagauuaucaugacagcaauguaaagaaccuguacgagaaaauccgcaaccaacucaagaauaacgccaaagaaauuggcaauggauguuuugaguucuaucacaagugcgauaacacauguauggaaucaguuaagaauggcaccuacgacuauccuaaauacagugaggaagcaaagcugaaccgagagaaaaucgauggggugaaacuugaguccacuagaauuuaucagauacuggccaucuacagcacggucgcuucuucauuggugcucgucgugagucugggagcgauuagcuuuuggaugugcuccaaugguucuuuacagugcaggaucuguaucuga

SEQ ID NO: 139050 - RNA, 1701 nt, Artificial Sequence; identical to SEQ ID NO: 138088
  derived and/or modified CDS sequence (opt3) from hemagglutinin__InfluenzaA__AHG96332

SEQ ID NO: 139051 - RNA, 1701 nt, Artificial Sequence
  derived and/or modified CDS sequence (opt3) from hemagglutinin__InfluenzaA__AHG96334
augaaggccauccuggugguccuccuuuacacccuggcuacagcaaacgccgacacuuugugcauuggcuaucacgcgaauaacagcacggauaccguugacacaguguuagagaaaaauguaacugugacccauuccgucaaccugcuagaagauaagcacaaugggaaacucuguaagcugagaggaguggcuccccuucaucuggguaaaugcaacauagccggcuggaucuuggggaauccugagugugaaucucucucaacagcaaguagcugguccuacauuguugagaccucuucgucagacaacggaacuugcuauccaggcgauuucaucaauuacgaggaacugagggagcagcugagcaguguguccucuuuugaacgguucgagauuuuuccgaagacaagcuccuggcccaaccacgacucaaauaagggugucaccgccgcuuguccucaugcaggggccaaaaguuucuauaagaaccucaucugguuagugaaaaagggaaauagcuacccaaaacugucucaauccuauauaaacgauaagggcaaggaaguacuuguuuuguggggcauccaccaccccucaacgacugcugaccagcagagccuguaccagaaugccgaugcguacguguuugucgggaccagucgcuauucuaaaaaguucaaaccugagauugcaauccgaccaaaggugcgugaccaagagggaagaaugaacuacuauuggacacuuguggaacccggugauaaaauuacuuuugaggccaccggcaaccucgucguuccuagguacgcuuucacaauggaacggaaugccggguccggaaucauaauuagcgacaccccagugcaugauugcaacacgacuugucagacaccggagggcgcaaucaauaccucgcugcccuuucagaacauucacccuaucacuaucgguaagugcccaaaauauguaaagucuacaaagcuacgccuggcuaccggguugagaaaugugcccuccauucagucaaggggacucuucggcgccauagcgggcuuuaucgaagggggauggacggguauggucgacggcugguacggguaucaucaccaaaacgagcagggaaguggcuacgccgcagaccugaaaagcacccagaaugcuauugauaagaucacaaacaaaguuaauuccgugauagagaagaugaacacucaguucaccgccguggguaaagaauuuaaucacuuagagaagcggauugaaaaccugaauaagaaagucgacgauggguuccucgacaucuggacauacaacgcugagcuucugguguugcuagaaaaugagcgcacucuggauuaucaugacucuaacguaaagaaccucuacgagaaaguucgaaaucaacugaagaacaaugccaaagaaaucggcaacggauguuucgaguuuuaucacaagugcgauaauaccuguauggaaagcgugaagaacggcacauacgacuauccuaaauacucagaggaagcaaaacuuaauagagagaagauugauggggucaagcuggagaguaccaggaucuaucagauuuuggccauauacuccacuguggcuagcucucucguccuggugguuucauuaggagcgaucaguuucuggaugugcagcaacgguucccugcagugccggauuuguaucuga

SEQ ID NO: 139052 - RNA, 1701 nt, Artificial Sequence
  derived and/or modified CDS sequence (opt3) from hemagglutinin__InfluenzaA__AHG96335
augaaggccauccuggugguccuccuuuacaccuucgagacagcuaacgcagacacucugugcauuggcuaucacgccaauaacagcacggauaccguugacacaguguuggaaaagaauguaacugugacccauuccgucaacuuacuggaggauaaacacaaugggaaacuauguaagcucaaaggaguggcgccccugcaucuugguaagugcaacauagcuggcuggauccuggggaauccugaaugugagucuuugucaacagccaguagcugguccuacauuguugaaaccucuucgucagacaacggaacuugcuauccaggcgauuuuaucaauuacgaggagcucagagaacagcugagcaguguguccucuuucgagagguuugaaauuuucccgaagacaagcuccuggcccaaccacgacucaaauaaaggugucaccgcagccuguccucaugcuggggcaaagaguuuuuauaaaaaccugaucuggcucgugaagaaaggaaauagcuacccaaaguuaucucaauccuauauaaacgauaagggcaaagagguacugguucuuuggggcauccaccaccccucaacgacugccgaccagcagagcuuguaccagaaugcugaugccuacguguucgucgggaccagucgguauucuaagaaauuuaagccugagauugcgauccgcccaaaagugcgagaccaagaaggacguaugaacuacuauuggacacugguggagcccggugauaagauuacuuucgaagcaaccggcaaccuagucguuccuagauacgccuuuacaauggagaggaaugcuggguccggaaucauaauuagcgacaccccagugcaugauugcaacacgacuugucagacaccggaaggcgccaucaauaccucgcuccccuuccagaacauucacccuaucacuaucgguaaaugcccaaaguauguaaagucuacaaaacugcggcuugcaaccgggcugcgcaaugugcccuccauucagucaagaggauuguuuggcgcuauagccggcuucaucgaagggggauggacggguauggucgacggcugguacggguaucaucaccaaaacgagcagggaaguggcuacgcggccgaccucaagagcacccagaaugcaauugauaaaaucacaaacaagguaaauuccguuauagagaaaaugaacacucaguuuaccgcuguggguaaggaguucaaucaccuggaaaagaggauugagaacuuaaauaaaaaggucgacgauggguuccuggacaucuggacauacaacgccgaacuccuugugcuguuggagaaugagcggacucuagauuaucaugacucuaacgugaaaaaccuguacgaaaagguucgcaaucaacucaaaaacaaugcuaaggagaucggcaacggauguuuugaguucuaucacaagugcgauaauaccuguauggaaagcgugaaaaacggcacauacgacuauccuaaguacucagaagaggccaaacugaaucgagagaagauugauggggucaaacuugaaaguaccagaaucuaucagauucuggcaauauacuccacuguggccagcucuuugguccucgugguuucacugggagcuaucaguuuuuggaugugcagcaacgguuccuuacagugcaggauuuguaucuga

SEQ ID NO: 139053 - RNA, 1701 nt, Artificial Sequence
  derived and/or modified CDS sequence (opt3) from hemagglutinin__InfluenzaA__AHG96336
augaaggccauccuggugguccuccuuuacaccuucgcuacagcaaacgccgacacucugugcauuggcuaucacgcgaauaacagcacggauaccguugacacaguguuggagaagaauguaacugugacccauuccgucaacuuacuggaagauaagcacaaugggaaacuauguaagcucagaggaguggcuccccugcaucuugguaaaugcaacauagccggcuggauccuggggaauccugagugugaaucuuugucaacagcaaguagcugguccuacauuguugagaccucuucgucagacaacggaacuugcuauccaggcgauuuuaucaauuacgaagaacucagggagcagcugagcaguguguccucuuucgaacgguuugagauuuucccgaagacaagcuccuggcccaaccacgacucaaauaagggugucaccgccgcuuguccucaugcaggggccaaaaguuuuuauaagaaccugaucuggcucgugaaaaagggaaauagcuacccaaaauuaucucaauccuauauaaacgauaagggcaaggaaguacugguucuuuggggcauccaccaccccucaacgacugcugaccagcagagcuuguaccagaaugccgaugcguacguguucgucgggaccagucgcuauucuaaaaaguuuaaaccugagauugcaauccgaccaaaggugcgugaccaagagggaagaaugaacuacuauuggacacugguggaacccggugauaaaauuacuuucgaggccaccggcaaccuagucguuccuagguacgcuuuuacaauggaacggaaugccggguccggaaucauaauuagcgacaccccagugcgcgauugcaacacgacuugucagacaccggagggcgcaaucaauaccucgcuccccuuccagaacauucauccuaucacuaucgguaagugcccaaaauauguaaagucuacaaagcugagacuugcuaccgggcugaggaaugugcccuccauucagucacggggauuguuuggcgccauagcgggcuucaucgaagggggauggacggguauggucgacggcugguacggguaucaccaucaaaacgagcagggaaguggcuacgccgcagaccucaaaagcacccagaaugcuauugauaagaucacaaacaaaguuaauuccgugauagagaagaugaacacucaguuuaccgccguggguaaagaguucaaucaccuggagaagcgcauugaaaacuuaaauaagaaagucgacgauggguuccuggacaucuggacauacaacgcugagcuccuugugcuguuggaaaaugagcgaacucuagauuaucacgacucuaacguaaagaaccuguacgagaaaguuagaaaucaacucaagaacaaugccaaagaaaucggcaacggauguuuugaguucuaucauaagugcgauaauaccuguauggaaagcgugaagaacggcacauacgacuauccuaaauacucagaggaagcaaagcugaauagggagaaaauugauggggucaaacuugagaguacccggaucuaucagauucuggccauauacuccacuguggcuagcucuuugguccucgugguuucacugggagcgaucaguuuuuggaugugcagcaacgguuccuuacagugccguauuuguaucuga

SEQ ID NO: 139054 - RNA, 1701 nt, Artificial Sequence
  derived and/or modified CDS sequence (opt3) from hemagglutinin__InfluenzaA__AHG96338
augaaggccauccuggugguccuccuuuacaccuucgcuacagcaaacgccgacacucugugcauuggcuaucacgcgaauaacagcacggauaccguugacacaguguuggagaaaaauguaacugugacccauuccgucaacuuacuggaagauaagcacaaugggaaacuauguaagcucagaggaguggcuccccugcaucuugguaaaugcaacauagccggcuggauccuggggaauccugagugugaaucuuugucaacagcaaguagcugguccuacauuguugagaccucuucgucagacaacggaacuugcuauccaggcgauuuuaucaauuacgaagaacucagggagcagcugagcaguguguccucuuucgaacgguuugagauuuucccgaagacaagcuccuggcccaaccacgacucaaauaagggugucaccgccgcuuguagucaugcaggggccaagagcuuuuauaagaaccugaucuggcucgugaaaaagggaaauucuuacccuaaauuaucccaaucauauauaaacgauaagggcaaggaaguacugguucuuuggggcauccaccacccaagcacgacugcugaccagcagaguuuguaccagaaugccgaugcguacguguucgucgggaccucucgcuauuccaaaaaguuuaaacccgagauugcaauccgaccuaaggugcgugaccaagagggaagaaugaacuacuauuggacacugguggaaccaggugauaaaauuacuuucgaggccaccggcaaccuagucguucccagguacgcuuuuacaauggaacggaaugccgggagcggaaucauaauuucggacaccccugugcaugauugcaacacgacuugucagacaccagagggcgcaaucaauaccucucucccguuccagaacauucaccccaucacuaucgguaagugcccuaaauauguaaaguccacaaagcugcgccuugcuaccgggcugagaaaugugccaucaauucagaguaggggauuguuuggcgccauagcgggcuucaucgaagggggauggacggguauggucgacggcugguacggguaucaucaccaaaacgagcagggaagcggcuacgccgcagaccucaaauccacccagaaugcuauugauaagaucacaaacaaaguuaauucugugauagagaagaugaacacucaguuuaccgccguggguaaagaguucaaucaccuggagaagcggauugaaaacuuaaauaagaaagucgacgauggguuccuggacaucuggacauacaacgcugagcuccuugugcuguuggaaaaugagcgcacucuagauuaucaugacagcaacguaaagaaccuguacgagaaaguucgaaaucaacucaagaacaaugccaaagaaaucggcaacggauguuuugaguucuaucacaagugcgauaauaccuguauggaaucagugaagaacggcacauacgacuaucccaaauacagugaggaagcaaagcugaauagagagaaaauugauggggucaaacuugaguccaccaggaucuaucagauucuggccauauacagcacuguggcuucuucauugguccucgugguuagucugggagcgaucagcuuuuggaugugcuccaacgguucuuuacagugccggauuuguaucuga

SEQ ID NO: 139055 - RNA, 1701 nt, Artificial Sequence
  derived and/or modified CDS sequence (opt3) from hemagglutinin__InfluenzaA__AHG96339
augaaggccauccuggugguccuccuuuacaccuucgcuacagcaaacgccgacacucugugcauuggcuaucacgcgaauaacagcacggauaccguugacacaguguuggagaagaauguaacugugacccauuccgucaacuuacuggaagauaagcacaaugggaaacuauguaagcucagaggaguggcuccccugcaucuugguaaaugcaacauagccggcuggauccuggggaauccugagugugaaucuuugucaacagcaaguagcugguccuacauuguugagaccucuucgucagacaacggaacuugcuauccaggcgauuuuaucaauuacgaagaacucagggagcagcugagcaguguguccucuuucgaacgguuugagauuuucccgaagacaagcuccuggcccaaccacgacucaaauaagggugucaccgccgcuuguccucaugcaggggccaaaaguuuuuauaagaaccugaucuggcucgugaaaaagggaaauagcuacccaaaauuaucucaauccuauauaaacgauaagggcaaggaaauccugguacuuuggggcauucaccaccccucaacgacugcugaccagcagagcuuguaccagaaugccgaugcguacguuuucguggggaccagucgcuauucuaaaaaguuuaaaccugagaucgcaauucgaccaaagguccgugaccaagagggaagaaugaacuacuauuggacacugguggaacccggugauaaaaucacuuucgaggccaccggcaaccuaguggucccuagguacgcuuuuacaauggaacggaaugccggguccggaauaauuaucagcgacaccccaguucaugauugcaacacgacuugucagacaccggagggcgcaauuaauaccucgcuccccuuccagaacauccacccuaucacuauugguaagugcccaaaauaugugaagucuacaaagcugcgccuugcuaccgggcugagaaauguacccuccauacagucaaggggauuguuuggcgccaucgcgggcuucauugaagggggauggacggguaugguggacggcugguacggguaucaucaccaaaacgagcagggaaguggcuacgccgcagaccucaaaagcacccagaaugcuaucgauaagauaacaaacaaagucaauuccgugauugagaagaugaacacucaguuuaccgccguugguaaagaguucaaucaccuggagaagcggaucgaaaacuuaaauaagaaaguggacgauggguuccuggacaucuggacauacaacgcugagcuccuuguccuguuggaaaaugagcgcacucuagauuaucaugacucuaacgugaagaaccuguacgagaaaguacgaaaucaacucaagaacaaugccaaagaaauuggcaacggauguuuugaguucuaucacaagugcgauaauaccuguauggaaagcguuaagaacggcacauacgacuauccuaaauacucagaggaagcaaagcugaauagagagaaaaucgauggggugaaacuugagaguaccaggauuuaucagauacuggccaucuacuccacugucgcuagcucuuuggugcucgucgugucacugggagcgauuaguuuuuggaugugcagcaacgguuccuuacagugccggaucuguaucuga

SEQ ID NO: 139056 - RNA, 1701 nt, Artificial Sequence; identical to SEQ ID NO: 138088
  derived and/or modified CDS sequence (opt3) from hemagglutinin__InfluenzaA__AHG96340

SEQ ID NO: 139057 - RNA, 1701 nt, Artificial Sequence
  derived and/or modified CDS sequence (opt3) from hemagglutinin__InfluenzaA__AHG96341
augaaggccauccuggugguccuccuuuacaccuucgcuacagcaaacgccgacacucugugcauuggcuaucacgcgaauaacagcacggauaccguugacacaguguuggagaaaaauguaacugugacccauuccgucaacuuacuggaagauaagcacaaugggaaacuauguaagcucagaggaguggcuccccugcaucuugguaaaugcaacauagccggcuggauccuggggaauccugagugugaaucuuugucaacagcaaguagcugguccuacauuguugagaccucuucgucagacaacggaacuugcuauccaggcgauuuuaucaauuacgaagaacucagggagcagcugagcaguguguccucuuucgaacgguuugagauuuucccgaagacaagcuccuggcccaaccacgacucaaauaagggugucaccgccgcuuguccucaugcaggggccaaaaguuuuuauaagaaccugaucuggcucgugaaaaagggaaauagcuacccaaaauuaucucaauccuauauaaacgauaagggcaaggaaguacugguucuuuggggcauccaccaccccucaacgacugcugaccagcagagcuuguaccagaaugccgaugcguacguguucgucgggaccaguaaauauucuaagaaauuuaagccugagauugcaauccgcccaaaagugcgagaccaagagggacguaugaacuacuauuggacacugguggaacccggugauaagauuacuuucgaggccaccggcaaccuagucguuccuagauacgcuuuuacaauggaaaggaaugccggguccggaaucauaauuagcgacaccccagugcaugauugcaacacgacuugucagacaccggagggcgcaaucaauaccucgcuccccuuccagaacauucacccuaucacuaucgguaaaugcccaaaguauguaaagucuacaaaacugcggcuugcuaccgggcugcgcaauauucccuccauacagucaagaggauuguuuggcgccaucgcgggcuucauugaagggggauggacggguaugguggacggcugguacggguaucaucaccaaaacgagcagggaaguggcuacgccgcagaccucaagagcacccagaaugcuaucgauaaaauaacaaacaaggucaauuccgugauugagaaaaugaacacucaguuuaccgccguugguaaggaguucaaucaccuggagaagaggaucgaaaacuuaaauaaaaagguggacgauggguuccuggacaucuggacauacaacgcugagcuccuuguccuguuggaaaaugagcggacucuagauuaucaugacucuaacgugaaaaaccuguacgagaagguacgcaaucaacucaaaaacaaugccaaggaaauuggcaacggauguuuugaguucuaucacaagugcgauaauaccuguauggaaagcguuaaaaacggcacauacgacuauccuaaguacucagaggaagcaaaacugaaucgagagaagaucgauggggugaaacuugagaguaccagaauuuaucagauacuggccaucuacuccacugucgcuagcucuuuggugcucgucgugucacugggagcgauuaguuuuuggaugugcagcaacgguuccuuacagugcaggaucuguaucuga

SEQ ID NO: 139058 - RNA, 1701 nt, Artificial Sequence
  derived and/or modified CDS sequence (opt3) from hemagglutinin__InfluenzaA__AHG96342
augaaggccauccuggugguccuccuuuacaccuucgcuacagcaaacgccgacacucugugcauuggcuaucacgcgaauaacagcacggauaccguugacacaguguuggagaagaauguaacugugacccauuccgucaacuuacuggaagauaagcacaaugggaaacuauguaagcucagaggaguggcuccccugcaucuugguaaaugcaacauagccggcuggauccuggggaauccugagugugaaucuuugucaacagcaaguagcugguccuacauuguugagaccucuucgucagacaacggaacuugcuauccaggcgauuuuaucaauuacgaagaacucagggagcagcugagcaguguguccucuuucgaacgguuugagauuuucccgaagacaagcuccuggcccaaccacgacucaaauaagggugucaccgccgcuuguccucaugcaggggccaaaaguuuuuauaagaaccugaucuggcucgugaaaaagggaaauagcuacccaaaauuaucucaauccuauauaaacgauaagggcaaggaaguacugguucuuuggggcauccaccaccccucaacgacugcugaccagcagagcuuguaccagaaugccgaugcguacguguucgucgggaccagucgcuauucuaaaaaguuuaaaccugagauugcaauccgaccaaaggugcgugaccaagagggaagaaugaacuacuauuggacacugguggaacccggugauaaaauuacuuucgaggccaccggcaaccuagucguuccuagguacgcuuuuacaauggaacggaaugccggguccggaaucauaauuagcgacaccccagugcaugauugcaacacgacuugucagacaccggagggcgcaaucaauaccucgcuccccuuccagaacauucacccuaucacuaucgguaagugcccaaaauauguaaagucuacaaagcugcgccuugcuaccgggcugagaaauauucccuccauacagucaaggggauuguuuggcgccaucgcgggcuucauugaagggggauggacggguaugguggacggcugguacggguaucaucaccaaaacgagcagggaaguggcuacgccgcagaccucaaaagcacccagaaugcuaucgauaagauaacaaacaaagucaauuccgugauugagaagaugaacacucaguuuaccgccguugguaaagaguucaaucaccuggagaagcggaucgaaaacuuaaauaagaaaguggacgauggguuccuggacaucuggacauacaacgcugagcuccuuguccuguuggaaaaugagcgcacucuagauuaucaugacucuaacgugaagaaccuguacgagaaaguacgaaaucaacucaagaacaaugccaaagaaauuggcaacggauguuuugaguucuaucacaagugcgauaauauguguauggaaagcguuaagaacggcaccuacgacuauccuaaauacucagaggaagcaaagcugaauagagagaaaaucgauggggugaaacuugagaguacaaggauuuaucagauacuggccaucuacuccaccgucgcuagcucuuuggugcucgucgugucacugggagcgauuaguuuuuggaugugcagcaacgguuccuuacagugccggaucuguaucuga

SEQ ID NO: 139059 - RNA, 1701 nt, Artificial Sequence
  derived and/or modified CDS sequence (opt3) from hemagglutinin__InfluenzaA__AHG96343
augaaggccauccuggugguccuccuuuacaccuucgcuacagcaacugccgacacgcugugcauuggcuaucacgcgaacaauagcaccgauacaguugacacuguguuggagaagaacguaaccgugacacauuccgucaauuuacuggaagauaagcacaacgggaaacuauguaagcucagaggaguggcuccccugcaucuugguaaaugcaauauagccggcuggauccuggggaacccugagugugaaucuuugucaaccgcaaguagcugguccuacauuguugagacuucuaauucggacaacggaacaugcuauccaggcgauuuuaucaauuacgaagaacucagggagcagcugucaagcgugaguuccuucgaacgguuugagauuuucccgaagaccucuagcuggcccaaccacgacuccaauaagggugucacggccgcuuguccucaugcaggggccaaaucauuuuauaagaaccugaucuggcucgugaaaaagggaaauaguuacccaaaauuaagccaaucuuauauaaacgauaagggcaaggaaguacugguucuuuggggcauccaccaccccuccacuaccgcugaccagcagucauuguaccagaaugccgaugcguacguguucgucgggacaagccgcuauaguaaaaaguuuaaaccugagauugcaauccgaccaaaggugcgugaccaagagggaagaaugaacuacuauuggacucugguggaacccggugauaaaauuaccuucgaggccacaggcaaccuagucguuccuagguacgcuuuuaccauggaacggaaugccgggucuggaaucauaauuuccgacacgccagugcaugauugcaacacuacaugucagaccccggagggcgcaaucaauacuagccuccccuuccagaacauucacccuaucacaaucgguaagugcccaaaauauguaaagucgaccaagcugcgccuugcuacggggcugagaaaugugcccucuauucaguccaggggauuguuuggcgccauagcgggcuucaucgaagggggauggaccgguauggucgacggcugguacggguaucaucaccaaaacgagcagggaucaggcuacgccgcagaccucaaaaguacacagaaugcuauugauaagaucacuaacaaagugaauagcguuauagagaagaugaacacccaguuuacagccguggguaaagaguucaaucaccuggagaagcggauugaaaacuuaaauaagaaagucgacgauggguuccuggacaucuggacuuacaacgcugagcuccuugugcuguuggaaaaugagcgcacccuagauuaucaugacuccaacguaaagaaccuguacgagaaaguucgaaaucaacucaagaacaaugccaaagaaaucggcaacggauguuuugaguucuaucacaagugcgauaauacauguauggaaucugugaagaacggcaccuacgacuauccuaaauacagcgaggaagcaaagcugaauagagagaaaauugauggggucaaacuugagucaacuaggaucuaucagauucuggccauauacaguacgguggcuuccagcuugguccucgugguuucucugggagcgaucucauuuuggaugugcaguaacgguagcuuacagugccggauuuguaucuga

SEQ ID NO: 139060 - RNA, 1701 nt, Artificial Sequence; identical to SEQ ID NO: 138088
  derived and/or modified CDS sequence (opt3) from hemagglutinin__InfluenzaA__AHG96344

SEQ ID NO: 139061 - RNA, 1701 nt, Artificial Sequence; identical to SEQ ID NO: 139051
  derived and/or modified CDS sequence (opt3) from hemagglutinin__InfluenzaA__AHG96345

SEQ ID NO: 139062 - RNA, 1701 nt, Artificial Sequence; identical to SEQ ID NO: 138088
  derived and/or modified CDS sequence (opt3) from hemagglutinin__InfluenzaA__AHG96346

SEQ ID NO: 139063 - RNA, 1701 nt, Artificial Sequence; identical to SEQ ID NO: 138088
  derived and/or modified CDS sequence (opt3) from hemagglutinin__InfluenzaA__AHG96347

SEQ ID NO: 139064 - RNA, 1701 nt, Artificial Sequence; identical to SEQ ID NO: 138088
  derived and/or modified CDS sequence (opt3) from hemagglutinin__InfluenzaA__AHG96348

SEQ ID NO: 139065 - RNA, 1701 nt, Artificial Sequence; identical to SEQ ID NO: 138088
  derived and/or modified CDS sequence (opt3) from hemagglutinin__InfluenzaA__AHG96349

SEQ ID NO: 139066 - RNA, 1701 nt, Artificial Sequence; identical to SEQ ID NO: 138088
  derived and/or modified CDS sequence (opt3) from hemagglutinin__InfluenzaA__AHG96350

SEQ ID NO: 139067 - RNA, 1701 nt, Artificial Sequence; identical to SEQ ID NO: 138088
  derived and/or modified CDS sequence (opt3) from hemagglutinin__InfluenzaA__AHG96351

SEQ ID NO: 139068 - RNA, 1701 nt, Artificial Sequence; identical to SEQ ID NO: 138088
  derived and/or modified CDS sequence (opt3) from hemagglutinin__InfluenzaA__AHG96352

SEQ ID NO: 139069 - RNA, 1701 nt, Artificial Sequence
  derived and/or modified CDS sequence (opt3) from hemagglutinin__InfluenzaA__AHG96353
augaaggccauccuggugguccuccuuuacaccuucgcuacaacuaacgcagacacgcugugcauuggcuaucacgccaauaacagcaccgauacaguugacacuguguuggagaagaauguaaccgugacacauuccgucaacuuacuggaagauaagcacaaugggaaacuauguaagcucagaggaguggcgccccugcaucuugguaaaugcaacauagcuggcuggauccuggggaauccugagugugaaucuuugucaaccgccaguagcugguccuacauuguugagacuucuucgucagacaacggaacaugcuauccaggcgauuuuaucaauuacgaagaacucagggagcagcugagcaguguguccucuuucgaacgguuugagauuuucccgaagaccagcuccuggcccaaccacgacucaaauaagggugucacggcagccuguccucaugcuggggcaaaaaguuuuuauaagaaccugaucuggcucgugaaaaagggaaauagcuacccaaaauuaucucaauccuauauaaacgauaagggcaaggaaguacugguucuuuggggcauccaccaccccucaacuaccgccgaccagcagagcuuguaccagaaugcugaugccuacguguucgucgggacaagucgcuauucuaaaaaguuuaaaccugagauugcgauccgaccaaaggugcgugaccaagagggaagaaugaacuacuauuggacucugguggaacccggugauaaaauuaccuucgaggcaacaggcaaccuagucguuccuagguacgccuuuaccauggaacggaaugcuggguccggaaucauaauuagcgacacgccagugcaugauugcaacacuacaugucagaccccggagggcgccaucaauacuucgcuccccuuccagaacauucacccuaucacaaucgguaagugcccaaaauauguaaagucuaccaagcugcgccuugcaacggggcugagaaaugugcccuccauucagucaaggggauuguuuggcgcuauagccggcuucaucgaagggggauggaccgguauggucgacggcugguacggguaucaucaccaaaacgagcagggaaguggcuacgcggccgaccucaaaagcacacagaaugcaauugauaagaucacuaacaaaguuaauuccgugauagagaagaugaacacccaguuuacagcuguggguaaagaguucaaucaccuggagaagcggauugaaaacuuaaauaagaaagucgacgauggguuccuggacaucuggacuuacaacgccgagcuccuugugcuguuggaaaaugagcgcacccuagauuaucaugacucuaacguaaagaaccuguacgagaaaguucgaaaucaacucaagaacaaugcuaaagaaaucggcaacggauguuuugaguucuaucacaagugcgauaauacauguauggaaagcgugaagaacggcaccuacgacuauccuaaauacucagaggaagccaagcugaauagagagaaaauugauggggucaaacuugagaguacuaggaucuaucagauucuggcaauauacuccacgguggccagcucuuugguccucgugguuucacugggagcuaucaguuuuuggaugugcagcaacgguuccuuacagugccggauuuguaucuga

SEQ ID NO: 139070 - RNA, 1701 nt, Artificial Sequence; identical to SEQ ID NO: 138088
  derived and/or modified CDS sequence (opt3) from hemagglutinin__InfluenzaA__AHG96354

SEQ ID NO: 139071 - RNA, 1701 nt, Artificial Sequence
  derived and/or modified CDS sequence (opt3) from hemagglutinin__InfluenzaA__AHG96355
augaaggccauccuggugguccuccuuuacacccuggcuacagcaaacgccgacacuuugugcauuggcuaucacgcgaauaacagcacggauaccguugacacaguguuagagaaaaauguaacugugacccauuccgucaaccugcuagaagauaagcacaaugggaaacucuguaagcugagaggaguggcuccccuucaucuggguaaaugcaacauagccggcuggaucuuggggaauccugagugugaaucucucucaacagcaaguagcugguccuacauuguugagaccucuucgucagacaacggaacuugcuauccaggcgauuucaucaauuacgaggaacugagggagcagcugagcaguguguccucuuuugaacgguucgagauuuuuccgaagacaagcuccuggcccaaccacgacucaaauaagggugucaccgccgcuuguccucaugcaggggccaaaaguuucuauaagaaccucaucugguuagugaaaaagggaaauagcuacccaaaacugucucaauccuauauaaacgauaagggcaaggaaguacuuguuuuguggggcauccaccaccccucaacgacugcugaccagcagagccuguaccagaaugccgaugcguacguguuugucgggaccagucgcuauucuaaaaaguucaaaccugagauugcaauccgaccaaaggugcgugaccaagagggaagaaugaacuacuauuggacacuuguggaacccggugauaaaauuacuuuugaggccaccggcaaccucgucguuccuagguacgcuuucacaauggaacggaaugccggguccggaaucauaauuagcgacaccccagugcaugauugcaacacgacuugucagacaccggagggcgcaaucaauaccucgcugcccuuucagaacauucacccuaucacuaucgguaagugcccaaaauauguaaagucuacaaagcuacgccuggcuaccggguugagaaaugugcccuccauucagucaaggggacucuucggcgccauagcgggcuuuaucgaagggggauggacggguauggucgacggcugguacggguaucaucaccaaaacgagcagggaaguggcuacgccgcagaccugaaaagcacccagaaugcuauugauaagaucacaaacaaaguuaauuccgugauagagaagaugaacacucaguucaccgccguggguaaagaauuuaaucaauuagagaagcggauugaaaaccugaauaagaaagucgacgauggguuccucgacaucuggacauacaacgcugagcuucugguguugcuagaaaaugagcgcacucuggauuaucacgacucuaacguaaagaaccucuacgagaaaguucgaaaucagcugaagaacaaugccaaagaaaucggcaacggauguuucgaguuuuaucauaagugcgauaauaccuguauggaaagcgugaagaacggcacauacgacuauccuaaauacucagaggaagcaaaacuuaauagagagaagauugauggggucaagcuggagaguaccaggaucuaucagauuuuggccauauacuccacuguggcuagcucucucguccuggugguuucauuaggagcgaucaguuucuggaugugcagcaacgguucccugcaaugccggauuuguaucuga

SEQ ID NO: 139072 - RNA, 1701 nt, Artificial Sequence; identical to SEQ ID NO: 137906
  derived and/or modified CDS sequence (opt3) from hemagglutinin__InfluenzaA__AHG96356

SEQ ID NO: 139073 - RNA, 1701 nt, Artificial Sequence
  derived and/or modified CDS sequence (opt3) from hemagglutinin__InfluenzaA__AHG96359
augaagaccaucauugcccugagcuacauacucugccuuguguucgcucagaaacugcccggcaacgacaauuccacagcaacuuuguguuuagggcaccaugccgucccuaacggaacgaucguuaagaccauuacaaaugaucaaaucgaggugacuaacgcgaccgaacugguacagucuucaaguacagguggcauuugcgacagcccacaccagauccuagauggggagaauuguacccucauagacgcucugcuuggagauccgcagugcgacggcuuucaaaacaaaaagugggaucuguucguggaaagauccaaagccuauucuaauuguuaccccuaugacgucccugauuacgcaucguugaggucacucguggccagcagugguacucuggaguuuaacgacgaauccuucaauuggacagggguuacccagaacggaacgucuagcuccugcaagcggcgcucaaauaacagcuuuuucagccgacugaauuggcucacucauuuaaaguuuaaauauccagcucugaacgugaccaugcccaauaacgagaaguucgauaaacuuuacaucuggggcguccaccauccugugacagacaacgaucagauuuuucuuuaugcacaggccucuggccguaucacuguauccaccaagagaucacaacagacaguuauuccaaauaucgggagcaggccccggauacgcaacauuccuaguagaaucucuauuuacuggaccaucgugaaaccaggagacauccugcuaauuaauuccacggguaaccucauagcuccgaggggcuacuucaagauccggagcgggaagucgucuauuaugcgcuccgacgcccccaucggaaaauguaauucagagugcauaacuccuaacggcaguauuccaaaugauaagcccuuucagaacgucaaucgaaucacauauggugcguguccuagauacgugaaacagaacacccugaaguuggcaacugggaugaggaaugugccagaaaaacaaacacggggaaucuucggcgccauugcuggcuuuaucgagaacgggugggaaggaauggucgacgguugguauggcuuccgucaccagaauagcgaggggauuggacaggccgcagaucugaaguccacccaagcugccauaaaccagaucaauggcaaauugaaccgccucauugguaagacgaacgagaaguuccaccagaucgaaaaagaguuuucugaaguugaggggagaauccaggaccuggaaaaguacguggaggauaccaaaauugacuuauggagcuauaaugcggagcugcucguagcccuugaaaaccaacauacaauagaucugacugacucagagaugaauaaguuguucgaaaggaccaaaaagcagcuacgggagaacgcagaagauaugggcaauggaugcuuuaagaucuaccacaaaugugacaacgcuugcauuggcaguauccgaaaugggacauaugaucaugacguguaccgcgacgaggcccugaacaauagauuccagauuaagggagucgagcucaaauccgguuacaaggauuggauccuguggauaaguuuugcuaucucuugcuuccuucuguguguggccuugcucggcuuuauuaugugggcaugccagaaagggaacaucagguguaauauuugcaucuga

SEQ ID NO: 139074 - RNA, 1701 nt, Artificial Sequence; identical to SEQ ID NO: 139073
  derived and/or modified CDS sequence (opt3) from hemagglutinin__InfluenzaA__AHG96371

SEQ ID NO: 139075 - RNA, 1701 nt, Artificial Sequence; identical to SEQ ID NO: 139073
  derived and/or modified CDS sequence (opt3) from hemagglutinin__InfluenzaA__AHG96383

SEQ ID NO: 139076 - RNA, 1698 nt, Artificial Sequence; identical to SEQ ID NO: 135841
  derived and/or modified CDS sequence (opt3) from hemagglutinin__InfluenzaA__AHG96395

SEQ ID NO: 139077 - RNA, 1701 nt, Artificial Sequence; identical to SEQ ID NO: 139073
  derived and/or modified CDS sequence (opt3) from hemagglutinin__InfluenzaA__AHG96407

SEQ ID NO: 139078 - RNA, 1701 nt, Artificial Sequence; identical to SEQ ID NO: 139073
  derived and/or modified CDS sequence (opt3) from hemagglutinin__InfluenzaA__AHG96419

SEQ ID NO: 139079 - RNA, 1701 nt, Artificial Sequence; identical to SEQ ID NO: 139073
  derived and/or modified CDS sequence (opt3) from hemagglutinin__InfluenzaA__AHG96431

SEQ ID NO: 139080 - RNA, 1701 nt, Artificial Sequence; identical to SEQ ID NO: 139073
  derived and/or modified CDS sequence (opt3) from hemagglutinin__InfluenzaA__AHG96443

SEQ ID NO: 139081 - RNA, 1701 nt, Artificial Sequence; identical to SEQ ID NO: 139073
  derived and/or modified CDS sequence (opt3) from hemagglutinin__InfluenzaA__AHG96455

SEQ ID NO: 139082 - RNA, 1701 nt, Artificial Sequence; identical to SEQ ID NO: 139073
  derived and/or modified CDS sequence (opt3) from hemagglutinin__InfluenzaA__AHG96467

SEQ ID NO: 139083 - RNA, 1701 nt, Artificial Sequence; identical to SEQ ID NO: 139073
  derived and/or modified CDS sequence (opt3) from hemagglutinin__InfluenzaA__AHG96479

SEQ ID NO: 139084 - RNA, 1701 nt, Artificial Sequence; identical to SEQ ID NO: 139073
  derived and/or modified CDS sequence (opt3) from hemagglutinin__InfluenzaA__AHG96491

SEQ ID NO: 139085 - RNA, 1701 nt, Artificial Sequence; identical to SEQ ID NO: 130404
  derived and/or modified CDS sequence (opt3) from hemagglutinin__InfluenzaA__AHG96503

SEQ ID NO: 139086 - RNA, 1698 nt, Artificial Sequence; identical to SEQ ID NO: 135841
  derived and/or modified CDS sequence (opt3) from hemagglutinin__InfluenzaA__AHG96515

SEQ ID NO: 139087 - RNA, 1698 nt, Artificial Sequence; identical to SEQ ID NO: 135841
  derived and/or modified CDS sequence (opt3) from hemagglutinin__InfluenzaA__AHG96527

SEQ ID NO: 139088 - RNA, 1698 nt, Artificial Sequence; identical to SEQ ID NO: 135841
  derived and/or modified CDS sequence (opt3) from hemagglutinin__InfluenzaA__AHG96539

SEQ ID NO: 139089 - RNA, 1698 nt, Artificial Sequence; identical to SEQ ID NO: 135841
  derived and/or modified CDS sequence (opt3) from hemagglutinin__InfluenzaA__AHG96551

SEQ ID NO: 139090 - RNA, 1698 nt, Artificial Sequence; identical to SEQ ID NO: 139021
  derived and/or modified CDS sequence (opt3) from hemagglutinin__InfluenzaA__AHG96563

SEQ ID NO: 139091 - RNA, 1698 nt, Artificial Sequence; identical to SEQ ID NO: 135841
  derived and/or modified CDS sequence (opt3) from hemagglutinin__InfluenzaA__AHG96575

SEQ ID NO: 139092 - RNA, 1698 nt, Artificial Sequence; identical to SEQ ID NO: 135841
  derived and/or modified CDS sequence (opt3) from hemagglutinin__InfluenzaA__AHG96587

SEQ ID NO: 139093 - RNA, 1698 nt, Artificial Sequence; identical to SEQ ID NO: 135841
  derived and/or modified CDS sequence (opt3) from hemagglutinin__InfluenzaA__AHG96599

SEQ ID NO: 139094 - RNA, 1698 nt, Artificial Sequence; identical to SEQ ID NO: 135841
  derived and/or modified CDS sequence (opt3) from hemagglutinin__InfluenzaA__AHG96611

SEQ ID NO: 139095 - RNA, 1698 nt, Artificial Sequence; identical to SEQ ID NO: 135841
  derived and/or modified CDS sequence (opt3) from hemagglutinin__InfluenzaA__AHG96623

SEQ ID NO: 139096 - RNA, 1698 nt, Artificial Sequence; identical to SEQ ID NO: 135841
  derived and/or modified CDS sequence (opt3) from hemagglutinin__InfluenzaA__AHG96635

SEQ ID NO: 139097 - RNA, 1698 nt, Artificial Sequence; identical to SEQ ID NO: 135841
  derived and/or modified CDS sequence (opt3) from hemagglutinin__InfluenzaA__AHG96647

SEQ ID NO: 139098 - RNA, 1698 nt, Artificial Sequence; identical to SEQ ID NO: 135841
  derived and/or modified CDS sequence (opt3) from hemagglutinin__InfluenzaA__AHG96659

SEQ ID NO: 139099 - RNA, 1698 nt, Artificial Sequence; identical to SEQ ID NO: 135841
  derived and/or modified CDS sequence (opt3) from hemagglutinin__InfluenzaA__AHG96671

SEQ ID NO: 139100 - RNA, 1698 nt, Artificial Sequence; identical to SEQ ID NO: 135841
  derived and/or modified CDS sequence (opt3) from hemagglutinin__InfluenzaA__AHG96683

SEQ ID NO: 139101 - RNA, 1701 nt, Artificial Sequence; identical to SEQ ID NO: 139073
  derived and/or modified CDS sequence (opt3) from hemagglutinin__InfluenzaA__AHG96695

SEQ ID NO: 139102 - RNA, 1701 nt, Artificial Sequence; identical to SEQ ID NO: 139073
  derived and/or modified CDS sequence (opt3) from hemagglutinin__InfluenzaA__AHG96707

SEQ ID NO: 139103 - RNA, 1701 nt, Artificial Sequence; identical to SEQ ID NO: 139073
  derived and/or modified CDS sequence (opt3) from hemagglutinin__InfluenzaA__AHG96719

SEQ ID NO: 139104 - RNA, 1701 nt, Artificial Sequence; identical to SEQ ID NO: 139073
  derived and/or modified CDS sequence (opt3) from hemagglutinin__InfluenzaA__AHG96731

SEQ ID NO: 139105 - RNA, 1701 nt, Artificial Sequence; identical to SEQ ID NO: 139073
  derived and/or modified CDS sequence (opt3) from hemagglutinin__InfluenzaA__AHG96743

SEQ ID NO: 139106 - RNA, 1701 nt, Artificial Sequence; identical to SEQ ID NO: 139073
  derived and/or modified CDS sequence (opt3) from hemagglutinin__InfluenzaA__AHG96755

SEQ ID NO: 139107 - RNA, 1701 nt, Artificial Sequence; identical to SEQ ID NO: 139073
  derived and/or modified CDS sequence (opt3) from hemagglutinin__InfluenzaA__AHG96767

SEQ ID NO: 139108 - RNA, 1701 nt, Artificial Sequence; identical to SEQ ID NO: 139073
  derived and/or modified CDS sequence (opt3) from hemagglutinin__InfluenzaA__AHG96779

SEQ ID NO: 139109 - RNA, 1701 nt, Artificial Sequence
  derived and/or modified CDS sequence (opt3) from hemagglutinin__InfluenzaA__AHG96791
augaagaccaucauugcccugagcuacauacucugccuuguguucgcucagaaacugcccggcaacgacaauuccacagcaacuuuguguuuagggcaccaugccgucccuaacggaacgaucguuaagaccauuacaaaugaucaaaucgaggugacuaacgcgaccgaacugguacagucuucaaguacagguggcauuugcgacagcccacaccagauccuagauggggagaauuguacccucauagacgcucugcuuggagauccgcagugcgacggcuuucaaaacaaaaagugggaucuguucguggaaagauccaaagccuauucuaauuguuaccccuaugacgucccugauuacgcaucguugaggucacucguggccagcagugguacucuggaguuuaacgacgaauccuucaauuggacagggguuacccagaacggaacgucuagcuccugcaagcggcgcucaaauaacagcuuuuucagccgacugaauuggcucacucaguuaaaguuuaaauauccagcucugaacgugaccaugcccaauaacgagaaguucgauaaacuuuacaucuggggcguccaucacccugugacagacaacgaucagauuuuucuuuaugcacaagccucuggccguaucacuguauccaccaagagaucacagcagacaguuauuccaaauaucgggagcaggccccggauacgcaacauuccuaguagaaucucuauuuacuggaccaucgugaaaccaggagacauccugcuaauuaauuccacggguaaccucauagcuccgaggggcuacuucaagauccggagcgggaagucgucuauuaugcgcuccgacgcccccaucggaaaauguaauucagagugcauaacuccuaacggcaguauuccaaaugauaagcccuuucagaacgucaaucgaaucacauauggugcguguccuagauacgugaaacaaaacacccugaaguuggcaacugggaugaggaaugugccagaaaaacagacacggggaaucuucggcgccauugcuggcuuuaucgagaacgggugggaaggaauggucgacgguugguauggcuuccgucaucagaauagcgaggggauuggacaagccgcagaucugaaguccacccaggcugccauaaaccagaucaauggcaaauugaaccgccucauugguaagacgaacgagaaguuccaccagaucgaaaaagaguuuucugaaguugagagaaggauccaagaccuggaaaaguacguggaggauaccaaaauugacuuauggagcuauaaugcggagcugcucguagcccuugaaaaccagcacacaauagaucugacugacucagagaugaauaaguuguucgaacggaccaaaaagcagcuacgagagaacgcagaagauauggggaauggcugcuuuaagaucuaccauaaaugugacaacgcuugcauuggaaguauccgcaauggcacauaugaucacgacguguacagagacgaggcccugaacaauagguuccagauuaagggggucgagcucaaauccggauacaaggauuggauccuguggauaaguuuugcuaucucuugcuuccuucuguguguggccuugcucgguuuuauuaugugggcaugccaaaaaggcaacauccgguguaauauuugcaucuga

SEQ ID NO: 139110 - RNA, 1701 nt, Artificial Sequence; identical to SEQ ID NO: 139073
  derived and/or modified CDS sequence (opt3) from hemagglutinin__InfluenzaA__AHG96803

SEQ ID NO: 139111 - RNA, 1701 nt, Artificial Sequence; identical to SEQ ID NO: 139073
  derived and/or modified CDS sequence (opt3) from hemagglutinin__InfluenzaA__AHG96815

SEQ ID NO: 139112 - RNA, 1701 nt, Artificial Sequence; identical to SEQ ID NO: 139073
  derived and/or modified CDS sequence (opt3) from hemagglutinin__InfluenzaA__AHG96827

SEQ ID NO: 139113 - RNA, 1701 nt, Artificial Sequence; identical to SEQ ID NO: 139073
  derived and/or modified CDS sequence (opt3) from hemagglutinin__InfluenzaA__AHG96839

SEQ ID NO: 139114 - RNA, 1701 nt, Artificial Sequence; identical to SEQ ID NO: 139073
  derived and/or modified CDS sequence (opt3) from hemagglutinin__InfluenzaA__AHG96851

SEQ ID NO: 139115 - RNA, 1701 nt, Artificial Sequence; identical to SEQ ID NO: 139073
  derived and/or modified CDS sequence (opt3) from hemagglutinin__InfluenzaA__AHG96863

SEQ ID NO: 139116 - RNA, 1701 nt, Artificial Sequence; identical to SEQ ID NO: 139073
  derived and/or modified CDS sequence (opt3) from hemagglutinin__InfluenzaA__AHG96875

SEQ ID NO: 139117 - RNA, 1701 nt, Artificial Sequence; identical to SEQ ID NO: 139073
  derived and/or modified CDS sequence (opt3) from hemagglutinin__InfluenzaA__AHG96887

SEQ ID NO: 139118 - RNA, 1701 nt, Artificial Sequence; identical to SEQ ID NO: 139073
  derived and/or modified CDS sequence (opt3) from hemagglutinin__InfluenzaA__AHG96899

SEQ ID NO: 139119 - RNA, 1701 nt, Artificial Sequence; identical to SEQ ID NO: 139073
  derived and/or modified CDS sequence (opt3) from hemagglutinin__InfluenzaA__AHG96911

SEQ ID NO: 139120 - RNA, 1701 nt, Artificial Sequence; identical to SEQ ID NO: 139073
  derived and/or modified CDS sequence (opt3) from hemagglutinin__InfluenzaA__AHG96923

SEQ ID NO: 139121 - RNA, 1701 nt, Artificial Sequence; identical to SEQ ID NO: 139073
  derived and/or modified CDS sequence (opt3) from hemagglutinin__InfluenzaA__AHG96935

SEQ ID NO: 139122 - RNA, 1701 nt, Artificial Sequence; identical to SEQ ID NO: 139073
  derived and/or modified CDS sequence (opt3) from hemagglutinin__InfluenzaA__AHG96947

SEQ ID NO: 139123 - RNA, 1701 nt, Artificial Sequence; identical to SEQ ID NO: 139073
  derived and/or modified CDS sequence (opt3) from hemagglutinin__InfluenzaA__AHG96959

SEQ ID NO: 139124 - RNA, 1701 nt, Artificial Sequence; identical to SEQ ID NO: 139073
  derived and/or modified CDS sequence (opt3) from hemagglutinin__InfluenzaA__AHG96971

SEQ ID NO: 139125 - RNA, 1701 nt, Artificial Sequence; identical to SEQ ID NO: 139073
  derived and/or modified CDS sequence (opt3) from hemagglutinin__InfluenzaA__AHG96983

SEQ ID NO: 139126 - RNA, 1701 nt, Artificial Sequence; identical to SEQ ID NO: 139073
  derived and/or modified CDS sequence (opt3) from hemagglutinin__InfluenzaA__AHG96995

SEQ ID NO: 139127 - RNA, 1701 nt, Artificial Sequence; identical to SEQ ID NO: 139073
  derived and/or modified CDS sequence (opt3) from hemagglutinin__InfluenzaA__AHG97007

SEQ ID NO: 139128 - RNA, 1701 nt, Artificial Sequence; identical to SEQ ID NO: 139073
  derived and/or modified CDS sequence (opt3) from hemagglutinin__InfluenzaA__AHG97019

SEQ ID NO: 139129 - RNA, 1701 nt, Artificial Sequence; identical to SEQ ID NO: 139073
  derived and/or modified CDS sequence (opt3) from hemagglutinin__InfluenzaA__AHG97031

SEQ ID NO: 139130 - RNA, 1701 nt, Artificial Sequence; identical to SEQ ID NO: 139073
  derived and/or modified CDS sequence (opt3) from hemagglutinin__InfluenzaA__AHG97043

SEQ ID NO: 139131 - RNA, 1701 nt, Artificial Sequence
  derived and/or modified CDS sequence (opt3) from hemagglutinin__InfluenzaA__AHH00866
augaagaccaucauugcccugagcuacauacucugccuugcuuucgcacagaaacugcccggcaacgacaauuccacagccacuuuguguuuagggcaccaugcggugccuaacggaacgcuggucaagaccaucacaaaugaucaaauugagguuacuaacgcuaccgagcuagugcagucuucaaguacagguagaaucugcgacagcccacaccagauucucgauggcgaaaauuguacccugaucgacgcccuucugggggauccgcauugcgacggauuucagaacaaagaaugggauuuguucguagagagguccaaggcauauucuaauuguuaccccuaugacgugccugauuacgccucgcuccggucacuggucgcuagcaguggcacucuggaauuuaacaaugaguccuucaacuggacagguguggcacaaaaugggaccucuagcgccugcaaacgccgauccauaaagucauuuuucagucgucucaacugguuacaccagcuggagaauagauauccagcucuuaacguuacgaugcccaauaacgacaaguuugauaaauuguacaucuggggagugcaucacccuagcacugacucugaucagauuuccgucuaugcccaggcgucaggcagggugaccguaagcacaaagcggagucaacagacuguuaucccaaacauuggcucucgccccugggugagagggaucuccagcaggauaucgauuuacuggaccaucgucaauccuggagacauucugcuaaucaacucuacagguaaucucaucgcaccacggggcuacuucaaaauucgcuccgggaagucaaguauaaugcgaagcgacgccccgaucggaaaauguaacuccgaaugcauuacccccaauggcucuaucccuaacgauaagccauuucagaaugugaacagaauaacguauggugcuugucccagguacgugaagcagaauacucugaaacuugccacagggaugcggaacgucccugagaagcaaacccguggaauuuucggcgcaaucgcuggcuuuaucgaaaaugggugggagggaaugauggacgguugguauggcuuccgccaccagaacagcgaggggacuggacaggccgcggaucugaaaucaacacaagccgcaauuaaucagaucaacggcaaguugaauaaacucauugaaaagaccaacgagaaauuucaucagauagaaaaggaguucagugaaguugaggguagaauccaggaccuggagaaguacguggaagauacgaaaauugacuuaugguccuauaacgcugagcugcucguagcccuugaaaaucaacacaccaucgaucugacagacagcgagaugaacaaguuguucgaaaggacucggaaacagcuacgagagaaugcugaggauauggggaacggcugcuuuaagaucuaccauaaaugugacaaugccugcauuggaucuauacgcaacggcaccuaugaucacgacguguacagagacgaagcacugaauaacagguuccagaucaagggggucgagcucaagucaggauacaaagauuggauucuguggaucaguuuugccauuagcugcuuccuucugugugugguuuugcucgguuuuaucaugugggcuugccagaagggcaauauacgguguaacaucugcauuuga

SEQ ID NO: 139132 - RNA, 1701 nt, Artificial Sequence
  derived and/or modified CDS sequence (opt3) from hemagglutinin__InfluenzaA__AHH00870
augaagaccaucauugcccugagcuacauacucugccuugcuuucgcacagaaacugcccggcaacgacaauuccacagccacuuuguguuuagggcaccaugcggugccuaacggaacgcuggucaagaccaucacaaaugaucaaauugagguuacuaacgcuaccgagcuagugcagucuucaaguacagguagaaucugcgacagcccacaccagauucucgauggcgaaaauuguacccugaucgacgcccuucugggggauccgcauugcgacggauuucagaacaaagaaugggauuuguucguagagagguccaaggcauauucuaauuguuaccccuaugacgugccugauuacgccucgcuccggucacuggucgcuagcaguggcacucuggaauuuaacaaugaguccuucaacuggacagguguggcacaaaaugggaccucuagcgccugcaaacgccgauccauaaagucauuuuucagucgucucaacugguuacaccagcuggagaauagauauccagcucuuaacguuacgaugcccaauaacgacaaguuugauaaauuguacaucuggggagugcaucacccuagcacugacucugaucagauuuccgucuaugcccaggcgucaggcagggugaccguaagcacaaagcggagucaacagacuguuaucccaaacauuggcucucgccccugggugagagggaucuccagcaggauaucgauuuacuggaccaucgucaaaccuggagacauucugcuaaucaauucuacagguaaccucaucgcaccacggggcuacuucaagauucgcuccgggaaaucaaguauaaugcgaagcgacgccccgaucggaaaguguaauuccgaaugcauuacccccaacggcucuaucccuaaugauaagccauuucagaacgugaauagaauaacguauggugcuugucccagguacgugaaacagaacacucugaaacuugccacagggaugcggaaugucccugagaaacaaacccguggaauuuucggcgcaaucgcuggcuuuaucgaaaacgggugggagggaaugauggacgguugguauggcuuccgccaccagaauagcgaggggacuggacaggccgcggaucugaagucaacacaagccgcaauuaaccagaucaauggcaaauugaacaagcucauugaaaagaccaaugagaaguuucaucagauagaaaaggaguucagugaaguugaggguagaauccaggaccuggagaaauacguggaagauacgaagauugacuuaugguccuauaacgcugagcugcucguagcccuugaaaaccaacacaccaucgaucugacagacagcgagaugaauaaauuguucgaaaggacucggaagcagcuacgagagaacgcugaggauauggggaauggcugcuuuaaaaucuaccauaagugugacaacgccugcauuggaucuauacgcaauggcaccuaugaucacgacguguacagagacgaagcacugaacaauagguuccagaucaagggggucgagcucaaaucaggauacaaggauuggauucuguggaucaguuuugccauuagcugcuuccuucugugugugguuuugcucgguuuuaucaugugggcuugccagaaaggcaacauacgguguaauaucugcauuuga

SEQ ID NO: 139133 - RNA, 1701 nt, Artificial Sequence
  derived and/or modified CDS sequence (opt3) from hemagglutinin__InfluenzaA__AHJ57430
augaaggccauccuggugguccuccuuuacaccuucgcuacagcaaacgccgacacucugugcauuggcuaucacgcgaauaacagcacggauaccguugacacaguguuggagaagaauguaacugugacccauuccgucaacuuacuggaagauaagcacaaugggaaacuauguagacucaggggaguggcuccccugcaucuugguaagugcaacauagccggcuggauccuggggaauccugagugugaaucuuugucaacagcaaguagcugguccuacauuguugagaccucuucgucagacaacggaacuugcuauccaggcgauuuuaucaauuacgaggagcuccgggagcagcugagcaguguguccucuuucgaacgcuuugagauuagcccgaaaacauccucauggcccaaccacgacaguaauaaggguguccgagccgcuuguccucaugcaggggccaagagcuucuauaaaaaccugaucuggcucgugaagaaaggaaauucuuacccaaaguuauccaaaucauauauaaacgauaagggcaaggaaguacugguucuuuggggcauccaccaccccagcaccagugcugaccaacagucuuuguaccagaaugccgaugcguacguguuugucgggacgucccguuauagcaaaaaguucaaaccugagauugcaaucagaccaaaggugaggggacaggagggucggaugaacuacuauuggacucugguggaacccggcgacaaaauuaccuuugaggccacagggaaccuagucguuccucgcuacgcuuucgccauggaaagaaaugcagcuucgggaaucauaauuucugauacuccagugcaugacugcaacaccacaugucaaaccccgaagggcgccguaaauacgucccuccccuuucagaacauccacccuauuacuaucgguaaaugcccaaaguaugugaagucaacaaaacugaggcuugcgaccgggcugcggaauauccccaguauucagagccgcggauuguucggcgccauagcaggcuuuaucgaagggggauggacugguauggucgauggcugguacggguaucaucaccagaacgaacaaggauccggcuacgcugccgaccucaagucuacacagaaugcuauugacgagaucaccaacaaagugaauagcguuauagagaagaugaacacgcaguucaccgccguggguaaagaauuuaaucaccuggagaagcgaauugaaaacuuaaauaagaaagucgaugacggguuccuggauaucuggacauacaacgcagagcuccuugugcuguuggaaaaugagagaacucuagacuaucaugauucaaacguaaagaaccuguacgagaaaguuaggagucagcucaagaauaacgccaaagaaaucggcaauggauguuucgaguuuuaucacaagugcaacaauaccuguauggaauccgugaagaacggcacauacgacuauccuaaauacagcgaggaagcuaagcugaaucgggagaaaauugauggggucaaacuugagucuacucguaucuaucaaauucuggcgauauacucaaccguggcaaguagcuugguccucgugguuucccugggagccaucucuuucuggaugugcucgaacgguagcuuacagugccgcauuuguaucuga

SEQ ID NO: 139134 - RNA, 1701 nt, Artificial Sequence
  derived and/or modified CDS sequence (opt3) from hemagglutinin__InfluenzaA__AHJ57431
augaaggccauccuggugguccuccuuuacaccuucgcuacagcaaacgccgacacucugugcauuggcuaucacgcgaauaacagcacggauaccguugacacaguguuggagaaaaauguaacugugacccauuccgucaacuuacuggaagauaagcacaaugggaaacuauguaagcucagaggaguggcuccccugcaucuugguaaaugcaacauagccggcuggauccuggggaauccugagugugaaucuuugucaacagcaaguagcugguccuacauuguugagaccucuucgucagacaacggaacuugcuauccaggcgauuuuaucgacuacgaggagcucagggagcagcugagcaguguguccucuuucgaacgguuugagauuuucccgaagacaagcuccuggcccaaucacgauucaaacaaggguguccgcgccgcuuguccucaugcaggggccaaaaguuuuuauaagaaucugaucuggcucgugaaaaagggaaacagcuacccaaaauuaucucaauccuauauaaaugacaagggcaaggaaguacugguucuuuggggcauccaccaccccucaaccagcgcugaucagcagaguuuguaccagaacgccgacgcguacguguucgucgggacgucucgauauuccaaaaaguuuaaaccugagauugcaauccguccaaaggugagagaucaagagggaaggaugaauuacuauuggacucugguggaacccggugacaaaauuaccuucgaggccacaggcaaccuagucguuccucgguacgcuuuugccauggaacgcaacgcagggagcggaaucauaauuucggauacuccagugcaugacugcaauaccacaugucagaccccgaagggcgcuaucaacacgucucuccccuuccagaauauucacccuaucacuaucgguaaaugcccaaaguauguaaaguccacaaaacugagacuugccaccgggcugaggaacauucccucaauacagagucggggauuguuuggcgcgaucgccggcuucauugaagggggauggacugguaugguggacggcugguacggguaucaucaccaaaaugaacagggaagcggcuacgcagcugaucucaaguccacacagaacgccaucgacaaaauaaccaauaaggucaacucugugauugagaaaaugaauacgcaguuuaccgcuguugguaaggaguucaaccaccuggaaaagcgcaucgagaauuuaaacaaaaagguggaugacggguuccuggauaucuggacauacaaugccgaacuccuuguccuguuggagaacgaacgaacucuagacuaucaugauagcaaugugaaaaaccuguacgagaagguaagaaaccaacucaaaaauaacgcaaaggagauuggcaauggauguuuugaguucuaucacaagugcgacaacaccuguauggaaucaguuaaaaauggcacauacgauuauccuaaguacagugaagaggccaaacugaacagggaaaagaucgacggggugaaacuugaguccacucggauuuaucagauacuggcuaucuacagcaccgucgcgucuucauuggugcucgucgugagucugggagcaauuagcuuuuggaugugcuccaaugguucuuuacagugccguaucuguaucuga

SEQ ID NO: 139135 - RNA, 1701 nt, Artificial Sequence
  derived and/or modified CDS sequence (opt3) from hemagglutinin__InfluenzaA__AHJ57432
augaaggccauccuggugguccuccuuuacaccuucgcuacagcaaacgccgacacucugugcauuggcuaucacgcgaauaacagcacggauaccguugacacaguguuggagaagaauguaacugugacccauuccgucaacuuacuggaagauaagcacaaugggaaacuauguaagcucagaggaguggcuccccugcaucuugguaaaugcaacauagccggcuggauccuggggaauccugagugugaaucuuugucaacagcaaguagcugguccuacauuguugagaccucuucgucagacaacggaacuugcuauccaggcgauuuuaucgacuacgaagaacucagggagcagcugagcaguguguccucuuucgaacgguuugagauuuucccgaagacaagcuccuggcccaaucacgauucaaacaagggugucaccgccgcuuguccucaugcaggggccaaaaguuuuuauaagaaucugaucuggcucgugaaaaagggaaacagcuacccaaaauuaucuaaguccuauauaaaugacaagggcaaagaaguacugguucuuuggggcauccaccaccccucaacgacugcugaucaacagagcuuguaccagaacgccgacgcguacguguucgucgggaccagucgcuauucuaagaaauuuaagccucagauugcaauccgaccaaaagugcgugaucaagagggaagaaugaauuacuauuggacacugguggagcccggugacaagauuacuuucgaagccaccggcaaccuagucguuccuagguacgcuuuugcccucgagcggaacgcaggguccggaaucauaauuagcgauacaccagugcaugacugcaauaccacgugucagacuccgaaaggcgcuaucaacacaucgcugcccuuccagaauauucacccuaucaccaucgguaagugcccaaaguauguaaaaucuacuaaacuucgccuggccacaggguugagaaacgugcccuccauucagucaaggggacucuuuggcgcgauagccggcuucaucgaagggggauggaccgguauggucgagggcugguacggguaucaucaccaaaaugaacagggaaguggcuacgcagcugaccugaaaagcacgcagaacgccauugauaagaucaccaauaaagugaacuccguuauagagaagaugaauacacaguuuacugcuguggguaaggaguucaaccacuuagaaaaacggauugagaaucugaacaagaaagucgacgauggguuccucgacaucuggaccuacaaugccgaacuucugguguugcuagagaacgaacgcacacuggauuaucaugacucuaauguaaagaaccucuacgagaaaguucgaaaccaacugaagaauaacgcaaaggagaucggcaauggauguuuugaguucuaucacaaaugcgauaacacuuguauggagagcgugaagaauggcaccuacgacuauccuaaauacucagaagaggccaaacuuaacagagaaaagauugauggggucaagcuggagaguacaaggaucuaucagauuuuggcuauauacuccaccguggcgagcucucucguccuggugguuucauuaggagcaaucaguuuuuggaugugcagcaaugguucccugcagugccggauuuguaucuga

SEQ ID NO: 139136 - RNA, 1701 nt, Artificial Sequence
  derived and/or modified CDS sequence (opt3) from hemagglutinin__InfluenzaA__AHJ57433
augaaggccauccuggugguccuccuuuacaccuucgcuacagcaaacgccgacacucugugcauuggcuaucacgcgaauaacagcacggauaccguugacacaguguuggagaagaauguaacugugacccauuccgucaacuuacuggaagauaagcacaaugggaaacuauguaagcucagaggaguggcuccccugcaucuugguaaaugcaacauagccggcuggauccuggggaauccugagugugaaucuuugucaacagcaaguagcugguccuacauuguugagaccucuucgucagacaacggaacuugcuauccaggcgauuuuaucaauuacgaggagcucagggagcagcugagcaguguguccucuuucgaacgguuugagauuuucccgaagacaagcuccuggcccaaccacgacucaaauaagggugucaccgccgcuuguccucaugcaggggccaaaaguuuuuauaagaaccugaucuggcucgugaaagaaggaaauagcuacccaaaguuaucuaaauccuauauaaacgauaagggcaaggagguacugguucuuuggggcauccaccaccccucaacgacugcugaccaacagagcuuguaccagaaugccgaugcguacguguucgucgggaccagucgcuauucuaaaaaguuuaaaccugagauugcaauccgaccaaaggugcgugaccaggaaggaagaaugaacuacuauuggacacugauugagcccggugauaaaaucacuuucgaagccaccggcaaccuaguggucccuagguacgcuuuugccauggagcggaaugcaggguccggaauaauuaucagcgacacaccaguucaugauugcaacaccacgugucaaacuccggaaggcgcuauuaauacaucgcuccccuuccagaacauccacccuaucaccauugguaagugcccaaaauaugugaagucuacuaagcugcgccuugccacagggcugagaaauguacccuccauacagucaaggggauuguuuggcgcgaucgccggcuucauugaagggggauggaccgguaugguggacggcugguacggguaucaucaccagaacgagcaaggaaguggcuacgcagcugaccucaaaagcacgcagaaugccaucgauaagauaaccaacaaagucaauuccgugauugaaaagaugaacacacaguuuacugcuguugguaaagaguucaaucaccuggaaaagcggaucgagaacuuaaauaagaaaguggacgauggguuccuggacaucuggaccuacaacgccgaacuccuuguccuguuggagaaugagcgcacacuagauuaucaugacucuaacgugaagaaccuguacgaaaaaguacgaaaucagcucaagaacaaugcaaaagagauuggcaacggauguuuugaguucuaucacaagugcgauaauacuuguauggaaagcguuaagaacggcaccuacgacuauccuaaauacucagaagaggccaagcugaauagagagaaaaucgauggggugaaacuugaaaguacaaggauuuaucaaauacuggcuaucuacuccaccgucgcgagcucuuuggugcucgucgugucacugggagcaauuaguuuuuggaugugcagcaacgguuccuuacagugccggaucuguaucuga

SEQ ID NO: 139137 - RNA, 1701 nt, Artificial Sequence
  derived and/or modified CDS sequence (opt3) from hemagglutinin__InfluenzaA__AHJ57434
augaaggccauccuggugguccuccuuuacaccuucgcuacagcaaacgccgacacucugugcauuggcuaucacgcgaauaacagcacggauaccguugacacaguguuggagaaaaauguaacugugacccauuccgucaaccccuuagaagauaagcacaaugggaaacuguguaagcuaagaggaguggcuccucuccaucuggguaaaugcaacauagccggcuggauccuugggaauccagagugugaaucucugucaacagcaaguagcugguccuacauuguugagaccucuucgucagacaacggaacuugcuauccgggcgauuuuaucgacuacgaagaguugagggagcagcucagcaguguguccucuuucgaacgguuugagauuuuccccaagacaagcuccuggccuaaucacgauucaaacaagggugucaccgccgcuuguccacaugcaggggccaaaaguuuuuauaagaaucugaucuggcuggugaaagaaggaaacagcuaccccaagcucucuaaauccuauauaaaugacaagggcaaggagguauuaguucuguggggcauccaccacccuucaacgacugcugaucaacagagccuuuaccagaacgccgacgcguacguguucgucgggaccagucgcuauucuaaaaaguuuaaaccagagauugcaauccgacccaaggugcgugaucaggaaggaagaaugaauuacuauuggacauugguggagccuggugacaaaauuacuuucgaagccaccggcaaccuggucguuccaagguacgcuuuugccauggagcggaacgcaggguccggaaucauaauuagcgauacaccggugcaugacugcaauaccacgugucaaacucccgaaggcgcuaucaacacaucgcuaccuuuccagaauauucacccaaucaccaucgguaagugccccaaauauguaaagucuacuaagcuccgccuggccacagggcuuagaaacgugccuuccauucagucaaggggacuguuuggcgcgauagccggcuucaucgaagggggauggaccgguauggucgacggcugguacggguaucaucaccagaaugagcaaggaaguggcuacgcagcugauuugaaaagcacgcagaacgccauugacaagaucaccaauaaagugaacuccguuauagaaaagaugaauacacaguuuacugcuguggguaaagaguucaaccaccucgaaaagcggauugagaaucugaacaagaaagucgaugacggguucuuagauaucuggaccuacaaugccgaacugcucgugcuucuggagaacgagcgcacauuggacuaucaugauucuaauguaaagaaccuauacgaaaaaguucgaaaccagcugaagaauaacgcaaaagagaucggcaauggauguuuugaguucuaucacaagugcgacaacacuuguauggagagcgugaagaauggcaccuacgauuauccaaaauacucagaagaggccaagcucaacagagagaaaauugacggggucaagcuggaaaguacaaggaucuaucaaauucuugcuauauacuccaccguggcgagcucucuggucuuggugguuucacucggagcaaucaguuuuuggaugugcagcaaugguucccugcagugccggauuuguaucuga

SEQ ID NO: 139138 - RNA, 1701 nt, Artificial Sequence
  derived and/or modified CDS sequence (opt3) from hemagglutinin__InfluenzaA__AHJ57435
augaaggccauccuggugguccuccuuuacaccuucgcuacagcaaacgccgacacucugugcauuggcuaucacgcgaauaacagcacggauaccguugacacaguguuggagaaaaauguaacugugacccauuccgucaacuuacuggaagauaagcacaaugggaaacuauguaagcucagaggaguggcuccccugcaucuugguaaaugcaacauagccggcuggauccuggggaauccugagugugaaucuuugucaacagcaaguagcugguccuacauuguugagaccucuucgucagacaacggaacuugcuauccaggcgauuuuaucaauuacgaagaacucagggagcagcugagcaguguguccucuuucgaacgguuugagauuuucccgaagacaagcuccuggcccaaccacgacucaaaucgcggugucaccgccgcuuguccucaugcaggggccaagaguuuuuauaaaaaccugaucuggcucgugaagaaaggaaauagcuacccaaaguuaucucaauccuauauaaacgauaaaggcaaggaaguacugguucuuuggggcauccaccaccccucaacgacugcugaccagcagagcuuguaccagaaugccgaugcguacguguucgucgggaccagucgauauucuaagaaauuuaagccugagauugcaauccguccaaaagugagagaccaagagggaaggaugaacuacuauuggacacugguggaacccggugauaagauuacuuucgaggccaccggcaaccuagucguuccucgguacgcuuuugccauggaacgcaaugcaggguccggaaucauaauuagcgacacaccagugcaugauugcaacaccacgugucagacuccggagggcgcuaucaauacaucgcuccccuuccagaacauucacccuaucaccaucgguaaaugcccaaaguauguaaaaucuacuaagcugagacuugccacagggcugaggaaugugcccuccauucagucacggggauuguuuggcgcgauagccggcuucaucgaagggggauggaccgguauggucgacggcugguacggguaucaucaccaaaacgagcagggaaguggcuacgcagcugaccucaagagcacgcagaaugccauugauaaaaucaccaacaagguaaauuccguuauagagaaaaugaacacacaguuuacugcuguggguaaggaguucaaucaccuggagaaacgcauugaaaacuuaaauaagaaggucgacgauggguuccuggacaucuggaccuacaacgccgagcuccuugugcuguuggaaaaugagcgaacacuagauuaucaugacucuaacgugaaaaaccuguacgagaagguuagaaaucaacucaaaaacaaugcaaaggaaaucggcaacggauguuuugaguucuaucacaaaugcgauaauacuuguauggaaagcgugaagaacggcaccuacgacuauccuaaguacucagaggaagccaaacugaauagggagaagauugauggggucaaacuugagaguacacggaucuaucagauucuggcuauauacuccaccguggcgagcucuuugguccucgugguuucacugggagcaaucaguuuuuggaugugcagcaacgguuccuuacagugccguauuuguaucuga

SEQ ID NO: 139139 - RNA, 1701 nt, Artificial Sequence
  derived and/or modified CDS sequence (opt3) from hemagglutinin__InfluenzaA__AHJ57436
augaagaccaucauugcccugagcuacauacucugccuuguguucgcucagaaacugcccggcaacgacaauuccacagcaacuuuguguuuagggcaccaugccgucccuaacggaacgaucguuaagaccauuacaaaugaucaaaucgaggugacuaacgcgaccgaacugguacagucuucaaguacaggugagauuugcgacagcccacaccagauccuagauggcgaaaauuguacccucauagacgcucugcuuggggauccgcagugcgacggauuucaaaacaaaaagugggaucuguucguggagagauccaaagccuauucuaauuguuaccccuaugacgucccugauuacgcaucguugaggucacucguggccagcaguggcacucuggaauuuaacaaugaguccuucaacuggacagguguuacccagaaugggacgucuagcgcuugcauccggcgcuccaacucaaguuucuuuagccgacugaauuggcucacucauuuaaacuuuaaguauccagcacugaaugugaccauucccaacaacgagcaguucgacaaguuguacaucuggggaguccaccauccuggcacagauaaagaccagauuuuucuuuaugcccaagcuagcggccguaucacuguguccaccaagagaucacagcagacaguaauaccaaauauugggagcaggccccggguucgcaacaucccuaguagaauuucuaucuacuggaccaucgugaaaccaggagauauucugcuaauaaauuccacggguaaccucaucgccccgaggggcuacuucaagauucggagcgggaaaucgucuaucaugcgcuccgacgcgcccauaggaaaguguaauucagaaugcauuacuccuaacggcaguaucccaaaugacaagcccuuucagaacgucaaucgaaucacauauggugcauguccuagauacgugaaacaaaacacccugaaacuugccacugggaugaggaaugugccagagaagcagacacggggaauuuucggcgcuaucgccggcuuuauugaaaacgggugggagggaauggucgaugguugguauggcuuccgucaccagaauagcgaggggcgcggacaagcagcugaccugaaguccacccaggccgcgauagaucagaucaacggcaaauugaauagacucauugguaagacgaacgaaaaauuccaccagaucgagaaggaauuuucugagguugaagggaggauccaagaccuggagaaguacguggaggauaccaaaauugacuuauggagcuauaacgccgaacugcucguagcacuugagaaucagcauacaauagaucugacugacucagaauugaacaagcuauucgagaaaaccaagaaacagcugcgggaaaaugcugaggauaugggcaacggaugcuuuaagaucuaccacaagugugacaaugccugcauuggcaguauccgaaacgggacauaugaucaugacguguaccgcgacgaggcucucaauaacagauuccagauuaaaggagucgaacugaaguccgguuacaaagauuggauccuuuggauaucuuuugccaucucuugcuuccuguuguguguggcacuccugggcuuuauuaugugggccugccaaaaggggaauaucagguguaacauuugcaucuga

SEQ ID NO: 139140 - RNA, 1701 nt, Artificial Sequence
  derived and/or modified CDS sequence (opt3) from hemagglutinin__InfluenzaA__AHJ57437
augaagaccaucauugcccugagcuacauacucugccuuguguucgcucagaaacugcccggcaacgacaauuccacagcaacuuuguguuuagggcaccaugccgucccuaacggaacgaucguuaagaccauuacaaaugaucaaaucgaggugacuaacgcgaccgaacugguacaaaauucuucaacaggugagauuugcgacaguccacaccagauccuagauggcgaaaacuguacccucauagacgcucugcuuggggauccgcagugcgacggauuucagaauaaaaagugggaucuguucguggagagaagcaaagccuauuccaacuguuaccccuaugacgucccugauuacgcaucuuugaggucgcucguggccucaagcggcacucuggaauuuaauaacgagaguuucaauuggacagguguuacccagaacgggacguccucugcuugcauccggcgcagcaauuccucauuuuucagucgacugaacuggcucacucauuuaaauuuuaaguauccagcacugaacgugaccaugcccaacaaugagcaguucgacaaacuuuacauuuggggaguccaccauccuggcacagauaaggaccagaucuuuuuguaugcccaaagcucuggccguauuacuguguccaccaagagaucacagcagacaguaaucccaaacauagggagcaggccccggguucgcaauauuccuaguagaaucucuauuuacuggaccaucgugaaaccaggagauauccugcuaauuaacuccacggguaaucucauagcuccgaggggcuacuucaagauccggagcgggaaaucgucuauuaugcgcuccgacgcccccaucggaaaguguaacucagaaugcauaacuccuaauggcaguauuccaaacgacaagcccuuucagaaugucaaccgaaucacauauggugcguguccuagauacgugaaacaaagcacccugaaacuugcaacugggaugaggaaugugccagagaagcagacacggggaaucuucggcgccauugcuggcuuuaucgaaaacgggugggagggaauggucgaugguugguauggcuuccgucaccaaaauuccgaggggcgcggacaggccgcagaccugaagucuacccaggcugccauugaucagauaaacggcaaauugaauagacucaucgguaagacgaacgaaaaauuccaccagauugagaaggaauuuagcgagguugaagggaggauccaagaccuggagaaguacguggaggauaccaaaaucgacuuauggucauauaacgcggaacugcucguagcccuugagaaucagcauacaauugaucugacugacagugaaaugaacaaguuguucgagaaaaccaagaaacagcuaaaggaaaaugcagaggauaugggcaacggaugcuuuaagauauaccacaaaugugacaaugcuugcaucggcuccauucggaacgggacauaugaucaugacguguaccgagacgaggcccugaauaaccgcuuccagaucaagggagucgaacucaaaagcgguuacaaggauuggauucuguggaucucuuuugcuauaucaugcuuccuucuguguguggccuugcucggcuuuaucaugugggcaugccaaaaagggaauauuagauguaacaucugcauuuga

SEQ ID NO: 139141 - RNA, 1701 nt, Artificial Sequence
  derived and/or modified CDS sequence (opt3) from hemagglutinin__InfluenzaA__AHJ57438
augaagaccaucauugcccugagcuacauacucugccuuguguucgcucagaaacugcccggcaacgacaauuccacagcaacuuuguguuuagggcaccaugccgucccuaacggaacgaucguuaagaccauuacaaaugaucaaaucgaggugacuaacgcgaccgaacugguacagaauagcucaacaggugagauuugcgacaguccacaccagauccuagauggcgaaaacuguacccucauagacgcucugcuuggggauccgcagugcgacggauuucaaaauaaaaagugggaucuguucguggagagaagcaaagccuauuccaacuguuaccccuaugacgucccugauuacgcaucuuugaggucgcucguggccucaagcggcacucuggaauuuaauaacgagaguuucaauuggacagguguuacccagaacgggacguccucugcuugcauccggcgcagcaauuccucauuuuucagucgacugaaguggcucacucauuuaaacuuuaaguauccagcacugaaugugaccaugcccaacaacgagcaguucgacaaacuuuacauuuggggaguccaccauccuggcacagauaaggaccagaucuuuuuguaugcccaagcuagcggccguauuacugugucuaccaaaagaucccagcaggccguaaucccaaauauagggucaaggccccggauucgcaacaucccuagcagaauuaguaucuacuggacaaucguuaagccaggagauauucugcuaauaaauucuaccgguaaccucaucgcgccgaggggcuacuucaaaauucgguccgggaagucuucgaucaugcgcucugacgcacccauaggaaaguguaauuccgaaugcauuacgccuaacggcucaaucccaaaugacaaacccuuucagaacgugaaucgaaucacuuauggugauuguccuagauacgucaagcaaaguacacugaaacuugccaccgggaugaggaacgugccagagaagcagacucggggaauuuucggcgcuaucgccggcuuuauugaaaaugggugggagggaaugguggacgguugguauggcuuccgucaccagaacagcgaggggcgcggacaagcagcugaucugaaauccacacaggccgcgauagaccagaucaauggcaaguugaacagacucauugguaaaaccaaugaaaaguuccaccagaucgagaaggaauuuucugaggucgaagggaggauccaagaucuggagaaauacguugaggacacgaagauugauuuauggagcuauaacgccgaacugcucguggcacuugagaaccagcauaccauagaccugacagauucagaaaugaauaaauuguucgagaagacuaaaaagcagcuacgggaaaacgcugaggacaugggcaauggaugcuuuaagaucuaccacaaaugugauaacgccugcaccggcaguauucgaaaugggacauaugaccaugacguauaccgcgaugaggcucugaacaauagauuccagaucaagggaguggaagucaaauccgguuacaaggacuggauucucuggaucagcuuugccauaucuugcuuccugcuuuguguggcacuguugggcuuuaucaugugggccugccaaaaagggaacauuagguguaauaucugcauuuga

SEQ ID NO: 139142 - RNA, 1701 nt, Artificial Sequence
  derived and/or modified CDS sequence (opt3) from hemagglutinin__InfluenzaA__AHJ57651
augaucgccuucauugugauagcuauccuggcagccaccggcaagagcgacaaaauuugcaucggguaccacgcgaacaauuccacaacuaaggucgauacgauucucgagaaaaacguuaccgugacacauucuguagaacuucuggagaaucagaaggaagagagauuuuguaaaaucucaaacaaggcucccuuggacuuaagggauugcacucuggaaggauggauacuagguaauccucgguguggcauccuccuggccgaccaaaguuggagcuauauuguggagcgcccaaacgcacgaaaugggaucugcuacccgggaacccuuaacgaggucgaggaacugaaggccuugauuggcuccggugaacguguggagagauucgagauguuucccaaaucuacaugggcugggguugauaccgacucgggagugucaagcgcauguccucucggcaauggcccaaguuucuauaggaaccugcuguggaucauaaagcucaaauccucugaauaccccgucauucgggggacuuuuaauaacacaggagauaagagcaucuuauauuucuggggugugcaccauccuccaguaaccacggagcaggaagcccuguacggcuccggggaccgcuauguuagaaugggaacugagucaaugaauuuugcuaggagucccgaaauugccgcgcggccugcagugaacggccagcgcggucgaaucgauuacuucuggagcauccuuaaaccaggggagaccuugaaugucgagucuaacggaaaccugauugccccgugguacgcuuauagauuugugaauaaggacuccaagggcgccauauucaggucaacacuacccaucgaaaacugcgaugcaacuugucagaccacagagggcgugauucggaccaauaaaacguuucaaaacgucagcccucucuggaucggggaaugcccaaaguacguuaaaaguaagucucugcgucuugcuacuggacugcgcaaugugccccagauagagacaagagguuuguucggcgccauugcgggguuuaucgaaggaggcuggaccgguaugaucgacgggugguauggcuaccaccaugagaacucccagggaagcggcuaugccgcagauagggagucgacucagaaagcuauugacgggaucacaaauaagguaaacucuauuauagacaaaaugaauacccaauucgaagccgugggacacgaguucuccaaccucgaacggcgaaucgauaaucugaacaagcgcauggaggacgguuuucuugaugucuggacguacaaugcugaacugcucgugcuucuggagaacgagagaaccuuggacaugcacgaugccaauguuaagauucuauaugaaaaagugaggucacagcugcgggacaacgcaaaggaucucggcaacggguguuucgaguuuuggcauaaaugcgacaaugaauguaucgagagugucaagaacggaacauacaauuacccuaaauaucagagcgagucccgccugaacagacagacuaucgaaucugugaaguuagagaaucugggcguauaccaaauuuuggccauauauagcaccguuucaaguucccucgugcuggucgguuuaauccuggcuauggggcuauggaugugcagcaacggcucuaugcagugcaggauuuguaucuga

SEQ ID NO: 139143 - RNA, 1701 nt, Artificial Sequence
  derived and/or modified CDS sequence (opt3) from hemagglutinin__InfluenzaA__AHJ57663
augaucgccuucauugugauagcuacccuggucgcaacaggcaagagcgacaaaaucugcauuggguaccacgccaacaauuccacuacgaagguugauaccauccucgagaaaaacgugacaguaacucauucuguggaacuucuggagaaucagaaggaagagagauuuuguaaaauuucaaacaaggcgcccuuggacuuaagggauugcacccuggaaggauggauccuagguaauccucgguguggcauacuccuggcugaccaaaguuggagcuauaucgucgagcgcccaaacgcccgaaaugggauuugcuacccgggaacacuuaacgaggcagaggaacugaaggccuugaucggcuccggugaacguguggagagauucgagauguuucccaaaucuaccuggacugggguugauacagaaucgggagugucaagcgcuuguccucucggcaauggcccaaguuucuauaggaaccugcuguggauuaucaagcucaaauccucugaguaccccgucauacgggggaccuuuaauaacacgggagacaagagcauuuuauauuucuggggugugcaccauccuccaguaacuaccgaacagaaugcacuguacggcuccggggaucgcuauguuagaaugggaacagagucaaugaacuuugccaggagucccgaaaucgcugcccggccugcggugaauggccagcgcggucgaauugacuacuucuggagcauccuuaaaccaggggagacuuugaacgucgagucuaacggaaaucugaucgcaccgugguacgccuauagauuugugaacaaggauuccaagggcgcuauuuucaggucaaaucuacccauagaaaacugcgacgccaccugucagacaaccgagggcgugauccggacgaauaaaacuuuucaaaacgucagcccucucuggauuggggaaugcccaaaguacguuaaaaguaagucucugcgucuugcaacaggacugcgcaaugugccccagaucgagaccagagguuuguucggcgcuauagccggguuuauugaaggaggcuggacugguaugaucgaugggugguauggcuaccaccaugagaacucccagggaagcggcuaugcggccgacaaagagucgacacagaaggcaaucgaugggauuaccaauaaaguaaacucuaucauugacaagaugaauacgcaauucgaagcugugggacacgaguucuccaaccucgaaaggcggauagacaaucugaacaagcgaauggaggaugguuucuuagacgucuggaccuacaaugccgaacugcucgugcuucuggagaacgagcgcacauuggaucuacacgacgcuaacguuaaaaaucugcaugaaagagugaagucacagcucagggauaacgccaaugaccugggcaacggguguuucgaguuuuggcacaaaugcgauaaugaauguauggagagugucaagaacggaacuuauaauuacccuaaauaccaggcagagagccggcuuaacaagcagaagaucgaauccgugaaacuggaggaauuuggcguauaucaaauuuuggccaucuacucuaccguuagcucaagucucgugcuggucgguuuaaucauggcuauggggcuguggaugugcccaaauggcuccaugcagugccgcauuuguauauga

SEQ ID NO: 139144 - RNA, 1701 nt, Artificial Sequence
  derived and/or modified CDS sequence (opt3) from hemagglutinin__InfluenzaA__AHJ57674
augaucgccuucauugugauagcuauccuggucaccacaggcaagagcgacaaaauuugcaucggguaccacgcaaacaauuccacuacgaagguugauaccauucucgagaaaaacgugacaguaacucauucuguggaacuucuggagaaucagaaggaagagagauuuuguaaaaucucaaacaaggcccccuuggacuuaagggauugcacccuggaaggauggauacuagguaauccucgguguggcauccuccuggcggaccaaaguuggagcuauauugucgagcgcccaaacgcucgaaaugggaucugcuacccgggaacacuuaacgagguggaagaacugaaggccuugauuggcuccggugaacguguugagagauucgagauguuucccaaaucuaccugggcagggguggauacuaauucgggagucucaagcgccuguccucucggcgaaggcccaaguuucuauaggaaccugcuguggaucauaaagcacacaaccuccggguaccccgugauuaaaggaacguaucggaauacuggugacaagucuguacucuacuuuuggggcguucaucacccuccagauaccacagagcagaacguguuauaugggagcggaaaucgcuacgucagaaugggcacugaauccaugaacuucgcuaggucacccgagaucgcagcccggccugcugugaauggucagcgcgggcgaauugacuacuuuuggaguauccugaaaccaggagaaacccuuaacguggagagcaacggcaauuugaucgccccgugguaugcguacagauucgucaacaaggauucuaagggcgcaauuuuuagguccaaucugcccauagagaacugcgacgccacaugucagaccacggaagggguuauccggacuaauaaaacauuccaaaacgugucaccucuauggauuggagagugcccaaaguauguaaaaagcaagagucuccgucuggcuaccggucuucgcaaugugccccagaucgaaacuagaggccuguuuggggccauagcaggauucauugagggcgguuggacagggaugaucgauggcugguacggauaucaucacgaaaacucucagggcuccggguacgcugccgacagggagagcacccagaaagcgaucgauggaauuacgaauaaggucaacucgaucauugacaaaaugaauacccaauuugaggccgugggucacgaguucucuaacuuggagcggcgaauagacaaucucaacaagcgcauggaagauggcuuccuggacguuuggacauauaaugcagaguuacuggugcuccuugaaaacgagagaacucuggauuugcaugacgcuaacgucaagaaucuacacgagagggugcggucccagcugcgcgauaacgccaaugaccucgggaacggauguuuugaguucuggcauaaaugcgauaaugaauguauggaaucaguaaagaacggcaccuacaauuacccuaaauaucaggcugagaguagacugaacaggcagaagaucgagagcguuaaacuugaagaguuugguguguaccaaauucuggccaucuauuccacagucucuagcucauuggugcucgucgggcugaucauggcaaugggcuuauggaugugcaguaauggauccaugcagugccguauuuguauauga

SEQ ID NO: 139145 - RNA, 1701 nt, Artificial Sequence
  derived and/or modified CDS sequence (opt3) from hemagglutinin__InfluenzaA__AHJ57686
augaucgccuucauugugauagcuauccuggcagccaccggcaagagcgacaaaauuugcaucggguaccacgcgaacaauuccacaacuaaggucgauacgauucucgagaaaaacguuaccgugacacauucuguagaacuucuggagaaucagaaggaaggaagauuuuguaaaaucucaaacaaggcucccuuggacuuaagggauugcacucuggaggguuggauacuaggcaauccucggugugggauccuccuggccgaccaaaguuggagcuauauuguggaacgcccaaacgcacgaaauggaaucugcuacccgggcauucuuaacgaggccgaggaacugaaggcuuugaucgguuccggggagcgugucgaaagauucgagauguuucccaaaucuaccugggcaggaguggauacaaauucgggcguuucaagcgccuguccucucggcaacgggccaaguuucuauaggaaucugcuguggauaauuaagcucaaauccucugcuuaccccgugauccggggaaccuuuaacaauacuggugacaagagcauuuuauauuucuggggcguccaccauccuccaguggccacagagcaggaagcgcuguacggguccggaaaccgcuauguaagaaugggcaccgagucaaugaauuuugcaaggaaccccgaaaucgccgcucggccugccguuaacggucagcgcgggcgaaucgauuacuucuggaguauucuuaaaccaggagagacguugaauguggaaagcaacggcaaucugauagcaccgugguacgcuuauagauuugucaacaaggacucuaagggcgccaucuucagguccaaucuacccauugagaacugcgaggcgacuugucagaccacagaaggggugauccggacuaauaaaaccuuucaaaacgugucaccucucuggauaggagagugcccaaaguacgucaaaagcaagagucugcgucuugccacaggucugcgcaauguuccccagauugaaaccagaggcuuguucggggcaaucgcuggauuuaucgagggcgguuggacggggaugauugauggcugguauggauaccaccaugaaaacucucagggcuccggguaugccgcugacagggagagcacucagaaagccaucgauggaauuacaaauaaggugaacucgauaaucgacaaaaugaauacccaauucgaggcaguaggucacgaguucucuaaccucgaacggcgaauugauaaucugaacaagcgcauggaagacggcuuuuuagacguguggacuuacaacgccgagcugcucguccuucuggaaaaugagagaacauuggaucuacacgacgcuaacgugaagaaucugcaugagaaaguuaggucccagcuccgggauaacgcgaaugaccuggggaacggauguuucgaauuuuggcacaagugcgauaaugaguguauggaaucagugaaaaacggcaccuaugacuacccuaaguaccaggcagagagucgccuuaauagacagaaaaucgagagcgucaagcuggaaaacuucgauguguaucaaaucuuggccauuuacuccacgguaucuagcucacucguucugguggguuuaauaauggcuauggggcuguggaugugcaguaauggcuccaugcagugcaggaucuguauuuga

SEQ ID NO: 139146 - RNA, 1701 nt, Artificial Sequence
  derived and/or modified CDS sequence (opt3) from hemagglutinin__InfluenzaA__AHJ57697
augaucgccuucauugugauagcuauccuggcagccaccggcaagagcgacaaaauuugcaucggguaccacgcgaacaauuccacaacuaaggucgauacgauucucgagaaaaacguuaccgugacacauucuguagaacuucuggagaaucagaaggaagagagauuuuguaaaaucucaaacaaggcucccuuggacuuaagggauugcacucuggaaggauggauacuagguaauccucgguguggcauccuccuggccgaccaaaguuggagcuauauuguggagcgcccaaacgcacgaaaugggaucugcuacccgggaacccuuaacgaggucgaagaguuaaaggccuugauuggcuccggugaacguguggagagauucgagauguuucccaaaucuacaugggcugggguugauaccaauucgggagugucaagcgcauguccucucggcaacggcccaaguuucuauaggaaucugcuguggaucauaaagcucaaauccucugaauaccccgucauucgggggacuuuuaacaauacaggagacaagagcaucuuauauuucuggggugugcaccauccuccaguaaccacggagcaggaagcccuguacggcuccggggaucgcuauguuagaaugggaacugagucaaugaacuuugcuaggagucccgaaauugccgcgcggccugcagugaauggccagcgcggucgaaucgacuacuucuggagcauccuuaaaccaggggagaccuugaacgucgagucuaacggaaaucugauugccccgugguacgcuuauagauuugugaacaaggauuccaagggcgccauauucaggucaaaucuacccaucgaaaacugcgacgcaacaugucagacuaccgagggcgugauucggacaaauaaaaccuuucaaaacgucagcccucucuggaucggggaaugcccaaaguacguuaaaaguaagucucugcgucuugcuacgggacugcgcaaugugccccagauagagacuagagguuuguucggcgccauugcgggguuuaucgaaggaggcuggacagguaugaucgaugggugguauggcuaccaccaugagaacucccagggaagcggcuaugccgcagacagggagucgacccagaaagcuauugaugggaucacuaauaagguaaacucuauuauagacaaaaugaauacacaauucgaagccgugggacacgaguucuccaaccucgaacggcgaaucgacaaucugaacaagcgcauggaggaugguuuucuggacgucuggaccuacaaugcugaacugcucgugcuucuggagaacgagagaacguuggaucuacacgacgccaacguuaagaaucugcaugaaaaagugaagucacagcucagggauaacgcaaaugaccugggcaacggguguuucgaguuuuggcacaaaugcgauaaugaauguauggagagugucaagaacggaaccuaugacuacccuaaauaccaggccgagagccggcuuaaucgccagaagauugaauccgugaagcuggagaacuucgauguauaucaaaucuuggcuaucuacucuacaguuagcucaagucucgugcuggucggcuuaauuauggcgaugggucuguggaugugcuccaaugggagcaugcagugcagaauauguaucuga

SEQ ID NO: 139147 - RNA, 1701 nt, Artificial Sequence
  derived and/or modified CDS sequence (opt3) from hemagglutinin__InfluenzaA__AHJ57707
augaucgccuucauugugauagcuauccuggucaccacaggcaagagcgacaagauuugcguuggguaccacgcaaacaauuccacuacgaagguggauaccauccucgagaaaaacguaacagugacucauucugucgaacuucuggagaaucagaaggaagagagauuuuguaaaauuucaaacaaggcccccuuggacuuaagggauugcacccuggaaggauggauccuagguaauccucgguguggcauacuccuggcggaccaaaguuggagcuauaucguggagcgcccaaacgcucgaaaugggauuugcuacccgggaacacuuaacgagguugaagaacugaaggccuugaucggcuccggugaacguguggagagauucgagauguuucccaaaucuaccuggacuggggucgauacaaauucgggagugucaagcgcauguccucucggcgaaggcccaaguuucuauaggaaccugcuguggauuaucaagcacaccacguccggguaccccguaauaaaaggaacuuaucggaauaccggugacaagucuguucucuacuuuuggggcgugcaucacccuccagauacaacugagcagaacgucuuauaugggagcggaaaucgcuacgugagaaugggcaccgaauccaugaacuucgccaggucacccgagauugcugcacggccugccgugaauggucagcgcgggcgaaucgacuacuuuuggaguauucugaaaccaggagaaacacuuaacgucgagagcaacggcaauuugaucgcuccgugguaugccuacagauucguuaacaaggauucuaagggcgcgaucuuuagguccaaucugcccauugagaacugcgacgcaaccugucagacgacugaaggggugauacggacaaauaaaaccuuccaaaacguaucaccucuauggaucggagagugcccaaaguaugugaaaagcaagagucuccgucuggccacuggucuucgcaaugucccccagauugaaacaagaggccuguuuggggcuaucgccggauucauagagggcgguuggaccgggaugauugauggcugguacggauaucaucacgaaaacucucagggcuccggguacgcagcugacagggagagcacgcagaaagccaucgauggaaucaccaauaaggugaacucgauuaucgacaaaaugaauacacaauuugaggcgguuggucacgaguucucuaacuuggagcggcgaauugacaaucucaacaagcgcauggaagauggcuuccuggacguguggacuuauaaugccgaguuacugguccuccuugaaaacgagagaacccuggauuugcaugacgcaaacgugaagaaucuacacgagaggguacggucccagcugcgcgauaacgcuaaugaccucgggaacggauguuuugaguucuggcauaaaugcgauaaugaauguauggaaucaguuaagaacggcacauacaauuacccuaaauaucaggccgagaguagacugaacaagcagaaaauagagagcgugaaacuugaagaguuuggugucuaccaaauccuggcuauuuauuccacugugucuagcucauugguccucguggggcugaucauggccaugggcuuauggaugugcaguaauggauccaugcagugcaggaucuguauuuga

SEQ ID NO: 139148 - RNA, 1701 nt, Artificial Sequence
  derived and/or modified CDS sequence (opt3) from hemagglutinin__InfluenzaA__AHJ57719
augaucgccuucauugugauagcuauccuggcagccaccggcaagagcgacaaaauuugcaucggguaccacgcgaacaauuccacaacuaaggucgauacgauucucgagaaaaacguuaccgugacacauucuguagaacuucuggagaaucagaaggaagagagauuuuguaaaaucucaaacaaggcucccuuggacuuaagggauugcacucuggaaggauggauacuagguaauccucgguguggcauccuccugagugaccaaagcugguccuauauuguggagcgcccaaacgcccgaaaugggaucugcuacccgggcauucuuaacgaggcagaagaacugaaggccuugaucggaucuggugaacgugucgagagauucgagauguuucccaaaucgaccugggcugggguggauacaaauucaggaguuagcagugcauguccucucggcaacggcccauccuucuuuaggaaucugcuguggauaauuaagcucaaaucuagcaccuaucccgugauccgggggacuuucaacaauacaggagacaaguccauuuuauacuuuugggguguccaccauccuucagugaccacggaacaggaggcccuguauggcagugggaaccgcuacguaagaaugggaacugaaagcaugaauuucgcuaggucuccagagaucgccgcgcggcccgcaguuaacggccagcgcggucgaaucgauuauuuuugguccauucuuaaaccuggggaaaccuugaacguggagucaaauggaaaccugauagccccaugguacgcuuacagauucgucaauaaggacagcaagggcgccaucuuuaggaguaaccuaccgauugagaauugcgaugcaacaugucagacuaucgaaggcgugauacggaccaacaaaacauuccaaaaugugucuccccucuggauuggggagugcccuaaguaugucaaauccaagagccugcgucuugcuaccggacugcgcaacguuccacagaucgaaacgagagguuuguuuggcgccaucgcgggguucauugagggaggcuggacugguaugaucgacgggugguacggcuaucaccaugaaaauucgcagggaucuggcuacgccgaugacaaagaguccacacagaaggcaauugaugggauaaccaacaaaguaaauucaaucauugacaagaugaacacucaauucgaggcugugggacacgaauuuaguaaucucgagaggcggaucgacaaccugaauaagcgaauggaagaugguuucuuagacguguggacauauaacgccgagcugcucguccuucuggaaaacgagcgcaccuuggaucuacacgacgcuaaugugaaaaaccugcaugagaagguuagaagccagcucagggauaaugccaacgaccugggcaauggguguuuugaguucuggcacaaaugcgauaacgaguguauggaauccgugaagaauggaacguacgacuaucccaaauaccaggcagagucucggcuuaaccgccagaagaucgagagcgucaagcuggaaaauuuugauguguaccaaauuuuggccauauauucaaccguaaguuccagccucguucuggugggcuuaaucauggcuaugggucuguggaugugcucuaacgggucaaugcagugcagaauuuguaucuga

SEQ ID NO: 139149 - RNA, 1701 nt, Artificial Sequence
  derived and/or modified CDS sequence (opt3) from hemagglutinin__InfluenzaA__AHJ57731
augaucgccuucauugugauagcuauccuggcagccaccggcaagagcgacaaaauuugcaucggguaccacgcgaacaauuccacaacuaaggucgauacgauucucgagaaaaacguuaccgugacacauucuguagaacuucuggagaaucagaaggaagagagauuuuguaaaaucucaaacaaggcucccuuggacuuaagggauugcacucuggaaggauggauacuagguaauccucgguguggcauccuccuggccgaccaaaguuggagcuauauuguggagcgcccaaacgcacgaaaugggaucugcuacccggguauucuuaacgaggccgaggaacugaaggcuuugaucggcuccggugaacgugucgagagauucgagauguuucccaaaucuaccugggcagggguggauacagacucgggaguuucaagcgccuguccucucggcaauggcccaaguuucuauaggaaccugcuguggauaauuaagcucaaauccucugaauaccccgugauccgggggaccuuuaauaacacuggagauaagagcauuuuauauuucugggguguccaccauccuccagugacaaccgagcaggaagcucuguacggcuccgggaaucgcuauguaagaaugggaacggagucaaugaacuuugccaggagucccgaaaucgcggcacggccugccguuaauggccagcgcggucgaaucgacuacuucuggagcauucuuaaaccaggggagacuuugaacguggagucuaacggaaaucugauagcuccgugguacgccuauagauuugucaacaaggauuccaagggcgcaaucuucaggucaaaucuacccauugaaaacugcgacgcuaccugucagacaacugagggcgugauccggaccaauaaaacauuucaaaacgugagcccucucuggauaggggaaugcccaaaguacgucaaaaguaagucucugcgucuugccaccggacugcgcaauguuccccagauugagacgagagguuuguucggcgcgaucgccggguuuaucgaaggaggcuggacugguaugauugaugggugguauggcuaccaccaugagaacucccagggaagcggcuaugcagcugacagggagucgacacagaaagccaucgaugggauuaccaauaaggugaacucuauaaucgacaaaaugaauacucaauucgaagcuguaggacacgaguucuccaaccucgaacggcgaauugacaaucugaacaagcgcauggaggauggauuuuuagacguguggacauacaaugccgaacugcucguccuucuggagaacgagagaaccuuggaucuacacgacgcaaacgugaagaaucugcaugaaaaaguuaggucacagcuccgggauaacgccaaugaccugggcaacggguguuucgaguuuuggcacaagugcgauaaugaauguauggagagugugaaaaacggaacguaugacuacccuaaguaccagaccgagagccgccuuaauagacagaaaaucgaauccgucaagcuggagaacuucgauguguaucaaaucuuggcuauuuacucuacaguaagcucaagucucguucuggugggcuuaauaauggcgaugggucuguggaugugcuccaaugggagcaugcagugcaggaucuguauuuga

SEQ ID NO: 139150 - RNA, 1701 nt, Artificial Sequence
  derived and/or modified CDS sequence (opt3) from hemagglutinin__InfluenzaA__AHJ57743
augaucgccuucauugugauagcuauccuggucgcaaccggcaagagcgacaagauuugcaucggguaccacgccaacaauuccacaacuaagguugauacgauucucgagaaaaacgugaccguaacacauucuguggaacuucuggagaaucagaaggaagagagauuuuguaaaaucucaaacaaggcgcccuuggacuuaagggauugcacuauagaaggauggauccuggguaauccucgguguggcauucuacucgcugaccaaaguuggagcuauaucgucgagcgcccagaugcccgaaacgggauuugcuacccgggaacccugaaugaggcagaagaacuuaaggcccugaucggcuccggugaaaaaguggagcguuucgagauguuucccaagucuacaugggcugggguugacaccucgucaggagugagcagugcauguccuuugggcaacggcccauccuucuauagaaaucuccuguggauaauuaaacugaagucuagcgaauaccccgucaucagggggacuuuuaacaauacaggagauaaauccgugcucuauuucugggguguacaccauccuccaguuaccacggagcagaacgccuuauacggcucagggaaucgguaugugcgcaugggaacugaaaguaugaacuuugcuagaagccccgagauugccgcgaggccugcagucaauggccagcggggucgcaucgacuacuucuggucuauccugaagccaggggaaacccuuaacguggaguccaacggaaauuugauugccccgugguacgcuuaucgauuugugaacaaggauucaaaaggcgccauauucagaagcaaucugcccaucgagaacugcgacgcaacaugucagacuauugaaggcgucaucaggaccaauaagacauuucaaaacguuaguccucuauggauaggggagugcccaaaauacgugaagucuaaaucccuccggcuggcuaccggacuucguaauguaccccagauugaaacgcgcggucuguucggcgccaucgcgggguuuaucgagggaggcuggacugguaugauugaugggugguauggcuaccaccaugaaaacagccagggaucgggcuaugccgcagacagagagucuacacagaaggcuaucgaugggauuaccaauaaagugaacuccauaaucgacaagaugaauacucaauucgaggccgcuggacacgaguucucaaacuuggagaggcggauugacaaucucaacaagcgaauggaagaugguuuucuggacgucuggacauacaaugccgaguuacuggugcuccuugaaaacgagcgcacccuggauuugcacgacgcaaacguuaaaaaucuacaugagaaggugaaaagucagcugagagauaacgccaaugaccucggcaacggguguuucgaauuuuggcacaagugcgauaaugaguguauggaaagcgucaaaaacggaacguaugacuacccuaaguaccagaaggaguccaggcugaaucggcagaaaaucgagucugugaaacuugaaaacuucgauguauaucaaauccuggcuauuuacagcaccguuucaaguuccuuggugcucgucggccugauaauggcgauggguuuauggaugugcagcaaugggucuaugcagugccgcaucuguauuuga

SEQ ID NO: 139151 - RNA, 1701 nt, Artificial Sequence
  derived and/or modified CDS sequence (opt3) from hemagglutinin__InfluenzaA__AHJ57755
augaucgccuucauugugauagcuauccuggucgcaaccggcaagagcgacaaaauuugcaucggguaccacgccaacaauuccacaacuaagguugauacgauucucgagaaaaacgugaccguaacacauucuguggaacuucuggagaaucagaaggaagagagauuuuguaaaaucucaaacaaggcgcccuuggacuuaagggauugcacuauagaaggauggauccuggguaauccucggugugacauucuacucgcugaucaaaguuggagcuauaucgucgagcgcccaaacgcccgaaauggcauuugcuacccggggacccugaacgaggcagaagaacuuaaggcccugaucggauccggcgaagguguggagcguuucgagauguuucccaaaucuacauggguugggguggacaccucgucaggagucagcagugcuuguccuuugggcaauggcccauccuucuauagaaaccuccuguggauaauuaagcugaaaucuagcgaauaccccgugaucagggggacuuuuaauaacacaggagauaaguccguacucuauuucugggguguucaccauccuccagugaccacggagcagaaugcauuauacggcucagggaaccgguauguccgcaugggaacugaaaguaugaauuuugccagaagccccgagauugcugccaggccugcggugaacggccagcggggucgcaucgacuacuucuggucuauccugaaaccaggggaaacccuuaacguggaguccaauggaaacuugauugcaccgugguacgccuaucgauuugucaauaaggauaacaagggcgcuauauucagaucaaaucugcccaucgagaacugcgacgccacaugucagacuaccgaaggcguuauuaggacaaauaaaaccuuucaaaacgugagcccucuauggaucggggagugcccaaaguacguaaaaaguaagucucuccggcuggcaacgggacuucguaaugugccccagauagaaacucgcggucuguucggcgcuauugccggguuuaucgagggaggcuggacagguaugaucgaugggugguauggcuaccaccaugaaaacucccagggaagcggcuaugcggccgacagagagucgacccagaaagcaauugaugggaucacuaauaaggucaacucuauuauagacaaaaugaauacacaauucgaggcugccggacacgaguucuccaacuuggagaggcggaucgacaaucucaacaagcgaauggaagaugguuuucuggacguguggaccuacaacgcugaguuacugguucuccuugaaaaugagcgcacgcuggauuugcacgacgccaacgugaagaaucuacaugagaaagucaagucacagcugagagauaacgcaaaugaccucggcaacggguguuucgaauuuuggcacaaaugcgauaaugaguguauggaaagugugaagaacggaaccuaugacuacccuaaauaccagaaggagagcaggcugaaucggcagaagauugaguccguaaaacuugaaaacuucgauguuuaucaaauccuggccaucuacucuacagugagcucaaguuuggucguggucggccucauuauggcuaugggucuguggaugugcuccaaugggagcaugcagugccgcauauguaucuga

SEQ ID NO: 139152 - RNA, 1701 nt, Artificial Sequence
  derived and/or modified CDS sequence (opt3) from hemagglutinin__InfluenzaA__AHJ57767
augaucgccuucauugugauagcuauccuggcagccaccggcaagagcgacaaaauuugcaucggguaccacgcgaacaauuccacaacuaaggucgauacgauucucgagaaaaacguuaccgugacacauucuguagaacuucuggagaaucagaaggaagagagauuuuguaaaaucucaaacaaggcucccuuggacuuaagggauugcacucuggaaggauggauacuagguaauccucgguguggcauccuccuggccgaccaaaguuggagcuauauuguggagcgcccaaacgcacgaaaugggaucugcuacccgggaacccuuaacgaggucgaagaguuaaaggccuugauuggcuccggugaacguguggagagauucgagauguuucccaaaucuacaugggcugggguugauaccaauucgggagugucaagcgcauguccucucggcaacggcccaaguuucuauaggaaucugcuguggaucauaaagcucaaauccucugaauaccccgucauucgggggacuuuuaacaauacaggagacaagagcaucuuauauuucuggggugugcaccauccuccaguaaccacggagcaggaagcccuguacggcuccggggaucgcuauguuagaaugggaacugagucaaugaacuuugcuaggagucccgaaauugccgcgcggccugcagugaauggccagcgcggucgaaucgacuacuucuggagcauccuuaaaccaggggagaccuugaacgucgagucuaacggaaaucugauugccccgugguacgcuuauagauuugugaacaaggauuccaagggcgccauauucaggucaaaucuacccaucgaaaacugcgacgcaacaugucagacuaccgagggcgugauucggacaaauaaaaccuuucaaaacgucagcccucucuggaucggggaaugcccaaaguacguuaaaaguaagucucugcgucuugcuacgggacugcgcaaugugccccagauagagacuagagguuuguucggcgccauugcgggguuuaucgaaggaggcuggacagguaugaucgaugggugguauggcuaccaccaugaguccagccagggaucgggcuaugccgcagacaaagagucuacccagaaggcuauugaugggaucacuaacaaaguaaauuccauuauagacaagaugaacacacaauucgaagccgugggacacgaguucucaaaucucgaaaggcggaucgacaaccugaauaagcgaauggaggaugguuuucuggacgucuggaccuacaacgcugaacugcucgugcuucuggagaaugagcgcacguuggaucuacacgacgccaacguuaaaaaccugcaugaaaaggugagaagucagcucagggauaaugcaaacgaccugggcaauggguguuucgaguuuuggcacaaaugcaacaaugaauguauggagagcgucaagaacggaaccuaugauuacccuaaauaccagaaggagucccggcuuaaucgccagaagauugaaucugugaaacuggagaacuucgacguauaucaaaucuuggccaucuacagcacaguuucaaguucccucgugcuggucggcuuaauucuggcuaugggucuauggaugugcagcaaugggucuaugcagugcagaauauguaucuga

SEQ ID NO: 139153 - RNA, 1701 nt, Artificial Sequence
  derived and/or modified CDS sequence (opt3) from hemagglutinin__InfluenzaA__AHJ57779
augaucgccauuauaaucauugcuauccugguggcaaccggcaagagcgacaaaauuugcaucggguaccacgccaacaauuccacaacuaaggucgauacgauacucgagaaaaacguuaccgugacacauucuguagaacuucuggaggaccagaaggaagagagauucuguaaaaucucaaauaaggcgcccuuggauuuaagggacugcacuauugaaggauggauccuggguaacccucgguguggcauucuacucgcugaucaaaguuggagcuauaucguggagcgcccaaaugcccgaaacgggauaugcuacccgggaacccugaaugaggcagaagaacuuaaggcccugauuggcuccggugaaggggucgagcguuuugagauguuccccaaaucuacaugggcuggaguggacaccaacucgggcguuucaagcgcauguccuuugggcaaugggccaaguuuuuauagaaaccuccuguggaucauuaagcugaaauccucugaauaccccgugaucaggggaacuuucaauaacacaggugauaagagcguccucuauuuuuggggcgugcaccauccuccaguaaccacggagcagaaugccuuauacggguccggaaaccgguauguucgcaugggcacugaaucaaugaauuucgcuagaagucccgagaucgccgcgaggccugcagugaacggucagcgggggcgcauugacuacuuuuggagcauacugaaaccaggagaaacccuuaacgucgagucuaauggcaacuugaucgccccgugguacgcuuaucgauucgugaauaaggauuccaagggcgccauuuuuagaucaaaccugcccaucgagaauugcgacgcaacaugucagacuaccgaaggggugauaaggacaaacaaaaccuuccaaaaugucagcccucuauggauuggagagugcccaaaguacguuaaaaguaagucucuccggcuggcuacgggucuucguaacgugccccagaucgaaacucgcggccuguuuggggccaucgcgggauucauugagggcgguuggacagggaugaucgauggcugguauggauaccaccaugaaaauucccagggcagcggguaugccgcagacagagagucgacccagaaagcuauugauggaauaacuaacaagguaaauucuaucauugacaaaaugaacacacaauuugaggccgcuggucacgaguucuccaauuuggagaggcggaucgacaaccucaauaagcgaauggaagauggcuuccuggacguguggaccuacaacgccgaguuacugguccuccuugaaaacgagcgcacgcuggauuugcacgacgcaaaugugaagaaccuacaugagaaaguuaagucacagcugagagauaaugccaacgaccucgggaauggauguuuugaguucuggcacaaaugcgauaacgaauguauggaaagugugaagaauggcaccuaugacuacccuaaauaccagaaggagagcaggcugaaccggcagaagaucgaguccgucaaacuugaaaauuuugauguguaucaaauucuggcuauauacucuacaguaagcucaaguuugguucucgugggucugaucauggcgaugggguuauggaugugcuccaacggcagcaugcagugcaugauuuguaucuga

SEQ ID NO: 139154 - RNA, 1701 nt, Artificial Sequence
  derived and/or modified CDS sequence (opt3) from hemagglutinin__InfluenzaA__AHJ57791
augaucgccauuauaaucauugcuauccuggugaccacaggcaagagcgacaaaauuugcaucggguaccacgcaaacaauuccacuacgaaggucgauaccauacucgagaaaaacguuacagugacucauucuguagaacuucuggagaauaagaaagaagagagauucuguaagaucucaaacaaggcccccuuggacuuaagggauugcacccuggaaggauggauucuagguaauccucgguguggcauccuccuggcggaccagaguuggagcuauauuguggagcgcccaaacgcucgaaaugggaucugcuacccgggaacacuuaacgaggucaaagaacugaaggccuugauaggcuccggugagcgugugaaaagauuugaaauguuccccaagucuaccugggcagggguugauacuaauucgggagugucaagcaguuguccucucggcaacggcccauccuuuuauaggaaucugcuguggauuaucaaacacacaaccucuggguaccccgucauuaagggaacguauacuaacaccggugacaagagcgugcucuacuucuggggcauccaucacccuccagauacaacugagcaaaauguauuauauggguccggaaaccgguacguucgcaugggcaccgagucaaugaauuuugccagaagucccgaaaucgcugcaaggccugccgugaacggucagcgggggcgcauugacuacuucuggagcauacugaaaccaggagagacacuuaacgucgaaucuaauggcaacuugaucgcuccgugguaugccuaccgauuugugaauaaggauuccaaaggcgcgauuuucagaucaaaccugcccaucgaggacugcgaugcaaccugucagacgacugaaggggugauaaggacaaauaagaccuuucagaacgucagcccucuauggauuggagagugcccaaaauauguuaagaguaaaucucuccggcuggccacuggucuucguaaugugccccaaaucgagacacgcggccuguucggggcuaucgccggauuuauugaaggcgguuggaccgggaugaucgacggcugguacggauaucaucacgagaacucccagggcagcggguacgcagcugauagagaaucgacgcagaaggccauugacggaauaaccaauaagguaaacucuaucauugacaaaaugaauacacaguucgaggcggugggucacgaauuuuccaacuuggagaggcggaucgauacucucaauaagcgaauggaggacggcuuccuggaugucuggaccuauaacgccgaauuacuggugcuccuugagaaugaacgcacacuggacuugcaugaugcaaacguuaaaaaccuacacgagagagugaagucacaacugagggacaaugcuaacgaucucgggaauggauguuucgaauuuuggcauaaaugcgacaacgaguguauggagagugucaagaauggcacuuacaacuacccuaaguaucaggccgaaagccggcugaauaaacagaagaucgaguccgugaaacuugaagaguucgguguauaccagauucuggcuauauauucuaccguuagcucaaguuuggugcucgucgggcugaucauggccaugguguuauggaugugcuccaacggcagcaugcaaugccgcgucuguauuuga

SEQ ID NO: 139155 - RNA, 1701 nt, Artificial Sequence
  derived and/or modified CDS sequence (opt3) from hemagglutinin__InfluenzaA__AHJ57815
augaucgccuucauuauaaucaccauucuggugacaacuggcaagagcgacaaaaucugcauuggguaccacgcuaacaauuccacgaccaaggucgauacaauccucgagaaaaacguuacugugacccauucuguagaacuucuggagaaucagaaggaagagagauuuuguaggauaucaaacaaagcacccuuggacuuaaaggaaugcacacuggagggauggauccuagguaauccucaaugugaucuccugcuuggcgaccagaguuggagcuauauuguggagcggccaaacgcccgcaaugggaucugcuacccgggaacccugaacgaagucgaggaauugcgagcgcucauuggcuccggugaggggguggagcguuucgaaauguuucccaagucuacuugggcuggaguugauacaaauagaggcgugaccucgucauguccuuucggcagcgggaguuccuuuuauaggaaccugcuguggaucgucaaacacacgacuucuagcuacccagugauaaagggaaccuuccggaauacaggugacaaauccguacucuauuuuuggggcguucaucaccccuucgauacuaacgagcagaauguguuauacgggucaggaaaccgcuaugucagaaugggcaccgaaaguaugaauuuugccagggguccugagguggcagcccggccaguggucaacgggcagcgcggacgaauugacuacuucuggagcauccugaagcccggcgaaacacuuaacauugagucuaauggcaacuugaucgcuccuugguacgcauauagauuuguuaauaaagauuccaagggggccaucuucaggucaaaccugccaauugaggacugcgaugcuaccugucaaacgauagaaggagugauccggacuaauaagacauuucagaacguaagcccgcuauggauuggugagugccccaaauacgugaagagugaaucucuccgucuggccaccggccuucgcaaugucccucagaucgagacuagagggcuguucggagcgauagcaggcuucauugaagguggguggacaggcaugaucgacggaugguauggcuaccaucacgagaacucccaggggagcggauaugccgcugauagggagucgacccaaaaagccaucgacgguauuacgaccaagguuaauucuaucauugacaaaaugaacacacaguuugaagcagugggccacgaguucuccaauuuggaacggcgaauagauaaccucaauaagcgccuggaggacggguuuuuagauguguggacuuacaacgcugaacugcucguccuucuggagaaugagagaaccuuggaccuacaugaugccaacgugaaaaaccugcacgaaaggguacggucacagcuccgcgacaaugcgaacgaucugggaaauggcuguuucgaguuuuggcauaagugcgacaacgaauguauggagaguguuaagaaugguacauauaacuacccaaaauaccaggccgagagcagacuuaauaagcaaaggaucgaauccgugaaacuggagaacuucgaugucuaucagauuuuggcaaucuacucuacugugagcucaagucucguccuggugggguuaauccuggcuaugggccuauggaugugcuccaauggaagcaugcagugccguauuuguauauga

SEQ ID NO: 139156 - RNA, 1701 nt, Artificial Sequence
  derived and/or modified CDS sequence (opt3) from hemagglutinin__InfluenzaA__AHJ57827
augaucgccuucauugugauagcuauccuggucgcaaccggcaagagcgacaaaauuugcaucggguaccacgccaacaauuccacaacuaagguugauacgauucucgagaaaaacgugaccguaacacauucuguggaacuucuggagaaucagaaggaagagagauuuuguaaaaucucaaacaaggcgcccuuggacuuaagggauugcacuauagaaggauggauccuggguaauccucgguguggcauucuacucgcugaccaaaguuggagcuauaucgucgagcgcccaaacgcccgaaaugggauuugcuacccgggaacccugaacgagguggaagaacuuaaggcacugaucggcuccggugaacguguugagagauucgagauguuucccaaaucuacaugggccgggguggauaccaauucgggagucucaagcgcuuguccuuugggcaacggcccaaguuucuauaggaaucuccuguggauaauuaagacuaaauccucugaauaccccgugaucaaggggacauuuaacaauaccggagacaaaagcguacuguauuucugggguguucaccauccuccaucccggaacgagcagaaugugcucuacggcucaggggaucgcuaugucagaaugggaacggaaaguaugaacuuugcaaggagccccgagauugccgcucggccugccgugaacggccagcgcggucgaaucgacuacuucuggucuaucuuaaagccaggggaaacucugaauguggaguccaacggaaaucuuauugcgccgugguacgcauauagauuugucaacaaggauucaaggggcgccauauuccggagcaauuugcccaucgagaacugcgacgcuaccugucagacagccgaaggcguuauucguacuaauaaaaccuuucaaaacgugaguccucuguggaucggggagugcccaaaguacguaaaaucuaagucccuacgccucgcaacaggacugagaaaugugccccagauagaaaccaggggucuuuucggcgcuauugccggguuuaucgagggaggcuggacggguaugaucgaugggugguauggcuaccaccaugaaaacagccagggaucgggcuaugcggccgaccgggagucuacucagaaagcaauugaugggaucacaaauaaggucaacuccauuauagacaaaaugaauacccaauucgaggcugugggacacgaguucucaaaccuggagcgacgcaucgacaauuugaacaagagaauggaagaugguuuucucgacguuuggacuuacaacgccgagcuguuagugcugcucgaaaaugagaggacacuugaucugcacgacgcuaacgucaagaauuugcaugagcgggugaaaagucagcuacgcgauaacgccaaugaccugggcaacggguguuucgaauuuuggcacaagugcgauaaugaguguauggaaagcguuaaaaacggaaccuaugacuacccuaaguaccagaaagaguccagacucaauaggcagaagauugagucuguaaagcuggaaaacuucgauguguaucaaauccuugcaaucuacagcacggucucaaguucccugguguuggucggccucauuauggccaugggucuguggaugugcagcaaugggucuaugcagugccguauauguaucuga

SEQ ID NO: 139157 - RNA, 1701 nt, Artificial Sequence
  derived and/or modified CDS sequence (opt3) from hemagglutinin__InfluenzaA__AHJ57850
augaucgccuucauugugauagcuauccuggcaaccacaggcaagagcgacaaaauuugcaucggguaccacgccaacaauuccacuacgaaggucgauaccauucucgagaaaaacguuacagugacucauucuguagaacuucuggagaaucagaaggaagagagauuuuguaaaaucucaaacaaggcgcccuuggacuuaagggauugcacccuggaaggauggauacuagguaauccucgguguggcauccuccuggcugaccaaaguuggagcuauauuguggagcgcccaaacgcccgaaaugggaucugcuacccggguauucuuaacgaggcagaggaacugaaggccuugaucggcuccggugaacgugucgagagauucgagauguuucccaaaucuacaugggcugggguggauaccgacucgggaguuucaagcgcauguccucucggcaauggcccaaguuucuauaggaaccugcuguggauaauuaagcucaaauccucugaauaccccgugauccgggggacuuuuaauaacacaggagauaagagcauuuuauauuucugggguguccaccauccuccagugaccacggagcaggaagcccuguacggcuccgggaaucgcuauguaagaaugggaacugagucaaugaacuuugcuaggacccccgaaaucgccgcgcggccugcaguuaauggccagcgcggucgaaucgacuacuucuggaguauucuuaaaccaggggagacauugaacguggagagcaacggaaaucugauagccccgugguacgcuuauagauuugucaacaaggauucuaagggcgccaucuucagguccaaucuacccauugaaaacugcgacgcaacuugucagaccacagagggcgugauccggaccaauaaaacguuucaaaacgugucaccucucuggauaggggaaugcccaaaguacgucaaaagcaagagucugcgucuugcuacuggacugcgcaauguuccccagauugagacaagagguuuguucggcgccaucgcgggguuuaucgaaggaggcuggaccgguaugauugaugggugguauggcuaccaccaugagaacucucagggauccggcuaugccgcagacagggagagcacucagaaagcuaucgaugggauuacaaauaaggugaacucgauaaucgacaaaaugaauacccaauucgaagccguaggacacgaguucucuaaccucgaacggcgaauugacaaucugaacaagcgcauggaggauggauuuuuagacguguggacguacaaugcugaacugcucguccuucuggagaacgagagaaccuuggaucuacacgacgccaacgugaagaaucugcaugaaaaaguuaggucccagcuccgggauaacgcaaaugaccugggcaacggguguuucgaguuuuggcacaagugcgauaaugaauguauggagucagugaaaaacggaacauaugacuacccuaaguaccaggccgagagucgccuuaauagacagaaaaucgaaagcgucaagcuggagaacuucgauguguaucaaaucuuggcuauuuacuccacuguaucuagcucacucguucuggugggcuuaauaauggcgaugggucuguggaugugcaguaauggguccaugcagugcaggaucuguauuuga

SEQ ID NO: 139158 - RNA, 1701 nt, Artificial Sequence
  derived and/or modified CDS sequence (opt3) from hemagglutinin__InfluenzaA__AHJ57862
augaucgccuucauugugauagcuauccuggcagccaccggcaagagcgacaaaauuugcaucggguaccacgcgaacaauuccacaacuaaggucgauacgauucucgagaaaaacguuaccgugacacauucuguagaacuucuggagaaucagaaggaagagagauuuuguaaaaucucaaacaaggcucccuuggacuuaagggauugcacucuggaaggauggauacuagguaauccucgguguggcauccuccuggccgaccaaaguuggagcuauauuguggagcgcccaaacgcacgaaaugggaucugcuacccggguauucuuaacgaggccgaggagcugaaggcuuugaucggcuccggugaacgugucgagagauucgagauguuucccaaaucuaccugggcagggguggauacaaauucgggaguuucaagcgccuguccucucggcaacggcccaaguuucuauaggaaucugcuguggauaauuaagcucaaauccucugaauaccccgugauccgggggaccuuuaacaauacuggagacaagagcauuuuauauuucugggguguccaccauccuccagugacaaccgagcaggaagcucuguacggcuccgggaaccgcuauguaagaaugggaacggagucaaugaauuuugccaggagucccgaaaucgcggcacggccugccguuaacggccagcgcggucgaaucgauuacuucuggagcauucuuaaaccaggggagacuuugaacguggagucuaauggaaaccugauagcuccgugguacgccuauagauuugucaauaaggacuccaagggcgcaaucuucaggucaaaccuacccauugaaaauugcgaugcuaccugucagacaacugagggcgugauccggaccaacaaaacauuucaaaaugugagcccucucuggauaggggaaugcccaaaguacgucaaaaguaagucucugcgucuugccaccggacugcgcaacguuccccagauugagacgagagguuuguucggcgcgaucgccggguuuaucgaaggaggcuggacugguaugauugacgggugguauggcuaccaccaugaaaauucccagggaagcggcuaugcagcugauagggagucgacacagaaagccaucgacgggauuaccaacaagguaaauucuauaaucgauaaaaugaacacucaauucgaagcugugggacacgaguucuccaaucucgaacggcgaauugacaaccugaauaagcgcauggaggacggauuuuuagauguguggacauacaacgccgaacugcucguccuucuggagaacgagagaaccuuggaccuacacgaugcaaaugugaagaaccugcaugaaaaaguuaggucacagcuccgggacaaugccaacgaucugggcaauggguguuucgaguuuuggcacaagugcgacaacgaauguauggagagugugaaaaauggaacguaugauuacccuaaguaccaggcugagagccgccuuaacagacagaaaaucgaauccgucaagcuggagaauuucgacguguaucaaaucuuggcgauuuacucuaccguaagcucaagucucguucuggugggcuuaauaauggcaaugggucuguggaugugcuccaacgggagcaugcagugcaggaucuguauuuga

SEQ ID NO: 139159 - RNA, 1701 nt, Artificial Sequence
  derived and/or modified CDS sequence (opt3) from hemagglutinin__InfluenzaA__AHJ57873
augaucgccuucauugugauagcuacccuggucgcaacaggcaagagcgacaaaaucugcaugggguaccacgccaacaauuccacuacgaagguugauaccauucucgagaaaaacgugacaguaacucauucuguggaacuucuggagaaucagaaggaagagagauuuuguaaaaucucaaacaaggcgcccuuggacuuaagggauugcacccuggaaggauggauucuagguaauccucgguguggcauccuccuggcugaccaaaguuggagcuauauagucgagcgcccaaacgcccgaaaugggaucugcuacccgggaacacuuaacgaggcagaagaguuaaaggccuugauuggcuccggugaacguguggagagauucgagauguuucccaaaucuaccuggacugggguugauacagaaucgggagugucaagcgcuuguccucucggcaauggcccaaguuucuauaggaaccugcuguggaucauuaagcucaaauccucugaguaccccgucauccgggggaccuuuaauaacacgggagacaagagcauauuauauuucuggggugugcaccauccuccaguaacuaccgaacagaaugcacuguacggcuccggggaucgcuauguuagaaugggaacagagucaaugaacuuugccaggagucccgaaauugcugcccggccugcggugaauggccagcgcggucgaaucgacuacuucuggagcauucuuacuccaggggagaccuugaacgucgagucuaacggaaaucugaucgcaccgugguacgccuauagauuugugaacaaagauuccaagggcgcuaucuucaggucaaaucuacccauugaaaacugcgacgccacaugucagaccacggagggcgugauacggacuaauaagacauuucaaaacgucagcccucucuggaucggggaaugcccaaaauacguuaagaguaaaucucugcgucuugcaaccggacugcgcaaugugccccagauugagacuagagguuuguucggcgcuaucgccggguuuauagaaggaggcuggacagguaugauugaugggugguauggcuaccaccaugagaacucccagggaagcggcuaugcggccgacaaggagucgacccagaaagcaaucgaugggaucacgaauaagguaaacucuauuaucgacaaaaugaauacccaauucgaagcugugggacacgaguucuccaaccucgaaaggcggauugacaaucugaacaagcgaauggaggaugguuuucuggacgucuggacauacaaugccgaacugcucgugcuucuggagaacgagcgcacuuuggaucuacacgacgcuaacguuaagaaucugcaugaaaaagugagaucacagcucagggauaacgccaaugaccugggcaacggguguuucgaguuuuggcacaagugcgauaaugaauguauggagagugucaaaaacggaaccuaugacuacccuaaguaccagaaagagagccggcuuaaucgccagaagauagaauccgugaagcuggagaacuucgauguauaucaaaucuuggcaauuuacucuacaguuagcucaagucucgugcuggucggcuuaauccuggccaugggucuauggaugugcuccaaugggagcaugcauugcagaaucuguauuuga

SEQ ID NO: 139160 - RNA, 1701 nt, Artificial Sequence
  derived and/or modified CDS sequence (opt3) from hemagglutinin__InfluenzaA__AHJ57885
augaucgccuucauugugauggcuauacuggcagccaccggcaagagcgacaagaucugcauuggguaccacgcgaacaauuccacaacuaaggucgauacgauccucgagaaaaacguuaccgugacacauucuguagaacuucuggagaaucagaaggaagagagauuuuguaaaauuucaaacaaggcucccuuggacuuaagggauugcacucuggaaggauggauccuagguaauccucgguguggcauacuccuggccgaccaaaguuggagcuauaucguggagcgcccaaacgcacgaaaugggauuugcuacccgggaauccuuaacgaggccgaagaacugaaggcuuugauuggcuccggugaacgugucgagagauucgagauguuucccaaaucuaccugggcagggguggauacagacucgggaguuucaagcgccuguccucucggcaauggcccaaguuucuauaggaaccugcuguggaucauaaagcggaaauccucugcuuaccccgugauucgcgggaccuuuaauaacacuggagauaagagcauccucuauuucugggguguccaccauccuccagugacaaccgaacaggaggccuuauacggcuccgggaauagauauguaaggaugggaacggaaucaaugaacuuugcgcggaaucccgagauugcagcccgcccugcuguuaacggccagcgagguagaaucgacuacuucuggaguauccugaaaccaggggaaacucuuaacauugagagcaauggaaacuugauagccccgugguacgcauauagguuugugaauaaggauucuaagggcgcuaucuuccgguccaaccugcccauugaggacugcgaugccucaugucagaccacagaaggcgucauccguacuaauaaaaccuuucaaaacgugagcccucuauggauaggggagugcccaaaguacgugaaaaguaagucucuccgccuggcgacaggacuuagaaaugucccccagauugaaaccaggggucuguucggcgccaucgcaggguuuaucgagggaggcuggacggguaugauugacgggugguauggcuaccaccaugaaaacucccagggaagcggcuaugcugccgaucgggagucgacucagaaagcuaucgacgggauuacaaauaagguuaacucuauaaucgacaaaaugaauacccaauucgaggccgugggacacgaguucuccaacuuggagcgacgcauugauaaucucgacaagagaauggaagaugguuuucuggacguauggacuuacaacgcagaguuacuggugcuccuugaaaaugagaggacacuggauuugcacgacgccaacgucaagaaccuacaugagaaagugcggucacagcugcgcgauaaugcuaacgaccucggcaauggguguuucgaauuuuggcacaagugcgauaacgaguguauggaaaguguuaaaaauggaaccuaugacuacccuaaguaccaggcggagagcagacugaacaggcagaaaaucgaguccgugaaacuugaaaauuucgaugucuaucaaauccuggcaauuuacucuacggugagcucaaguuugguacucguuggccugauaauggccauggguuuauggaugugcuccaacgggagcaugcagugccguaucuguauuuga

SEQ ID NO: 139161 - RNA, 1701 nt, Artificial Sequence
  derived and/or modified CDS sequence (opt3) from hemagglutinin__InfluenzaA__AHJ57897
augaucgccuucauugugauagcuauccuggcagccaccggcaagagcgacaagauuugcaucggguaccacgcgaacaauuccacaacuaaggucgauacgauucucgagaaaaacguuaccgugacacauucuguagaacuucuggagaaucagaaggaagagagauuuuguaaaaucucaaacaaggcucccuuggacuuaagggauugcacucuggaaggauggauacuagguaauccucgguguggcauccuccuggccgaccaaaguuggagcuauauuguggagcgcccaaacgcacgaaaugggaucugcuacccgggcauucuuaacgaggccgaagaacugaaggcuuugaucggauccggugaacgugucgagagauucgagauguuucccaaaucuaccugggcagggguggauacagacucgggaguuucaagcgccuguccucucggcaauggcccaaguuucuauaggaaccugcuguggauaauuaagcggaaauccucugcuuaccccgugauccgcgggaccuuuaauaacacuggagauaagagcauucucuauuucugggguguccaccauccuccagugacaaccgaacaggaggccuuauacggcuccgggaauagauauguaaggaugggaacggaaucaaugaacuuugcgcggaaucccgagaucgcagcccgcccugcuguuaacggccagcgagguagaaucgacuacuucuggaguauucugaaaccaggggaaacucuuaacauagagagcaauggaaacuugaucgccccgugguacgcauauagguuugugaauaaggauucuaagggcgcuauuuuccgguccaaccugcccaucgaggacugcgaugccucaugucagaccacagaaggcgucauacguacuaauaaaaccuuucaaaacgugagcccucuauggauuggggagugcccaaaguacgugaaaaguaagucucuccgccuggcgacaggacuuagaaaugucccccagaucgaaaccaggggucuguucggcgccaucgcaggguuuauugagggaggcuggacggguaugaucgacgggugguauggcuaccaccaugaaaacucccagggaagcggcuaugcugccgaucgggagucgacucagaaagcuauugacgggauaacaaauaagguuaacucuaucauugacaaaaugaauacccaauucgaggccgugggacacgaguucuccaacuuggagcgacgcaucgauaaucucaacaagagaauggaagacgguuuucuggauguauggacuuacaaugcagaguuacuggugcuccuugaaaacgagaggacacuggacuugcacgaugccaacgucaagaaucuacaugagaaagugcggucacagcugcgcgacaacgcuaaugaucucggcaacggguguuucgaauuuuggcacaagugcgacaaugaguguauggaaaguguuaaaaacggaaccuaugauuacccuaaguaccaggcggagagcagacugaauaggcagaaaaucgaguccgugaaacuugaaaacuucgacgucuaucaaauucuggcaauauacucuacggugagcucaaguuugguacucguuggccugaucauggccauggguuuauggaugugcuccaaugggagcaugcagugccguauuuguaucuga

SEQ ID NO: 139162 - RNA, 1701 nt, Artificial Sequence
  derived and/or modified CDS sequence (opt3) from hemagglutinin__InfluenzaA__AHJ57908
augaucgccuucauugugauagcuauccuggucgcaaccggcaagagcgacaaaauuugcaucggguaccacgccaacaauuccacaacuaagguugauacgauucucgagaaaaacgugaccguaacacauucuguggaacuucuggagaaucagaaggaagagagauuuuguaaaaucucaaacaaggcgcccuuggacuuaagggauugcacugucgaaggauggauacuggguaauccucgguguggcauccuaauugcugaccaaaguuggagcuauaucguggagcgcccaaacgcccgaaaugggauuugcuacccgggaacccucaacgaggcagaagaacugaaggcccuuaucggcuccggugaagggguugagcguuucgagauguuucccaaaucuacaugggcuggaguggauaccucgucaggcgucagcagugcauguccucugggcaaugggccauccuucuauagaaacuugcucuggauaauuaagcugaaaucuagcgaauaccccgugaucaggggaacuuuuaauaacacaggugacaaguccguacuguauuucuggggcguucaccauccuccagugaccacggagcaggaugcccucuacgggucaggaaaucgguauguccgcaugggcacugaaaguaugaacuuugcuagaagccccgagauugccgcgaggccugcagugaauggucagcgggggcgcaucgacuacuucuggucuguguuaaaaccaggagaaacccugaacgucgaguccaacggcaaucuuaucgccccgugguacgcuuaucgauuuguuaacaaggauaauaagggcgccauuuucagaucaaacuugcccauagagaauugcgacgcaacaugucagacuaccgaaggggugaucaggacaaacaaaaccuuucaaaauguaagcccucuguggauuggagagugcccaaaguacgugaaaaguaagucucuacggcucgcuacgggucugcguaacgucccccagaucgaaacucgcggccuuuucggggccauagcgggauuuauugagggcgguuggacagggaugaucgauggcugguauggauaccaccaugaaaauucccagggcagcggguaugccgcagacagagagucgacccagaaagcuaucgauggaauuacuaacaagguuaauucuaucauugacaaaaugaacacacaauucgaggccgcuggucacgaguucuccaaucuggagaggcggauagacaacuugaauaagcgaauggaagauggcuuucucgacguguggaccuacaacgccgagcuguuagugcugcucgaaaacgagcgcacgcuugaucugcacgacgcaaaugucaagaacuugcaugagaaagugaagucacagcuaagagauaaugccaacgaccuggggaauggauguuucgaauuuuggcacaaaugcgauaacgaguguauggaaaguguaaagaauggcaccuaugacuacccuaaauaccagaaggagagcaggcucaaccggcagcgcaucgaguccguuaagcuggaaaauuucgauguguaucaaauucuugcuaucuacucuacagucagcucaagucugguggucguggguuugaucauggcgauggggcucuggaugugcuccaacggcagcaugcagugcaugauuuguauauga

SEQ ID NO: 139163 - RNA, 1701 nt, Artificial Sequence
  derived and/or modified CDS sequence (opt3) from hemagglutinin__InfluenzaA__AHJ57920
augaucgccauuauaaucauugcuauccugguggcaaccggcaagagcgacaaaauuugcaucggguaccacgccaacaauuccacaacuaaggucgauacgauacucgagaaaaacguuaccgugacacauucuguagaacuucuggagaaucagaaggaagagagauucuguaaaaucucaaacaaggcgcccuuggacuuaagggauugcacuauugaaggauggauccuggguaauccuugguguggcauucuacucgcugaccaaaguuggagcuauaucguggagcggccaaacgcccgcaaugggauaugcuacccgggaacccugaacgaggucgaagaacuuaaggcacugauuggcuccggugaacgaguggagcguuuugagauguuccccaaaucuacaugggccgggguugauaccaauucgggagugucaagcgcuuguccuuugggcaacggcccaaguuuuuauagaaaucuccuguggaucauuaagacuaaauccucugaauaccccgucaucaaggggacauucaacaauaccggagacaaaagcgugcuguauuuuugggguguacaccauccuccauccaggaacgagcagaauguucucuacggcucaggggaucgguaugugcgcaugggaacggaaaguaugaacuucgcaagaagccccgagaucgccgcuaggccugccgucaacggccagcggggucgcauugacuacuuuuggucuauauuaaagccaggggaaacucugaauguggaguccaacggaaaucuuaucgcgccgugguacgcauaucgauucgugaacaaggauucaagaggcgccauuuuuaggagcaauuugcccaucgagaacugcgacgcuaccugucagacagccgaaggcgucauacggacuaauaaaaccuuccaaaacguuaguccucuguggauuggggagugcccaaaguacgugaaaucuaagucccuacgucucgcaacaggacugcgcaauguaccccagaucgaaaccagaggucuuuuuggcgcuaucgccggguucauugagggaggcuggacggguaugaucgaugggugguauggcuaccaccaugaaaacagccagggaucgggcuaugcggccgacagggagucuacucagaaagcaacagaugggauuaccaauaaggugaacuccauaaucgacaaaaugaauacucaauuugaggcugucggacacgaguucucaaaccuggagcggcgaauugacaauuugaacaagcgcauggaagaugguuuccucgacguguggacauacaacgccgagcuguuaguucugcucgaaaaugagagaacccuugaucugcacgacgcuaacgugaagaauuugcaugagagggucaaaagucagcuacgggauaacgccaaugaccugggcaacggguguuuugaguucuggcacaagugcgauaaugaauguauggaaagcgugaaaaacgacacguaugauuacccuaaguaccagaaagagucccgccucaauagacagaagaucgagucuguaaggcuggaaaacuuugacguuuaucaaauccuugcaauuuacagcaccgugucaaguucccuggucuuggugggacucauaauggccaugggccuguggaugugcagcaaugguucuaugcagugccguaucuguauuuga

SEQ ID NO: 139164 - RNA, 1701 nt, Artificial Sequence
  derived and/or modified CDS sequence (opt3) from hemagglutinin__InfluenzaA__AHJ57932
augaucgcccugauuauaaucaccauucucgugacaacuggcaagagcgacaaaaucugcauuggguaccacgcuaacaauuccacgaccaaggucgauacaauccuugagaaaaacguuacugugacccauucuguagaacuguuggagaaucagaaggaagagagauucuguaggauaucaaacaaagcacccuuagaccugaaggaaugcacacuagagggauggauccucgguaauccucaaugugaucugcuucugggcgaccagaguuggagcuauauuguggagcggccaaacgcccgcaaugggaucugcuacccgggaaccuugaacgaagucgaggaacuccgagcgcugauuggcuccggugaggggguggagcguuuugaaauguuccccaagucuacuugggcuggaguugauacaaauagaggcgugaccucgucauguccuuuuggcagcgggaguuccuucuauaggaaccugcucuggaucgucaaacacacgacuucuagcuacccagugauaaagggaaccuuucggaauacaggugacaaauccguauuauauuucuggggcguucaucaccccuuugauacuaacgagcagaaugugcuguacgggucaggaaaccgcuaugucagaaugggcaccgaaaguaugaauuucgccagggguccugagguggcagcccggccaguggucaacgggcagcgcggacgaauugacuacuuuuggagcauccuuaagcccggcgaaacauugaacauugagucuaauggcaaccugaucgcuccuugguacgcauauagauucguuaauaaagauuccaagggggccaucuuuaggucaaaccuaccaauugaggacugcgaugcuaccugucaaacgauagaaggagugauccggacuaauaagacauuccagaacguaagcccgcucuggauuggugagugccccaaauacgugaagagugaaucucugcgucuugccaccggccugcgcaaugucccucagaucgagacuagaggguuguuuggagcgauagcaggcuucauugaagguggguggacaggcaugaucgacggaugguauggcuaccaucacgagaacucccaggggagcggauaugccgcugauagggagucgacccaaaaagccaucgacgguauuacgaccaagguuaauucuaucauugacaaaaugaacacacaguucgaagcagugggccacgaguuuuccaaucucgaacggcgaauagauaaccugaauaagcgcuuagaggacggguuccuggauguguggacuuacaacgcugaacuccuuguccuguuggagaaugagagaacccuagaccugcaugaugccaacgugaaaaaccuccacgaaaggguacggucacagcugcgcgacaaugcgaacgaucuuggaaauggcuguuuugaguucuggcauaagugcgacaacgaauguauggagaguguuagaaaugguacauauaacuacccaaaguaccaggccgagagcaggcugaauaaacaacguaucgaauccgugaaguuggagaacuuugaugucuaucagauucucgcaaucuacucuacugugagcucaagucuggucuuaguggggcugauccuagcuaugggccucuggaugugcuccaauggaagcaugcagugccggauuuguauauga

SEQ ID NO: 139165 - RNA, 1701 nt, Artificial Sequence
  derived and/or modified CDS sequence (opt3) from hemagglutinin__InfluenzaA__AHJ57943
augaucgccuucauugugauagcuacccuggucgcaacaggcaagagcgacaaaaucugcauuggguaccacgccaacaauuccacuacgaagguugauaccauccucgagaaaaacgugacaguaacucauucuguggaacuucuggagaaucagaaggaagagagauuuuguaaaauuucaaacaaggcgcccuuggacuuaagggauugcacccuggaaggauggauccuagguaauccucgguguggcauacuccuggcugaccaaaguuggagcuauaucgucgagcgcccaaacgcccgaaaugggauuugcuacccgggaacacuuaacgaggcagaagaguuaaaggccuugaucggcuccggugaacguguggagagauucgagauguuucccaaaucuaccuggacugggguugauacagaaucgggagugucaagcgcuuguccucucggcaauggcccaaguuucuauaggaaccugcuguggauuaucaagcucaaauccucugaguaccccgucauacgggggaccuuuaauaacacgggagacaagagcauuuuauauuucuggggugugcaccauccuccaguaacuaccgaacagaaugcacuguacggcuccggggaucgcuauguuagaaugggaacagagucaaugaacuuugccaggagucccgaaaucgcugcccggccugcggugaauggccagcgcggucgaauugacuacuucuggagcauccuuaaaccaggggagacuuugaacgucgagucuaacggaaaucugaucgcaccgugguacgccuauagauuugugaacaaggauuccaagggcgcuauuuucaggucaaaucuacccauagaaaacugcgacgccaccugucagacaaccgagggcgugauccggacgaauaaaacuuuucaaaacgucagcccucucuggauuggggaaugcccaaaguacguuaaaaguaagucucugcgucuugcaacaggacugcgcaaugugccccagaucgagaccagagguuuguucggcgcuauagccggguuuauugaaggaggcuggacugguaugaucgaugggugguauggcuaccaccaugagaacucccagggaagcggcuaugcggccgacaaagagucgacacagaaggcaaucgaugggauuaccaauaaaguaaacucuaucauugacaagaugaauacgcaauucgaaaccgugggacacgaguucuccaaccucgaaaggcggauagacaaucugaacaagcgaauggaggaugguuuucuggacgucuggacauacaaugcugaacugcucgugcuucuggagaacgagcgcacuuuggaucuacacgacgccaacguuaaaaaucugcaugaaaaggugagaucacagcucagggauaacgcuaaugaccugggcaacggguguuucgaguuuuggcacaaaugcaauaacgaauguauggagagugucaagaauggaaccuaugauuacccuaaauaccagaaggagagccggcuuaaccgccagaagaucgaauccgugaaacuggagaauuucgacguauaucaaauuuuggccaucuacucuacaguuagcucaagucucgugcuggucggcuuaauccuggcaaugggucuauggaugugcuccaacgggagcaugcagugcagaauuuguauauga

SEQ ID NO: 139166 - RNA, 1701 nt, Artificial Sequence
  derived and/or modified CDS sequence (opt3) from hemagglutinin__InfluenzaA__AHJ57954
augaucgccuucauugugauagcuauccuggcagccaccggcaagagcgacaaaauuugcaucggguaccacgcgaacaauuccacaacuaaggucgauacgauucucgagaaaaacguuaccgugacacauucuguagaacuucuggagaaucagaaggaagagagauuuuguaaaaucucaaacaaggcucccuuggacuuaagggauugcacucuggaaggauggauacuagguaauccucgguguggcauccuccuggccgaccaaaguuggagcuauauuguggagcgcccaaacgcacgaaaugggaucugcuacccgggcauucuuaacgaggccgaagaacugaaggcuuugaucggauccggugaacgugucgagagauucgagauguuucccaaaucuaccugggcagggguggauacaaauucgggaguuucaagcgccuguccucucggcaacggcccaaguuucuauaggaaucugcuguggauaauuaagcagaaauccucugcuuaccccgugauccgggggaccuuuaacaauacuggagacaagagcauucucuauuucugggguguccaccauccuccagugacaaccgaacaggaggccuuauacggcuccgggaaccgcuauguaagaaugggaacggaaucaaugaauuuugcgaggaaccccgagaucgcagcccggccugcuguuaacggccagcgcggucgaaucgauuacuucuggaguauucugaaaccaggggaaacucuuaauguggagagcaacggaaauuugauagccccgugguacgcauauagauuugucaacaaggacucuaagggcgcuaucuucagguccaaucugcccauugagaacugcgaugccaccugucaaacaacugaaggcgugauccggaccaauaaaacauuucagaacgugucaccucuauggauaggggagugcccaaaguacgucaaaagcaagagucuccgucuggcgaccggacuucgcaauguuccccagauugaaacgagaggucuguucggcgccaucgcaggguuuaucgagggaggcuggacugguaugauugacgggugguauggcuaccaccaugaaaacucucagggauccggcuaugcugccgauagggagagcacacaaaaagcuaucgacgggauuaccaauaaggugaacucgauaaucgauaaaaugaauacucaguucgaggccguaggacacgaguucucuaacuuggagcggcgaauugacaaucucaacaagcgcauggaagacgguuuucuggauguguggacauacaacgcagaguuacugguccuccuugaaaaugagagaacccuggacuugcacgaugccaacgugaagaaucuacaugagaaaguuaggucccagcugcgggacaacgcuaaugaucucggcaacggguguuucgaauuuuggcacaagugcgacaaugaguguauggaaucagugaaaaacggaacguaugauuacccuaaguaccaggcggagagucgccugaauagacaaaagaucgagagcgucaaacuugaaaacuucgacguguaucagauccuggcaauuuacuccaccguaucuagcucauugguucucgugggccugauaauggccauggguuuauggaugugcaguaauggguccaugcagugcaggaucuguauuuga

SEQ ID NO: 139167 - RNA, 1701 nt, Artificial Sequence
  derived and/or modified CDS sequence (opt3) from hemagglutinin__InfluenzaA__AHJ57965
augaucgccuucauuauaaucaccauucuggugacaacuggcaagagcgacaaaaucugcauuggguaccacgcuaacaauuccacgaccaaggucgauacaauccucgagaaaaacguuacugugacccauucuguagaacuucuggagaaucagaaggaagagagauuuuguaaaauaucaaacaaggcacccuuggacuuaaaggaaugcacacuggagggauggauccuagguaauccucaaugugaucuccugcuuggcgaccagaguuggagcuauauuguggagaggccaaacgcccggaaugggaucugcuacccgggaacccugaacgaagucgaggaauugaaagcgcucauuggcuccggugagcgcguggagcgauucgaaauguuucccaagucuacuugggcugggguugauacaaauucgggagugaccucaagcuguaguuucggcuccggcucuagcuuuuaucguaaccugcuguggaucauaaaacacacgacuuccucauacccugucauuaaggggaccuucagaaauacaggagacaaaagugugcucuauuuuugggguguacaucacccaaucgauacuaccgagcagaacguuuuauacggcagcgggaauagguaugugcggaugggaacagaaucuaugaacuucgcccgcucccccgagauugcagccagaccugucgugaauggccagaggggucggaucgacuacuuuuggucaauccugaagccaggggaaacccuuaacauugagagcaacggaaauuugauagcucccugguacgcauaucgcuucgugaacaaggauaguaaaggcgccaucuuucgaucuaaucugccuauugagaacugcgacgcuacgugucaaacuaucgaaggcgucauaagaacaaauaagaccuuccagaacguuuccccacuauggauuggggagugcccgaaauacgugaagucugaaucgcucaggcuggccacuggacuucggaauguaccccagaucgagacacguggucuguuuggcgcgaucgcaggguucauugaaggaggcuggaccgguaugaucgaugggugguauggcuaccaucacgagaacucucagggauccggcuaugccgcugaccgcgagucaacgcaaagagccauugaugggauaaccacaaaagugaauaguaucauugacaagaugaacacucaguucgaagcagucggacacgaguuuagcaauuuggaaaggcggaucgacaaccucaauaaacgaauggaggaugguuuccuggacguguggaccuacaacgcugaauuacugguucuccuugagaaugagcgcacacuggauuugcaugacgccaacgugaagaaccuacacgaaagagucaggucccagcugcgggauaaugcgaacgacggcgggaauggauguuuugaguucuggcauaagugcgauaacgaauguauggagucugugaaaaauggcacuuaugacuacccuaaguaccaggccgagagccgcucaaacagacaaaggaucgaaaguguaaaacucgagaauuuugauguuuaucagauucuggcaauauacuccaccgugagcagcucacuugucguggucuggcugaucuuggcuaugggucucuggaugugcgccaacgggaguaugcagugccguauuuguaucuga

SEQ ID NO: 139168 - RNA, 1701 nt, Artificial Sequence
  derived and/or modified CDS sequence (opt3) from hemagglutinin__InfluenzaA__AHJ57977
augaucgccuucauugugauagcuauccuggcagccaccggcaagagcgacaaaauuugcaucggguaccacgcgaacaauuccacaacuaaggucgauacgauucucgagaaaaacguuaccgugacacauucuguagaacuucuggagaaucagaaggaagagagauuuuguaaaaucucaaacaaggcucccuuggacuuaagggauugcacuauagaaggauggauccuggguaauccucgguguggcauucuacucgccgaccaaaguuggagcuauaucguggagcgcccaaacgcacgaaaugggauuugcuacccgggaacccugaacgaggucgaggaacuuaaggcccugaucggcuccggugaacguguggagagauucgagauguuucccaaaucuacaugggcugggguugauaccaauucgggagugucaagcgcauguccuuugggcaacggcccaaguuucuauaggaaucuccuguggauaauuaagcugaaauccucugaauaccccgucauccgggggacuuuuaacaauacaggagacaagagcauucucuauuucuggggugugcaccauccuccaguaaccacggagcaggaagccuuauacggcuccggggaucgcuauguuagaaugggaacugagucaaugaacuuugcuaggagucccgaaaucgccgcgcggccugcagugaauggccagcgcggucgaaucgacuacuucuggagcauucugaaaccaggggagacccuuaacgucgagucuaacggaaauuugauagccccgugguacgcuuauagauuugugaacaaggauuccaagggcgccaucuucaggucaaaucugcccauugaaaacugcgacgcaacaugucagacuaccgagggcgugauccggacaaauaaaaccuuucaaaacgucagcccucuauggauaggggaaugcccaaaguacguuaaaaguaagucucuccgucuggcuacgggacuucgcaaugugccccagauugagacuagaggucuguucggcgccaucgcgggguuuaucgaaggaggcuggacagguaugauugaugggugguauggcuaccaccaugagaacucccagggaagcggcuaugccgcagacaaagagucgacccagaaggcuaucgaugggauuacuaauaaaguaaacucuauaaucgacaagaugaauacacaauucgaagccgugggacacgaguucuccaacuuggaaaggcggauugacaaucucaacaagcgaauggaggaugguuuucuggacgucuggaccuacaaugcugaauuacuggugcuccuugagaacgagcgcacgcuggauuugcacgacgccaacguuaaaaaucuacaugaaaaggugagaucacagcugagggauaacgcaaaugaccucggcaacggguguuucgaguuuuggcacaaaugcaauaacgaauguauggagagugucaagaauggaaccuaugauuacccuaaauaccagaaggagagccggcugaaccgccagaagaucgaauccgugaaacuugagaauuucgacguauaucaaauccuggccauuuacucuacaguuagcucaaguuuggugcucgucggccugauauuagcuaugggucuguggaugugcuccaacgggagcaugcagugcagaaucuguauuuga

SEQ ID NO: 139169 - RNA, 1701 nt, Artificial Sequence
  derived and/or modified CDS sequence (opt3) from hemagglutinin__InfluenzaA__AHJ57989
augaucgccuucauugugauagcuauccuggucaccacaggcaagagcgacaaaauuugcaucggguaccacgcaaacaauuccacuacgaagguugauaccauucucgagaaaaacgugacaguaacucauucuguggaacuucuggagaaucagaaggaagagagauuuuguaaaaucucaaacaaggcccccuuggacuuaagggauugcacccuggaaggauggauacuagguaauccucgguguggcauccuccuggcggaccaaaguuggagcuauauugucgagcgcccaaacgcucgaaaugggaucugcuacccgggaacacuuaacgagguggaagaacugaaggccuugauuggcuccggugaacguguugagagauucgagauguuucccaaaucuaccugggcaaggguggauacugaccgcggggucucgucagccuguccucucggaaauggccccagcuucuaucggaaccugcuguggaucgugaagcacacaaccagugaauacccaguaauaaaaggcacguauacuaauaccggggauaaguccguucucuacuuuuggggagugcaucacccuccagacacaacugagcagaacgucuuauaugguucuggcaauagauacgugaggauggggaccgaaagcaugaacuucgcucggucccccgagauugcagcccgcccugcugugaauggacagcgaggcagaaucgauuacuuuuggucaauucugaaaccaggugaaacacuuaacgucgagaguaacgggaauuugaucgccccgugguaugcguacagguucguuaacaaggacagcaagggagcaaucuuucggucuaaucugcccauugagaacugcgaugccaccugucagacgacugaaggcgugauacguacaaauaaaaccuuccaaaacguauccccuauguggaucggcgagugcccaaaguaugugaaaucaaagagccuacgccucgcuacugggcugagaaaugucccccagauugaaacaaggggacuuuuuggugccaucgcaggcuucauagaagggggauggaccggcaugauugacgguugguacggguaucaucacgaaaacagucagggcucuggauacgcugccgaucgggaguccacgcagaaagcgaucgacggcaucaccaauaaggugaacagcauuaucgacaaaaugaauacacaauuugaggccguugggcacgaguucucgaaccuggagcgacgcauugauaauuugaacaagagaauggaagacggauuccucgauguguggacuuauaaugcagagcuguuaguccugcucgaaaacgagaggacccuugaccugcaugauucuaacgugaagaauuugcacgagcggguaaaaucccagcuacgcgacaacgcuaaugaucuggguaacggcuguuuugaguucuggcauaagugcgacaaugaguguauggaaucaguuaaaaacgggacauacaauuacccuaaguaucaggccgagaguagacucaacaggcagaaaauagagagcgugaagcuggaagaguuuggagucuaccaaauccuugcuauuuauuccacugugucuagcucacuggucuuggugggccucaucauggccaugggucuguggaugugcaguaauggguccaugcagugccguaucuguauuuga

SEQ ID NO: 139170 - RNA, 1701 nt, Artificial Sequence
  derived and/or modified CDS sequence (opt3) from hemagglutinin__InfluenzaA__AHJ58001
augaucgccuucauugugauagcuauccuggcagccaccggcaagagcgacaagauuugcaucggguaccacgcgaacaauuccacaacuaaggucgauacgauucucgagaaaaacguuaccgugacacauucuguagaacuucuggagaaucagaaggaagagagauuuuguaaaaucucaaacaaggcucccuuggacuuaagggauugcacucuggaaggauggauacuagguaauccucgguguggcauccuccuggccgaccaaaguuggagcuauauuguggagcgcccaaacgcacgaaaugggaucugcuacccgggcauucuuaacgaggccgaggaacugaaggcuuugaucggauccggugaacgugucgagagauucgagauguuucccaaaucuaccugggcagggguggauacagacucgggaguuucaagcgccuguccucucggcaauggcccaaguuucuauaggaaccugcuguggauaauuaagcucaaauccucugaauaccccgugauccgggggaccuuuaauaacacuggagauaagagcauuuuauauuucugggguguccaccauccuccagugacaaccgagcaggaagcucuguacggcuccgggaaucgcuauguaagaaugggaacggagucaaugaacuuugccaggagucccgaaaucgcggcacggccugccguuaauggccagcgcggucgaaucgacuacuucuggagcauucuuaaaccaggggagacuuugaacguggagucuaacggaaaucugauagcuccgugguacgccuauagauuugucaacaaggauuccaagggcgcaaucuucaggucaaaucuacccauugaaaacugcgacgcuaccugucagacaacugagggcgugauccggaccaauaaaacauuucaaaacgugagcccuauguggauaggggaaugcccaaaguacgucaaaaguaagucucuccgucuggccaccggacuucgcaauguuccccagauugagacgagaggucuguucggcgcgaucgccggguuuaucgaaggaggcuggacugguaugauugaugggugguauggcuaccaccaugagaacucccagggaagcggcuaugcagcugacagggagucgacacagaaagccaucgaugggauuaccaauaaggugaacucuauaaucgacaaaaugaauacucaauucgaagcuguaggacacgaguucuccaacuuggaacggcgaauugacaaucucaacaagcgcauggaggaugguuuucuggacguguggacauacaaugccgaauuacugguccuccuugagaacgagagaacccuggauuugcacgacgcaaacgugaagaaucuacaugaaaaaguuaggucacagcugcgggauaacgccaaugaccucggcaacggguguuucgaguuuuggcacaagugcgauaaugaauguauggagagugugaaaaacggaacguaugacuacccuaaguaccagaccgagagccgccugaauagacagaaaaucgaauccgucaaacuugagaacuucgauguguaucaaauccuggcuauuuacucuacaguaagcucaaguuugguucucgugggccugauaauggcgauggguuuauggaugugcuccaaugggagcaugcagugcaggaucuguauuuga

SEQ ID NO: 139171 - RNA, 1701 nt, Artificial Sequence
  derived and/or modified CDS sequence (opt3) from hemagglutinin__InfluenzaA__AHJ58013
augaucgccuucauugugauagcuauccuggucaccacaggcaagagcgacaaaauuugcaucggguaccacgcaaacaauuccacuacgaagguugauaccauucucgagaaaaacgugacaguaacucauucuguggaacuucuggagaaucagaaggaagagagauuuuguaaaaucucaaguaaggcccccuuggacuuaagggauugcagccuggaaggauggauacuagguaacccucgguguggcauccuccuggcggaccaauccuggucuuauauugucgagcgcccaaaugcucgaaacgggaucugcuacccgggaacccuuaaugagguggaagaacugaaggccuugauuggcucgggugaacguguugagagauucgagauguuucccaaaucaacaugggcagggguggauaccaacagcggagucaguuccgccuguccucucggcgaaggcccaucuuucuauaggaaucugcuguggaucauaaagcggacuacaagcgaguaccccgugauuaaagggaccuaucgcaacacgggagacaaguccguacucuacuuuugggguguucaccauccuccagauacuaccgaacagaauguguuauauggcucagggaacagauacgucaggaugggaacagagaguaugaauuucgcucggagccccgaaaucgcagcccgcccugcugugaacggccagcgagguagaauugacuacuuuuggucuauccugaaaccaggggagacucuugauguggaguccaauggaaacuugaucgccccgugguaugcguacagguucgucaacaaggaaucaaagggcgcaauuuuucggagcaaucugcccauagagaacugcgacgccaccugucagacaaccgaaggcguuauccguacgaauaaaacuuuccaaaacgugaguccucuauggauuggggagugcccaaaguauguaaaaucuaagucccuccgccuggcuacaggacuuagaaaugugccccagaucgaaaccaggggucuguuuggcgccauagcaggguucauugagggaggcuggacugguaugaucgaugggugguacggcuaucaccaugagaacagccagggaucgggcuacgcugccgacaaagaaucuacacagaaggcgaucgaugggauuaccaauaaagucaacuccaucauugacaagaugaauacgcaauuugaggccgugggacacgaguucucaaccuuggagcggcgaauagacaaccucaauaagcgcauggaagaugguuuccuggacguuuggacauauaacgcagaguuacuggugcuccuugagaaugaaagaacucuggauuugcacgacgcuaacgucaaaaaucuacaugagagggugcggagucagcugcgcgauaacgccaacgaccucggcaauggguguuuugaguucuggcacaagugcgauaacgaauguauggagagcguaaagaauggaaccuacaacuacccuaaguaucaggcugaauccagacugaauaaacagaagaucgagucuguuaaacuugaagaguuuggcguguaccaaauucuggccaucuauagcacagucucaaguuccuuggugcucgucggucugaucauggcaaugggguuauggaugugcagcaacggcucuaugcagugcaggauuuguauauga

SEQ ID NO: 139172 - RNA, 1701 nt, Artificial Sequence
  derived and/or modified CDS sequence (opt3) from hemagglutinin__InfluenzaA__AHJ58025
augaucgccuucauugugauagcuauccuggucaccacaggcgagagcgacaagauuugcaucggguaccacgcaaacaauuccacuacgaaaguugauaccauucucgaaaagaacgugacaguaacucauucuguggagcuucuggaaaaucagaaagaggaaagauuuuguaagaucucaaacaaagcccccuuggacuuaagggauugcaccauagagggauggauccuggguaauccucgguguggcauucuacucgcggaccaaaguuggagcuauaucgucgagcgcccaaacgcucgaaaugggauuugcuacccgggaacacugaacgaagccgaggaacuuaaggcacugaucggcuccggugaggggguggagcguuucgaaauguuucccaagucuaccugggccggaguugauacuaauucgggcgugucaagcgcuuguccuuugggcaacgggccaaguuucuauagaaaucuccuguggauaauuaaacugaaguccucugaguaccccgucaucaggggaacauuuaacaauaccggugacaaaagcgugcucuauuucuggggcguacaccauccuccaguuacgacugaacagaacgauuuauacggguccggaaaucgguaugugcgcaugggcaccgagucaaugaacuuugcaagaaaccccgaaauugcccugaggccugcugucaauggucagcgggggcgcaucgacuacuucuggaguauccuuaagccaggagagacauugaacguggagagcaauggcaaccugauugccccgugguacgcguaucgauuugugaauaaagauucuaagggcgcaauauucagauccucacuacccaucgaaaacugcgacgccacuugucagaccgcugagggggucauuaggacaaauaagaccuuucaaaacguuagcccucucuggaucggagaaugcccaaaauacgugaagaguaaaucucugcggcuugccacgggucugcguaauguaccccagauagagacucgcggcuuguucggggcaauugcuggauuuaucgaaggcgguuggacagggaugguggauggcugguauggauaccaccaugagaacucccagggcagcggguaugccgcggacagagagucgacccagaaggccaucgauggaauuacuaauaaagucaacucuaucauugacaagaugaauacacaauucgaagcaguggaccacgaguucuccaaccucgaaaggcggauagauaaucugaacaaacgaauggaggacggcuuuuuagauguuuggaccuacaacgcugaacugcucgugcuucuggagaaugagcgcacguuggaccuacacgaugccaacgucaagaaucugcaugaaaaggugaaaucacagcucagagacaacgcuaaugaucuggguaacggguguuucgaguuuuggcacaagugcgacaaugaauguauggagaguguuaaaaacggaaccuauaauuacccuaaguaccagaaagagagcaggcuuaaccggcagaagaucgaauccguaaagcuggagaauuucgauguguaucaaauuuuggccaucuacucuacagucagcucaagucucgugcuggucggcuuaaucauggcaaugggucuguggaugugcuccaacgggagcaugcagugccgcauuuguauauga

SEQ ID NO: 139173 - RNA, 1701 nt, Artificial Sequence
  derived and/or modified CDS sequence (opt3) from hemagglutinin__InfluenzaA__AHJ58037
augaucgccuucauuauaaucaccauucuggugacaacuggcgagagcgacaagaucugcauuggguaccacgcuaacaauuccacgaccaaggucgauacaauccucgaaaagaacguuacugugacccauucuguagagcuucuggaaaaucagaaagaggaaagauuuuguaagauaucaaacaaagcacccuuggacuuaaaggagugcacacuggagggauggauccuagguaauccucaaugugaucuccugcuuggcgaccagaguuggagcuauauuguggaaaggccaaacgcccggaaugggaucugcuacccgggaacccugaacgaggucgaagaguugaaggcgcucauuggcuccggugagcgcguggaacgauucgagauguuucccaaaucuacuugggcugggguugauacaaauucgggagugacccguucauguccuuucggcagcggcaguuccuuuuauagaaaccugcuguggaucauaaagcacacgacuucuagcuacccagucauuaaagggaccuucaggaauacaggagacaaguccgugcucuauuuuugggguguacaucaccccaucgauacuaccgaacagaacguuuuauacggcucagggaaucgguaugugcgcaugggaacagagaguaugaacuucgccagaagcccugaaauugcagccaggccagucgugaauggccagcggggucgcaucgacuacuuuuggucuauccugaaacccggggagacccuuaacauugaguccaacggaaauuugauagcuccuugguacgcauaucgauucgugaacaaggauucaaagggcgccaucuuuagaagcaaucugccaauugaaaacugcgacgcuacgugucaaacuaucgagggcgucauaaggacaaauaaaaccuuccagaacguuaguccgcuauggauuggggaaugccccaaguacgugaaaucugagucccuccggcuggccacuggacuucguaauguaccucagaucgaaacacgcggucuguuuggcgcgaucgcaggguucauugagggaggcuggaccgguaugaucgaugggugguauggcuaccaucacgagaacagccagggaucgggcuaugccgcugacagagaaucuacgcaaagggccauugaugggauaaccacaaaggucaauuccaucauugacaaaaugaacacucaguucgaggcagugggacacgaauuuucaaauuuggagcggcgaaucgacaaccucaauaagcgcauggaagaugguuuccuggacguguggaccuacaacgcugaguuacugguucuccuugagaaugaaagaacacuggauuugcaugacgccaacgugaaaaaccuacacgagagggucaagagucagcugcgggauaaugcgaacgaccucggcaauggguguuuugaguucuggcauaagugcgauaacgaauguauggagagcgugaaaaauggaacuuaugacuacccaaaguaccaggccgaaucccgccugaacaaacaaagaaucgagucuguaaaacuugaaaauuuugauguuuaucagauucuggcaauauacagcaccgugucaaguuccuugguccucgugggccugaucauggcuauugguuuauggaugugcagcaacgggucuaugcagugcaggaucuguauuuga

SEQ ID NO: 139174 - RNA, 1701 nt, Artificial Sequence
  derived and/or modified CDS sequence (opt3) from hemagglutinin__InfluenzaA__AHJ58049
augaucgccuucauugugauagcuauccuggcagccaccggcaagagcgacaaaauuugcaucggguaccacgcgaacaauuccacaacuaaggucgauacgauucucgagaaaaacguuaccgugacacauucuguagaacuucuggagaaucagaaggaagagagauuuuguaaaaucucaaacaaggcucccuuggacuuaagggauugcacucuggaaggauggauacuagguaauccucgguguggcauccuccuggccgaccaaaguuggagcuauauuguggagcgcccaaacgcacgaaaugggaucugcuacccggguauucuuaacgaggccgaggaacugaaggcuuugaucggcuccggugaacgugucgagagauucgagauguuucccaaaucuaccugggcagggguggauacagacucgggaguuucaagcgccuguccucucggcaauggcccaaguuucuauaggaaccugcuguggauaauuaagcucaaauccucugaauaccccgugauccgggggaccuuuaauaacacuggagauaagagcauuuuauauuucugggguguccaccauccuccagugacaaccgagcaggaagcucuguacggcuccgggaaucgcuauguaagaaugggaacggagucaaugaacuuugccaggacucccgaaaucgcggcacggccugccguuaauggccagcgcggucgaaucgacuacuucuggaguauucuuaaaccaggggagaccuugaacguggagagcaacggaaaucugauagcuccgugguacgccuauagauuugucaacaaggauucuaagggcgcaaucuucagguccaaucuacccauugaaaacugcgacgcuacaugucagacuaccgagggcgugauccggacaaauaaaaccuuucaaaacgugucaccucucuggauaggggaaugcccaaaguacgucaaaagcaagagucugcgucuugccacgggacugcgcaauguuccccagauugagacuagagguuuguucggcgcgaucgccggguuuaucgaaggaggcuggacagguaugauugaugggugguauggcuaccaccaugagaacucucagggauccggcuaugcagcugacagggagagcacccagaaagccaucgaugggauuacuaauaaggugaacucgauaaucgacaaaaugaauacacaauucgaagcuguaggacacgaguucucuaaccucgaacggcgaauugacaaucugaacaagcgcauggaggauggauuuuuagacguguggaccuacaaugccgaacugcucguccuucuggagaacgagagaacguuggaucuacacgacgcaaacgugaagaaucugcaugaaaaaguuaggucccagcuccgggauaacgccaaugaccugggcaacggguguuucgaguuuuggcacaagugcgauaaugaauguauggagucagugaaaaacggaaccuaugacuacccuaaguaccaggcugagagucgccuuaauagacagaaaaucgaaagcgucaagcuggagaacuucgauguguaucaaaucuuggcgauuuacuccacaguaucuagcucacucguucuggugggcuuaauaauggcaaugggucuguggaugugcaguaauggguccaugcagugcaggaucuguauuuga

SEQ ID NO: 139175 - RNA, 1701 nt, Artificial Sequence
  derived and/or modified CDS sequence (opt3) from hemagglutinin__InfluenzaA__AHJ58061
augaucgccuucauugugauagcuacccuggucgcaacaggcaagagcgacaaaaucugcauuggguaccacgccaacaauuccacuacgaagguugauaccauccucgagaaaaacgugacaguaacucauucuguggaacuucuggagaaucagaaggaagagagauuuuguaaaauuucaaacaaggcgcccuuggacuuaagggauugcacccuggaaggauggauccuagguaauccucgguguggcauacuccuggcugaccaaaguuggagcuauaucgucgagcgcccaaacgcccgaaaugggauuugcuacccgggaacacuuaacgaggcagaagaguuaaaggccuugaucggcuccggugaacguguggagagauucgagauguuucccaaaucuaccuggacugggguugauacagaaucgggagugucaagcgcuuguccucucggcaauggcccaaguuucuauaggaaccugcuguggauuaucaagcucaaauccucugaguaccccgucauacgggggaccuuuaauaacacgggagacaagagcauuuuauauuucuggggugugcaccauccuccaguaacuaccgaacagaaugcacuguacggcuccggggaucgcuauguuagaaugggaacagagucaaugaacuuugccaggagucccgaaaucgcugcccggccugcggugaauggccagcgcggucgaauugacuacuucuggagcauccuuaaaccaggggagacuuugaacgucgagucuaacggaaaucugaucgcaccgugguacgccuauagauuugugaacaaggauuccaagggcgcuauuuucaggucaaaucuacccauagaaaacugcgacgccaccugucagacaaccgagggcgugauccggacgaauaaaacuuuucaaaacgucagcccucucuggauuggggaaugcccaaaguacguuaaaaguaagucucugcgucuugcaacaggacugcgcaaugugccccagaucgagaccagagguuuguucggcgcuauagccggguuuauugaaggaggcuggacugguaugaucgaugggugguauggcuaccaccaugagaacucccagggaagcggcuaugcggccgacaaagagucgacacagaaggcaaucgaugggauuaccaauaaaguaaacucuaucauugacaagaugaauacgcaauucgaagcugugggacacgaguucuccaaccucgaaaggcggauagacaaucugaacaagcgaauggaggaugguuuucuggacgucuggaccuacaaugccgaacugcucgugcuucuggagaacgagcgcacauuggaucuacacgacgcuaacguuaaaaaucugcaugaaaaggugagaucacagcucagggauaacgccaaugaccugggcaacggguguuucgaguuuuggcacaaaugcaauaacgaauguauggagagugucaagaauggaacuuaugauuacccuaaauaccagaaggagagccggcuuaaccgccagaagaucgaauccgugaaacuggagaauuucgacguauaucaaauuuuggcaaucuacucuaccguuagcucaagucucgugcuggucggcuuaauccuggccaugggucuauggaugugcuccaacgggagcaugcagugcagaauuuguauauga

SEQ ID NO: 139176 - RNA, 1701 nt, Artificial Sequence
  derived and/or modified CDS sequence (opt3) from hemagglutinin__InfluenzaA__AHJ58084
augaucgccuucauugugauagcuacccuggucgcaacaggcaagagcgacaaaaucugcauuggguaccacgccaacaauuccacuacgaagguugauaccauccucgagaaaaacgugacaguaacucauucuguggaacuucuggagaaucagaaggaagagagauuuuguaaaauuucaaacaaggcgcccuuggacuuaagggauugcacccuggaaggauggauccuagguaauccucgguguggcauacuccuggcugaccaaaguuggagcuauaucgucgagcgcccaaacgcccgaaaugggauuugcuacccgggaacacuuaacgaggcagaggagcugaaggccuugaucggcuccggugaacguguggagagauucgagauguuucccaaaucuaccuggacugggguuaauacagaaucgggagugucaagcgcuuguccucucggcaacggcccaaguuucuauaggaaucugcuguggauuaucaagcucaaauccucugaguaccccgucauacgggggaccuuuaacaauacgggagauaagagcauuuuauauuucuggggugugcaccauccuccaguaacuaccgaacagaacgcacuguacggcuccggggaccgcuauguuagaaugggaacagagucaaugaauuuugccaggagucccgaaaucgcugcccggccugcggugaacggccagcgcggucgaauugauuacuucuggagcauccuuaaaccaggggagacuuugaacgucgagucuaauggaaaccugaucgcaccgugguacgccuauagauuugugaauaaggacuccaagggcgcuauuuucaggucaaaccuacccauagaaaauugcgaugccaccugucagacaaccgagggcgugauccggacgaacaaaacuuuucaaaaugucagcccucucuggauuggggaaugcccaaaguacguuaaaaguaagucucugcgucuugcaacaggacugcgcaacgugccccagaucgagaccagagguuuguucggcgcuauagccggguuuauugaaggaggcuggacugguaugaucgacgggugguauggcuaccaccaugaaaauucccagggaagcggcuaugcggccgauaaagagucgacacagaaggcaaucgacgggauuaccaacaaaguaaauucuaucauugauaagaugaacacgcaauucgaagcugugggacacgaguucuccaaucucgaaaggcggauagacaaccugaauaagcgaauggaggacggcuuuuuagaugucuggaccuacaacgccgaacugcucgugcuucuggagaacgagcgcacauuggaccuacacgaugcuaauguuaaaaaccugcaugaaaaggugagaucacagcucagggacaaugccaacgaucuggguaauggguguuucgaguuuuggcacaaaugcaacaaugaauguauggagagugucaagaacggaacuuaugacuacccuaaauaccagaaggagagccggcuuaaucgccagaagaucgaauccgugaaacuggagaacuucgauguauaucaaauuuuggcaaucuacucuaccguuagcucaagucucgugcuggucggcuuaauccuggccaugggucuauggaugugcuccaaugggagcaugcagugcagaauuuguauauga

SEQ ID NO: 139177 - RNA, 1701 nt, Artificial Sequence; identical to SEQ ID NO: 134903
  derived and/or modified CDS sequence (opt3) from hemagglutinin__InfluenzaA__AHL80708

SEQ ID NO: 139178 - RNA, 1701 nt, Artificial Sequence
  derived and/or modified CDS sequence (opt3) from hemagglutinin__InfluenzaA__AHL80718
augaaggccauccuggugguccuccuuuacaccuucgcuacagcaaacgccgacacucugugcauuggcuaucacgcgaauaacagcacggauaccguugacacaguguuggagaaaaauguaacugugacccauuccgucaacuuacuggaagauaagcacaaugggaaacuauguaagcucagaggaguggcuccccugcaucuugguaaaugcaacauagccggcuggauccuggggaauccugagugugaaucuuugucaacagcaaguagcugguccuacauuguugagaccucuucgucagacaacggaacuugcuauccaggcgauuuuaucaauuacgaggagcucagggagcagcugagcaguguguccucuuucgaacgguuugagauuuucccgaagaucagcuccuggcccaaccacgacucaaauaagggugucacagccgcuuguccucaugcaggggccaaaaguuuuuauaagaaccugauauggcucgugaaaaagggaaauagcuacccaaaauuaucuaaguccuauaucaacgauaagggcaaagaaguacugguucuuuggggcauucaccaccccucaaccacggcugaccaacagagcuuguaccagaaugccgaugcguacguguucgucgggacuucucgcuauucuaagaaauuuaagccugagaucgcaauucgaccaaaagugcgugaccaggagggaagaaugaacuacuauuggacccugguggaacccggugauaagaucacauucgaggccacuggcaaccuagucguuccuagguacgcuuuugccauggaacggaaugcaggguccggaauaauuaucagcgacaccucggugcaugauugcaacacaaccugucaaacgccaaaaggcgcuauuaauacuucucucccguuccagaacauccaccccaucacaauugguaagugcccuaaguauguaaaauccaccaagcugcgccuugccacugggcugagaaaugugccaucaauacagaguaggggauuguuuggcgcgaucgccggcuucauugaagggggauggacagguauggucgacggcugguacggguaucaucaccagaacgaacaaggaagcggcuacgcagcugaccucaaauccacccagaaugccaucgauaagauaacgaacaaagugaauaguguuauugagaagaugaacacccaguuuacagcuguggguaaggaguucaaucaccuggaaaaacggaucgagaacuuaaauaagaaagucgacgauggguuccuggacaucuggacuuacaacgccgaacuccuugugcuguuggagaaugaacgcacccuagauuaucaugacagcaacguaaagaaccuguacgagaaaguucgaucacagcucaagaauaacgcaaaggagauuggcaauggauguuuugaguucuaucacaaaugcgauaacacauguauggaaagugugaagaauggcacuuacgacuaucccaaauacuccgaagaggccaagcugaacagagaagagaucgauggggucaaacuugagagcaccaggauuuaucaaauacuggcuaucuacucuacaguggcgucaaguuugguccucgugguuagccugggagcaauuuccuuuuggaugugcucuaaugguucguuacagugccggaucuguaucuga

SEQ ID NO: 139179 - RNA, 1710 nt, Artificial Sequence
  derived and/or modified CDS sequence (opt3) from hemagglutinin__InfluenzaA__AHL80729
augaaggccauccuggugguccuccuuuacaccuucgcuacagcaaacgccgacacucugugcauuggcuaucacgcgaauaacagcacggauaccguugacacaguguuggagaaaaauguaacugugacccauuccgucaacuuacuggaagauaagcacaaugggaaacuauguaagcucagaggaguggcuccccugcaucuuggugagugcaacauagccggcuggauccuggggaauccugaaugugagucuuugucaacagcaaguagcugguccuacauuguugaaaccucuucgucagacaacggaacuugcuauccaggcgauuuuaucgacuacgaggagcucagggaacagcugagcaguguguccucuuucgagcgguuugaaauuuucccgaaaacaagcuccuggcccaaucacgauucaaacaagggugucaccgccgcuuguccucaugcaggggccaagaguuuuuauaaaaaucugaucuggcucgugaagaaaggaaacagcuacccaaaguuaucuaaauccuauauaaaugacaagggcaaggagguacugguucuuuggggcauccaccaccccucaacgagcgcugaucaacagaguuuguaccagaacgccgacgcguacguguucgucgggacuucucgcuauuccaaaaaguuuaaaccugagauugcaauccgaccaaaggugcgugaucaggaaggaagaaugaauuacuauuggacccugguggagcccggugacaaaauuacauucgaagccacuggcaaccuagucguuccuagguacgcuuuugccauggagcggaacgcagggagcggaaucauaauuucggauaccccagugcaugacugcaauacaaccugucaaacgccgaagggcgcuaucaacacuucucucacaucccugcccuuccagaauguacacccuauuaccaucgguaaaugcccaaaguaugugaagucaacuaaacuucgccuggccacaggguugagaaacguccccaguauccagagcaggggacucuuuggcgcgauugccggcuucauagaagggggauggaccgguaugguggacggcugguacggguaucaucaccagaaugagcaaggauccggcuacgcagcugaucugaagucuacgcagaacgccaucgacgagauuaccaauaaaguuaacagcgugaucgaaaagaugaauacacaguuuacugcugucgguaaagaguucaaccacuuagaaaagcggauagagaaucugaacaagaaaguggaugacggguuccucgauauuuggaccuacaaugccgaacuucugguauugcuagagaacgagcgcacacuggacuaucaugauucaaauguuaagaaccucuacgaaaaagugcgaagucagcugaagaacaaugcaaaagagaucggcaacggauguuuugaguucuaucacaagugcgacaauacuuguauggaauccgucaagaacggcaccuacgauuauccuaaauacagcgaagaggccaaacuuaauagagaggaaaucgacggggugaagcuggagucuacaaggauuuaucaaaucuuggcuauuuacucaaccgucgcgaguagccucgugcugguuguguccuuaggagcaauaucuuuuuggaugugcucgaacgguagccugcagugccggaucuguauuuga

SEQ ID NO: 139180 - RNA, 1701 nt, Artificial Sequence
  derived and/or modified CDS sequence (opt3) from hemagglutinin__InfluenzaA__AHL80740
augaaggccauccuggugguccuccuuuacaccuucgcuacagcaaacgccgacacucugugcauuggcuaucacgcgaauaacagcacggauaccguugacacaguguuggagaagaauguaacugugacccauuccgucaacuuacuggaagauaagcacaaugggaaacuauguaagcucagaggaguggcuccccugcaucuugguaaaugcaacauagccggcuggauccuggggaauccugagugugaauugcucucuacagcaucaaguuggagcuacauuguugagaccuccucuucggacaacggaacuugcuauccaggcgauuuuaucaauuacgaggagcugagggagcagcugucaagcgugaguuccuucgaacgguuugagauuuucccgaagacaucuagcuggcccaaccacgacuccaauaagggugucaccgccgcuuguccucaugcaggggccaaaucauuuuauaagaaccucaucugguuagugaaaaagggaaauaguuacccaaaacugagcaagucuuauauaaacgauaagggcaaagaaguacuuguuuuguggggcgugcaccaccccuccacgucagcugaccaacagagccuguaccagaaugccgaugcguacgucuucguggggacuagccgcuauucuaagaaauuuaagccugagaucgcaauucgaccaaaagugcgugaccaggagggaagaaugaacuacuauuggacccuagucgaacccggugauaagaucacauucgaggccacuggcaaccucguugugccuagguacgcuuuugccauggaacggaaugcaggguccggaauuaucauaagcgacaccccaguacaugauugcaacacaaccugucaaacgccgaaaggcgcuauuaauacuucgcugcccuuccagaacauccacccuauuacaaucgguaagugcccaaaguaugugaaaucuaccaaacuucgccuggccacuggguugagaaauguccccuccauccagucaaggggacucuuuggcgcgauugccggcuucauagaagggggauggacagguaugguggacggcugguacggguaucaucaccagaacgaacaaggaaguggcuacgcagcugaccugaaaagcacccagaaugccaucgauaagauuacgaacaaaguuaauuccgugaucgagaagaugaacacccaguuuacagcugucgguaaggaguucaaucacuuagaaaaacggauagagaaccugaauaagaaaguggacgauggguuccucgacauuuggacuuacaacgccgaacuucugguauugcuagagaaugaacgcacccuggauuaucaugacucuaacguuaagaaccucuacgagaaagugcgaagccagcugaagaauaacgcaaaggagaucggcaauggauguuuugaguucuaucacaaaugcgauaacacauguauggaaucagucaagaauggcacuuacgacuauccuaaauacagugaagaggccaaacuuaacagagaaaagaucgauggggugaagcuggaguccaccaggauuuaucaaaucuuggcuauuuacagcacagucgcgucuucacucgugcugguugugaguuuaggagcaauaaguuuuuggaugugcuccaaugguucucugcagugccggaucuguauuuga

SEQ ID NO: 139181 - RNA, 1701 nt, Artificial Sequence
  derived and/or modified CDS sequence (opt3) from hemagglutinin__InfluenzaA__AHL80751
augaaggccauccuggugguccuccuuuacaccuucgcuacagcaaacgccgacacucugugcauuggcuaucacgcgaauaacagcacggauaccguugacacaauauuggagaaaaaugugacuguaacccauuccgugaacuuacuggaagauaagcacaaugggaaacuauguaagcucagaggagucgcuccccugcaucuugguaaaugcaacaucgccggcuggauucuggggaauccugagugugaaucuuugucaacagcaaguagcugguccuacaucguggagaccucuucgucagacaacggaacuugcuauccaggcgauuuuauugacuacgaagaacucagggagcagcugagcaguguuuccucuuucgaacgguuugagaucuucccgaagacaagcuccuggcccaaucacgauucaaacaagggugugaccgccgcuuguccucaugcaggggccaaaaguuuuuauaagaaucugauauggcucgucaaaaagggaaacagcuacccaaaauuaucuaaguccuauaucaaugacaagggcaaagaaauucuggugcuuuggggcauccaccaccccucaacgagcgcugaucaacagaguuuguaccagaacgccgacgcguacguauucguugggacuucucgcuauuccaagaaauuuaagccugagauugcaauccgaccaaaagugcgugaucaggagggaagaaugaauuacuauuggacccuggucgaacccggugacaagauaacauucgaggccacuggcaaccuaguggugccuagguacgcuuuugccauggagaaaaacgcagggagcggaauuaucauuucggauaccccaguccaugacugcaauacaaccugucaaacgccgaagggcgcuaucaacacuucucuccccuuccagaauauccacccuauuacaauagguaagugcccaaaauauguuaaguccaccaaacugcggcuugccacugggcugcgcaacgugcccucaauccagaguagaggauuguuuggcgcgauugccggcuucaucgaagggggauggacagguaugguagacggcugguacggguaucaucaccagaaugaacaaggaagcggcuacgcagcugaucucaaguccacccagaacgccauagacgagauuacgaauaaagugaacucugucaucgagaagaugaauacccaguuuacagcuguggguaaggaguucaaccaccuggagaaaaggaucgaaaauuuaaacaagaaaguugaugacggguuccuggauauuuggacuuacaaugccgagcuccuugugcuguuggaaaacgagcggacccuagacuaucaugauagcaaugucaagaaccuguacgagaaagugcgcucacagcucaagaacaaugcaaaggaaguaggcaacggauguuuugaguucuaucacaaaugcgacaauacauguauggaaaguguuaagaacggcacuuacgauuauccuaaauacuccgaggaagccaagcugaaucgagaggagaucgacggggugaaacuugaaagcaccagaauuuaucaaauacuggcuaucuacucuacagucgcgucaaguuuggugcucgucgugagccugggagcaauuuccuuuuggaugugcucuaacgguucguuacagugcaggaucuguaucuga

SEQ ID NO: 139182 - RNA, 1701 nt, Artificial Sequence
  derived and/or modified CDS sequence (opt3) from hemagglutinin__InfluenzaA__AHL80762
augaaggccauccuggugguccuccuuuacaccuucgcuacagcaaacgccgacacucugugcauuggcuaucacgcgaauaacagcacggauaccguugacacaguguuggagaaaaauguaacugugacccauuccgucaacuuacuggaagauaagcacaaugggaaacuauguaagcucagaggaguggcuccccugcaucuugguaaaugcaacauagccggcuggauccuggggaauccugagugugaaucuuugucaacagcaaguagcugguccuacauuguugagaccucuucgucagacaacggaacuugcuauccaggcgauuuuaucaauuacgaggagcucagggagcagcugagcaguguguccucuuucgaacgguuugagauuuucccgaagacaagcuccuggcccaaccacgacucaaauaagggugucaccgccgcuuguccucaugcaggggccaaaaguuuuuauaagaaccugaucuggcucgugaaaaagggaaauagcuacccaaaauuaucuaaguccuauauaaacgauaagggcaaagaaguacugguucuuuggggcauccaccaccccucaacgagcgcugaccaacagaguuuguaccagaaugccgaugcguacguguucgucgggacuucucgcuauuccaagaaauuuaagccugagauugcaauccgaccaaaagugcgugaccaggagggaagaaugaacuacuauuggauucugguggaacccggugauaagaucaccuucgaggccacaggcaaccuagucguuccuagguacgcuuuugccauggaacggaaugcagggagcggaauaauuaucucggacacuccagugcaugauugcaacaccacaugucaaaccccgaaaggcgcuauuaauacgucucuccccuuccagaacauccacccuaucacuauugguaagugcccaaaguauguaaaauccacaaagcugcgccuugccaccgggcugagaaaugugcccucaauacagaguaggggauuguuuggcgcgaucgccggcuucauugaagggggauggacugguauggucgacggcugguacggguaucaucaccagaacgaacaaggaagcggcuacgcagcugaccucaaauccacacagaaugccaucgauaagauaaccaacaaaguuaauucugugauugagaagaugaacacgcaguuuaccgcuguggguaaggaguucaaucaccuggaaaaacggaucgagaacuuaaauaagaaagucgacgauggguuccuggacaucuggacauacaacgccgaacuccuugugcuguuggagaaugaacgcacucuagauuaucaugacagcaacguaaagaaccuguacgagaaaguucgaucacagcucaaggauaaugcaaaggagauuggcaacggauguuuugaguucuaucacaaaugcgacaauaccuguauggaaagugugaagaacggcacauacgauuauccuaaauacuccgaagaggccaagcugaauagagaagagaucgacggggucaaacuugagagcacuaggauuuaucaaauacuggcuaucuacucuaccguggcgucaaguuugguccucgugguuagccugggagcaauuuccuuuuggaugugcucuaacgguucguuacagugccggaucuguaucuga

SEQ ID NO: 139183 - RNA, 1701 nt, Artificial Sequence
  derived and/or modified CDS sequence (opt3) from hemagglutinin__InfluenzaA__AHL80784
augaaggccauccuggugguccuccuuuacaccuucgcuacagcaaacgccgacacucugugcauuggcuaucacgcgaauaacagcacggauaccguugacacaguguuggagaaaaauguaacugugacccauuccgucaacuuacuggaagauaagcacaaugggaaacuauguaagcucagaggaguggcuccccugcaucuugguaaaugcaacauagccggcuggauccuggggaauccugagugugaaucuuugucaacagcaaguagcugguccuacauuguugagaccucuucgucagacaacggaacuugcuauccaggcgauuuuaucgacuacgaggagcucagggagcagcugagcaguguguccucuuucgaacgguuugagauuuucccgaagacaagcuccuggcccaaucacgauucaaacaaggguaucaccgccgcuuguccucaugcaggggccaaaaguuuuuauaagaaucugauauggcucgucaaaaagggaaacagcuacccaaaauuaucuaaguccuauaucaaugacaagggcaaagaagugcugguacuuuggggcauucaccaccccucaacgagcgcugaucaacagaguuuguaccagaacgccgacgcguacguuuucguggggacuucucgcuauuccaagaaauuuaagccugagaucgcaauucgaccaaaaguccgugaucaggagggaagaaugaauuacuauuggacccugguggaacccggugacaagaucacauucgaggccacuggcaaccuaguggucccuagguacgcuuuugccauggaacggaacgcagggagcggaauaauuaucucggauaccccaguucaugacugcaauacaaccugucaaacgccgaaaggcgcuauuaacacuucucuccccuuccagaauauccacccuaucacaauugguaagugcccaaaguaugugaaauccaccaagcugcgccuugccacugggcugagaaacguacccucaauacagaguaggggauuguuuggcgcgaucgccggcuucauugaagggggauggacagguaugguggacggcugguacggguaucaucaccagaaugaacaaggaagcggcuacgcagcugaucucaaauccacccagaacgccaucgacaagauaacgaauaaagucaacucugugauugagaagaugaauacccaguuuacagcuguugguaaggaguucaaccaccuggaaaaacggaucgagaauuuaaacaagaaaguggaugacggguuccuggauaucuggacuuacaaugccgaacuccuuguccuguuggagaacgaacgcacccuagacuaucaugauagcaaugugaagaaccuguacgagaaaguacgaucacagcucaagaacaaugcaaaggagauuggcaacggauguuuugaguucuaucacaaaugcgacaauacauguauggaaaguguuaagaacggcacuuacgauuauccuaaauacuccgaagaggccaagcugaauagagaagagaucgacggggugaaacuugagagcaccaggauuuaucaaauacuggcuaucuacucuacagucgcgucaaguuuggugcucgucgugagccugggagcaauuuccuuuuggaugugcucuaacgguucguuacagugccggaucuguaucuga

SEQ ID NO: 139184 - RNA, 1701 nt, Artificial Sequence; identical to SEQ ID NO: 131881
  derived and/or modified CDS sequence (opt3) from hemagglutinin__InfluenzaA__AHL80795

SEQ ID NO: 139185 - RNA, 1701 nt, Artificial Sequence
  derived and/or modified CDS sequence (opt3) from hemagglutinin__InfluenzaA__AHL80817
augaaggccauccuggugguccuccuuuacaccuucgcuacagcaaacgccgacacucugugcauuggcuaucacgcgaauaacagcacggauaccguugacacaguguuggagaagaauguaacugugacccauuccgucaacuuacuggaagauaagcacaaugggaaacuauguaagcucagaggaguggcuccccugcaucuugguaacugcaauauagccggcuggauccuggggaacccugagugugaaucuuugucaacagcaaguagcugguccuacauuguugaggccucuucgucagacaauggaaccugcuauccaggcgauuuuaucgacuacgaggagcucagggagcagcugagcaguguguccucuuucgaacgguuugagauuuucccgaaaacuagcuccuggcccaaccacgauucaaauaagggugucacagcugcauguccucaugccggggcuaagaguuuuuauaaaaaccugaucuggcucgugaagaaaggaaauagcuacccaaaguuaucuaaauccuauauaaacgacaagggcaaggaaguacugguucuuuggggcauccaccaccccucaaccagcgccgaucaacagaguuuguaccagaaugcggacgcauacguguucgucgggacgucucgcuauuccaaaaaguuuaaaccugagauugccauccgaccaaaggugcgugaucaggagggaagaaugaacuacuauuggacucugguggaacccggugacaaaauuaccuucgaggcuacaggcaaccuagucguuccuagguacgccuuugcaauggaacggaaugcugggagcggaaucauaauuucggauacuccagugcaugacugcaacaccacaugucaaaccccgaagggcgccaucaauacgucucuccccuuccagaacauucacccuaucacuaucgguaaaugcccaaaguauguaaaguccacaaaacugcgccuugcgaccgggcugagaaaugugcccucaauucagaguaggggauuguuuggcgccauagcaggcuucaucgaagggggauggacugguauggucgacggcugguacggguaucaucaccagaacgaacaaggaagcggcuacgcugccgaucucaaguccacacagaaugcuauugacaaaaucaccaacaagguaaauucuguuauagagaaaaugaacacgcaguuuaccgccguggguaaggaguucaaucaccuggaaaagcggauugagaacuuaaauaaaaaggucgaugacggguuccuggauaucuggacauacaacgcagaacuccuugugcuguuggagaaugaacgcacucuagacuaucaugauagcaacgugaaaaaccuguacgagaagguucgaucacagcucaaaaauaacgccaaggagaucggcaauggauguuuugaguucuaucacaagugcgacaacaccuguauggaaagugugaaaaauggcacauacgauuauccuaaguacuccgaagaggcuaaacugaacagagaagagauugacggggucaaacuugagagcacuaggaucuaucaaauucuggcgauauacucuaccguggcaucaaguuugguccucgugguuagccugggagccaucuccuuuuggaugugcucuaaugguucguuacagugccggauuuguaucuga

SEQ ID NO: 139186 - RNA, 1701 nt, Artificial Sequence; identical to SEQ ID NO: 139185
  derived and/or modified CDS sequence (opt3) from hemagglutinin__InfluenzaA__AHL80828

SEQ ID NO: 139187 - RNA, 1701 nt, Artificial Sequence
  derived and/or modified CDS sequence (opt3) from hemagglutinin__InfluenzaA__AHL80839
augaaggccauccuggugguccuccuuuacaccuucgcuacagcaaacgccgacacucugugcauuggcuaucacgcgaauaacagcacggauaccguugacacaguguuggagaagaauguaacugugacccauuccgucaacuuacuggaagauaagcacaaugggaaacuauguaagcucagaggaguggcuccccugcaucuugguaaaugcaacauagccggcuggauccuggggaauccugagugugaaucuuugucaacagcaaguagcugguccuacauuguugagaccucuucgucagacaacggaacuugcuauccaggcgauuuuaucgacuacgaggagcucagggagcagcugagcaguguguccucuuucgaacgguuugagauuuucccgaagacaagcuccuggcccaaucacgauucaaacaaggguaucaccgccgcuuguccucaugcaggggccaaaaguuuuuauaagaaucugauauggcucgucaaaaagggaaacagcuacccaaaauuaucucgcuccuauaucaaugacaagggcaaggaagugcugguacuuuggggcauucaccaccccucaacgagcgcugaucaacagaguuuguaccagaacgccgacgcguacguuuucguggggacuucucgauauuccaaaaaguuuaaaccugagaucgcaauucguccaaaggucagagaucaggagggaaggaugaauuacuauuggacccugguggaacccggugacaaaaucacauucgaggccacuggcaaccuaguggucccucgguacgcuuuugccauggaacgcaacgcagggagcggaauaauuaucucggauaccccaguucaugacugcaauacaaccugucaaacgccgaagggcgcuauuaacacuucucuccccuuccagaauauccacccuaucacaauugguaaaugcccaaaguaugugaaguccaccaaacugagacuugccacugggcugaggaacguacccucaauacagagucggggauuguuuggcgcgaucgccggcuucauugaagggggauggacagguaugguggacggcugguacggguaucaucaccagaaugaacaaggaagcggcuacgcagcugaucucaaguccacccagaacgccaucgacaaaauaacgaauaaggucaacucugugauugagaaaaugaauacccaguuuacagcuguugguaaggaguucaaccaccuggaaaagcgcaucgagaauuuaaacaaaaagguggaugacggguuccuggauaucuggacuuacaaugccgaacuccuuguccuguuggagaacgaacgaacccuagacuaucaugauagcaaugugaaaaaccuguacgagaagguaagaucacagcucaaaaacaaugcaaaggagauuggcaacggauguuuugaguucuaucacaagugcgacaauacauguauggaaaguguuaaaaacggcacuuacgauuauccuaaguacuccgaagaggccaaacugaauagggaagagaucgacggggugaaacuugagagcacccggauuuaucaaauacuggcuaucuacucuacagucgcgucaaguuuggugcucgucgugagccugggagcaauuuccuuuuggaugugcucuaacgguucguuacagugccguaucuguaucuga

SEQ ID NO: 139188 - RNA, 1701 nt, Artificial Sequence
  derived and/or modified CDS sequence (opt3) from hemagglutinin__InfluenzaA__AHL80861
augaaggccauccuggugguccuccuuuacaccuucgcuacagcaaacgccgacacucugugcauuggcuaucacgcgaauaacagcacggauaccguugacacaguguuggagaaaaauguaacugugacccauuccgucaacuuacuggaagauaagcacaaugggaaacuauguaagcucagaggaguggcuccccugcaucuugguaaaugcaacauagccggcuggauccuggggaauccugagugugaaucuuugucaacagcaaguagcugguccuacauuguugagaccucuucgucagacaacggaacuugcuauccaggcgauuuuaucgacuacgaggagcucagggagcagcugagcaguguguccucuuucgaacgguuugagauuuucccgaagacaagcuccuggcccaaucacgauucaaacaagggugucaccgccgcuuguccucaugcaggggccaaaaguuuuuauaagaaucugaucuggcucgugaaaaagggaaacagcuacccaaaauuaucuaaguccuauauaaaugacaagggcaaagaaguacugguucuuuggggcauccaccaccccucaacgagcgcugaucaacagaguuuguaccagaacgccgacgcguacguguucgucgggacuucucgcuauuccaagaaauuuaagccugagauugcaauccgaccaaaagugcgugaucaggagggaagaaugaauuacuauuggacccugguggaacccggugacaagauuacauucgaggccacuggcaaccuagucguuccuagguacgcuuuugccauggaacggaacgcagggagcggaaucauaauuucggauaccccagugcaugacugcaauacaaccugucaaacgccgaaaggcgcuaucaacacuucucuccccuuccagaauauucacccuaucacaaucgguaagugcccaaaguauguaaaauccaccaagcugcgccuugccacugggcugagaaacgugcccucaauucagaguaggggauuguuuggcgcgauagccggcuucaucgaagggggauggacagguauggucgacggcugguacggguaucaucaccagaaugaacaaggaagcggcuacgcagcugaucucaaauccacccagaacgccauugacaagaucacgaauaaagugaacucuguuauagagaagaugaauacccaguuuacagcuguggguaaggaguucaaccaccuggaaaaacggauugggaauuuaaacaagaaagucgaugacggcuuccuggauaucuggacuuacaaugccgagcuccuugugcuguuggaaaacgagcgcacccuagacuaucaugauagcaauguaaagaaccuguacgaaaaaguucgaucacagcucaagaacaaugcaaaggagaucggaaacggcuguuuugaguucuaucacaaaugcgacaauacauguauggaaagugugaagaacgggacuuacgauuauccuaaauacuccgaggaagccaagcugaauagagaggaaauugacggagucaaacuugagagcaccaggaucuaucaaauucuggcuauauacucuacaguggcgucaaguuugguccucgugguuagccugggugcaaucuccuuuuggaugugcucuaacggcucguuacagugccggauuuguaucuga

SEQ ID NO: 139189 - RNA, 1701 nt, Artificial Sequence
  derived and/or modified CDS sequence (opt3) from hemagglutinin__InfluenzaA__AHL80872
augaaggccauccuggugguccuccuuuacaccuucgcuacagcaaacgccgacacucugugcauuggcuaucacgcgaauaacagcacggauaccguugacacaguguuggagaaaaauguaacugugacccauuccgucaacuuacuggaagauaagcacaaugggaaacuauguaagcucagaggaguggcuccccugcaucuugguaaaugcaacauagccggcuggauccuggggaauccugagugugaaucuuugucaacagcaaguagcugguccuacauuguugagaccucuucgucagacaacggaacuugcuauccaggcgauuuuaucgacuacgaggagcucagggagcagcugagcaguguguccucuuucgaacgguuugagauuuucccgaagacaagcuccuggcccaaucacgauucaaacaagggugucaccgccgcuuguccucaugcaggggccaaaaguuuuuauaagaaucugaucuggcucgugaaaaagggaaacagcuacccaaaauuaucuaaguccuauauaaaugacaagggcaaagaaguacugguucuuuggggcauccaccaccccucaacgaacgcugaucaacagagcuuguaccagaaugccgacgcguacguguucgucgggacuucccgcuauucuaagaaauuuaagccugagauugcaauccgaccaaaagugcgugaucaggagggaagaaugaacuacuauuggacccugguggaacccggugacaagauuacauucgaggccacuggcaaccuagucguuccuagguacgcuuuugccauggaacggaaugcaggguccggaaucauaauuagcgauaccccagugcaugacugcaacacaaccugucaaacgccgaaaggcgcuaucaauacuucgcuccccuuccagaacauucacccuaucacaaucgguaagugcccaaaguauguaaaaucuaccaagcugcgccuugccacugggcugagaaaugugcccuccauucagucaaggggauuguuuggcgcgauagccggcuucaucgaagggggauggacagguauggucgacggcugguacggguaucaucaccagaacgaacaaggaaguggcuacgcagcugaucucaaaagcacccagaaugccauugacaagaucacgaacaaagugaauaguguuauagagaagaugaacacccaguuuacagcuguggguaaggaguucaaucaccuggaaaaacggauugagaacuuaaauaagaaagucgaugacggguuccuggauaucuggacuuacaacgccgaacuccuugugcuguuggagaaugaacgcacccuagacuaucaugauucuaacguaaagaaccuguacgagaaaguucgaagccagcucaagaauaacgcaaaggagaucggcaauggauguuuugaguucuaucacaaaugcgacaacacauguauggaaucagugaagaauggcacuuacgauuauccuaaauacagugaagaggccaagcugaacagagaagagauugacggggucaaacuugaguccaccaggaucuaucaaauucuggcuauauacagcacaguggcgucuucauugguccucgugguuagucugggagcaaucagcuuuuggaugugcuccaaugguucuuuacagugccggauuuguaucuga

SEQ ID NO: 139190 - RNA, 1701 nt, Artificial Sequence; identical to SEQ ID NO: 131881
  derived and/or modified CDS sequence (opt3) from hemagglutinin__InfluenzaA__AHL80883

SEQ ID NO: 139191 - RNA, 1701 nt, Artificial Sequence; identical to SEQ ID NO: 131881
  derived and/or modified CDS sequence (opt3) from hemagglutinin__InfluenzaA__AHL80894

SEQ ID NO: 139192 - RNA, 1701 nt, Artificial Sequence; identical to SEQ ID NO: 131881
  derived and/or modified CDS sequence (opt3) from hemagglutinin__InfluenzaA__AHL80905

SEQ ID NO: 139193 - RNA, 1701 nt, Artificial Sequence; identical to SEQ ID NO: 134502
  derived and/or modified CDS sequence (opt3) from hemagglutinin__InfluenzaA__AHL80916

SEQ ID NO: 139194 - RNA, 1701 nt, Artificial Sequence; identical to SEQ ID NO: 134903
  derived and/or modified CDS sequence (opt3) from hemagglutinin__InfluenzaA__AHL80927

SEQ ID NO: 139195 - RNA, 1701 nt, Artificial Sequence; identical to SEQ ID NO: 134903
  derived and/or modified CDS sequence (opt3) from hemagglutinin__InfluenzaA__AHL80946

SEQ ID NO: 139196 - RNA, 1701 nt, Artificial Sequence
  derived and/or modified CDS sequence (opt3) from hemagglutinin__InfluenzaA__AHL80958
augaaggccauccuggugguccuccuuuacaccuucgcuacagcaaacgccgacacucugugcauuggcuaucacgcgaauaacagcacggauaccguugacacaguguuggagaaaaauguaacugugacccauuccgucaacuuacuggaagauaagcacaaugggaaacuauguaagcucagaggaguggcuccccugcaucuugguaaaugcaacauagccggcuggauccuggggaauccugagugugaaucuuugucaacagcaaguagcugguccuacauuguugagaccucuucgucagacaacggaacuugcuauccaggcgauuuuaucaauuacgaggagcucagggagcagcugagcaguguguccucuuucgaacgguuugagauuuucccgaagaucagcuccuggcccaaccacgacucaaauaagggugucacagccgcuuguccucaugcaggggccaaaaguuuuuauaagaaccugauauggcucgugaaaaagggaaauagcuacccaaaauuaucuaaguccuauaucaacgauaagggcaaagaaguacugguucuuuggggcauucaccaccccucaaccacggcugaccaacagagcuuguaccagaaugccgaugcguacguguucgucgggacuucucgcuauucuaagaaauuuaagccugagaucgcaauucgaccaaaagugcgugaccaggagggaagaaugaacuacuauuggacccugguggaacccggugauaagaucacauucgaggccacuggcaaccuagucguuccuagguacgcuuuugccauggaacggaaugcaggguccggaauaauuaucagcgacaccucggugcaugauugcaacacaaccugucaaacgccaaaaggcgcuauuaauacuucucucccguuccagaacauccaccccaucacaauugguaagugcccuaaguauguaaaauccaccaagcugcgccuugccacugggcugagaaaugugccaucaauacagaguaggggauuguuuggcgcgaucgccggcuucauugaagggggauggacagguauggucgacggcugguacggguaucaucaccagaacgaacaaggaagcggcuacgcagcugaccucaaauccacccagaaugccaucgauaagauaacgaacaaagugaauaguguuauugagaagaugaacacccaguuuacagcuguggguaaggaguucaaucaccuggaaaaacggaucgagaacuuaaauaagaaagucgacgauggguuccuggacaucuggacuuacaacgccgaacuccuugugcuguuggagaaugaacgcacccuagauuaucaugacagcaacguaaagaaccuguacgagaaaguucgaaaucagcucaagaacaaugcaaaggagauuggcaacggauguuuugaguucuaucacaaaugcgauaauacauguauggaaucagugaagaacggcacuuacgacuaucccaaauacagugaagaggccaagcugaauagagaagagaucgauggggucaaacuugaguccaccaggauuuaucaaauacuggcuaucuacagcacaguggcgucuucauugguccucgugguuagucugggagcaauuagcuuuuggaugugcuccaacgguucuuuacagugccggaucuguaucuga

SEQ ID NO: 139197 - RNA, 1701 nt, Artificial Sequence
  derived and/or modified CDS sequence (opt3) from hemagglutinin__InfluenzaA__AHL81001
augaagaccaucauugcccugagcuacauacucugccuuaucuucgcucagaaacugcccggcaacgacaauuccacagcaacuuuguguuuagggcaccaugccgugccuaacggaacgauugucaagaccaucacaaaugaucaaauugagguuacuaacgcgaccgaacuggugcagucuucaaguacaggugagaucugcaauagcccacaccagauacuagacggcgaaaacuguacccucaucgaugcucugcuuggggacccgcagugcgauggauuucaaaauaaaaagugggaccuguucguagagagauccaaagcccauucuaacuguuaucccuacgaugugccugacuaugcaucguugaggucacucgucgccagcaguggcacucuggaauuuaauaacgaguccuucaauuggacaggugugacccagaacgggacgucuagcgcuugcauucggcgcuccaauaacucauuuuucagucgacugaauuggcucacucacuuaaacuuuaaguacccagcacugaacguuaccaugcccaauaacgagcaguucgauaaguuguauaucuggggagugcaucacccuggcacagacaaagaucagauuuuucuuuacgcccaagcugccggccguaucacugucagcaccaagagaucucagcaggcggugauaccaaauauuggguccaggccccggguacgcaacaucccuucaagaguuagcauuuauuggacaaucgugaaaccaggagacauccugcuaauuaauaguaccgguaaccucauagcaccgaggggcuacuucaagauccggucugggaaauccagcauuaugcgcucggaugcccccaucggaaaguguaauucugcuugcauaacgccuaacggcuccauuccaaaugacaagcccuuucagaacgucaaucgaaucacuuacggugccuguccuagauaugugaaacaaaacacacugaaacuugcaaccgggaugaggaaugugccagaaaaacagacucggggaaucuucggcgcuauugccggcuuuaucgagaacgggugggaaggaauggucgacgguugguacggcuuccgucaccaaaauucagaggggcgcggacaggcggccgaucugaagaguacacaggcagcuauugaccagauaaacggcaaauugaacagacucaucgguaagaccaaugagaaauuccaucagauugaaaaggaguuuagcgaaguugaggggaggauccaagaucuggaaaaguauguggaggacacgaaaaucgauuuaugguccuacaacgccgagcugcucguagcucuugaaaaucagcacaccauugaccugacagauucugagaugaacaaguuguucgaaaagacuaagaaacagcuacgggagaaugccgaagacaugggcaacggaugcuuuaagauauaucauaagugugauaaugcaugcaucggcagcauucgaaacgggaccuacgaccacgauguguaucgcgacgaggcccugaauaacagauuccagaucaaaggagucgagcucaagucagguuacaaagacuggauucuguggaucaguuuugcuauauccugcuuccuucuguguguggcguugcucggcuuuaucaugugggcaugccaaaaggggaauauuagguguaacaucugcauuuga

SEQ ID NO: 139198 - RNA, 1701 nt, Artificial Sequence; identical to SEQ ID NO: 134903
  derived and/or modified CDS sequence (opt3) from hemagglutinin__InfluenzaA__AHL81013

SEQ ID NO: 139199 - RNA, 1701 nt, Artificial Sequence; identical to SEQ ID NO: 134903
  derived and/or modified CDS sequence (opt3) from hemagglutinin__InfluenzaA__AHL81025

SEQ ID NO: 139200 - RNA, 1701 nt, Artificial Sequence; identical to SEQ ID NO: 134903
  derived and/or modified CDS sequence (opt3) from hemagglutinin__InfluenzaA__AHL81037

SEQ ID NO: 139201 - RNA, 1701 nt, Artificial Sequence; identical to SEQ ID NO: 134903
  derived and/or modified CDS sequence (opt3) from hemagglutinin__InfluenzaA__AHL81049

SEQ ID NO: 139202 - RNA, 1701 nt, Artificial Sequence; identical to SEQ ID NO: 139196
  derived and/or modified CDS sequence (opt3) from hemagglutinin__InfluenzaA__AHL81061

SEQ ID NO: 139203 - RNA, 1701 nt, Artificial Sequence; identical to SEQ ID NO: 139196
  derived and/or modified CDS sequence (opt3) from hemagglutinin__InfluenzaA__AHL81072

SEQ ID NO: 139204 - RNA, 1701 nt, Artificial Sequence; identical to SEQ ID NO: 136409
  derived and/or modified CDS sequence (opt3) from hemagglutinin__InfluenzaA__AHL81083

SEQ ID NO: 139205 - RNA, 1701 nt, Artificial Sequence; identical to SEQ ID NO: 134903
  derived and/or modified CDS sequence (opt3) from hemagglutinin__InfluenzaA__AHL81095

SEQ ID NO: 139206 - RNA, 1701 nt, Artificial Sequence
  derived and/or modified CDS sequence (opt3) from hemagglutinin__InfluenzaA__AHL81118
augaaggccauccuggugguccuccuuuacaccuucgcuacagcaaacgccgacacucugugcauuggcuaucacgcgaauaacagcacggauaccguugacacaguguuggagaaaaauguaacugugacccauuccgucaacuuacuggaagauaagcacaaugggaaacuauguaagcucagaggaguggcuccccugcaucuugguaaaugcaacauagccggcuggauccuggggaauccugagugugaaucuuugucaacagcaaguagcugguccuacauuguugagaccucuucgucagacaacggaacuugcuauccaggcgauuuuaucaauuacgaggagcucagggagcagcugagcaguguguccucuuucgaacgguuugagauuuucccgaagacaaacagcuggcccaaucacgacuccaacaagggugucaccgccgcuuguccucaugcaggggccaaaucauuuuauaagaaucugaucuggcucgugaaaaagggaaacaguuacccaaaauuaagcaagucuuauauaaaugauaagggcaaagaaguacugguucuuuggggcauccaccaccccuccacgacugcugaccaacagucauuguaccagaacgccgaugcguacguguucgucgggaccagccgcuauaguaagaaauuuaagccugagauugcaauccgaccaaaagugcgugaccaggagggaagaaugaacuacuauuggacacugguggaacccggugauaagauuacuuucgaggccaccggcaaucuagucguuccuagguacgcuuuugccauggaacggaacgcagggucuggaaucauaauuuccgacacaccagugcaugauugcaauaccacgugucaaacuccgaaaggcgcuaucaacacaagccuccccuuccagaauauucacccuaucaccaucgguaagugcccaaaguauguaaaaucgacuaagcugcgccuugccacagggcugagaaacgugcccucuauucaguccaggggauuguuuggcgcgauagccggcuucaucgaagggggauggaccgguauggucgacggcugguacggguaucaucaccagaaugaacaaggaucaggcuacgcagcugaccucaaaaguacgcagaacgccauugauaagaucaccaauaaagugaacagcguuauagagaagaugaauacacaguuuacugcuguggguaaggaguucaaccaccuggaaaaacggauugagaauuuaaacaagaaagucgacgauggguuccuggacaucuggaccuacaaugccgaacuccuugugcuguuggagaacgaacgcacacuagauuaucaugacuccaacguaaagaaucuguacgagaaaguucgaaaccagcucaagaauaacgcaaaggagaucggcaauggauguuuugaguucuaucacaaaugcgauaacacuuguauggaaucugugaagaauggcaccuacgacuauccuaaauacagcgaagaggccaagcugaacagagaagagauugauggggucaaacuugagucaacaaggaucuaucaaauucuggcuauauacaguaccguggcguccagcuugguccucgugguuucucugggagcaaucucauuuuggaugugcaguaaugguagcuuacagugccggauuuguaucuga

SEQ ID NO: 139207 - RNA, 1701 nt, Artificial Sequence; identical to SEQ ID NO: 134903
  derived and/or modified CDS sequence (opt3) from hemagglutinin__InfluenzaA__AHL81129

SEQ ID NO: 139208 - RNA, 1701 nt, Artificial Sequence; identical to SEQ ID NO: 134903
  derived and/or modified CDS sequence (opt3) from hemagglutinin__InfluenzaA__AHL81141

SEQ ID NO: 139209 - RNA, 1701 nt, Artificial Sequence; identical to SEQ ID NO: 134903
  derived and/or modified CDS sequence (opt3) from hemagglutinin__InfluenzaA__AHL81153

SEQ ID NO: 139210 - RNA, 1701 nt, Artificial Sequence
  derived and/or modified CDS sequence (opt3) from hemagglutinin__InfluenzaA__AHL81165
augaagaccaucauugcccugagcuacauacucugccuuguguucgcucagaaacugcccggcaacgacaauuccacagcaacuuuguguuuagggcaccaugccgucccuaacggaacgaucguuaagaccauuacaaaugaucaaaucgaggugacuaacgcgaccgaacugguacagucuucaagugcuggugagauuugcgacagcccacaccagauccuagauggcgaaaauuguacacucauagacgcccugcuuggggauccgcagugcgacggauuucaaaacaaaaagugggaucuguucguggagagauccagggcauauucuaauuguuaccccuaugacgucccugauuacgccucguugcggucacucguggcuagcaguggcacccuggaauuuaacaaugaguccuucaacuggacugguguuacacagaaugggaccucuagcgcaugcauccgccgauccaacaauucauuuuucagucgucugaacuggcucacgcauuuaaauuuuaaauauccagcccugaacgugacuaugcccaacaaugagcaguucgacaaacuuuacauuuggggaguccaccauccuggcaccgauaaggaccagaucuuuuuguaugcucaagccagcggcagaauuacagugucuacuaaaaggucccagcaggcgguaaucccaaacauagggucacggccccgcguuagaaauauuccuagcaggaucaguauuuacuggaccaucgugaagccaggagauauccugcuaauuaacucuacagguaaucucauagcaccgcggggcuacuucaaaauccgcuccggaaagagcucgauuaugcgaucugacgcccccaucgggaaauguaacuccgaaugcauaaccccuaauggcucaauuccaaacgacaagcccuuucagaaugucaacagaaucacguauggugcuuguccuagguacgugaagcaaaguacucugaaacuugccacagggaugcggaaugugccagagaagcagacccguggaaucuucggcgcaauugcuggcuuuaucgaaaacgggugggagggaaugauggaugguugguauggcuuccgccaccagaauagcgaggggagaggacaagccgcggaccugaaauccacucaggccgcaauugaucagauaaacggcaaguugaauaggcucaucgguaaaacaaacgaaaaguuccaccagauugagaaagaauuuucugaggucgaagggcggauccaagaccuggagaaguacguugaggauaccaagaucgacuuauggagcuauaacgcugaacugcucguggcccuugagaaucagcauacgauugaucugaccgacucagaaaugaacaaauuguucgagaagacaaagaagcagcuacgagaaaaugcugaggauaugggcaacggaugcuuuaaaauauaccacaagugugacaaugccugcaucggcaguauucgcaacgggacuuaugaucaugacguauacagagacgaggcacugaauaacagguuccagaucaagggaguggaacucaaauccgguuacaaggauuggauucuguggaucagcuuugccauaucuugcuuccuucugugugucgcuuugcucggcuuuaucaugugggcgugccaaaaagggaauauucgguguaacaucugcauuuga

SEQ ID NO: 139211 - RNA, 1701 nt, Artificial Sequence; identical to SEQ ID NO: 139210
  derived and/or modified CDS sequence (opt3) from hemagglutinin__InfluenzaA__AHL81177

SEQ ID NO: 139212 - RNA, 1701 nt, Artificial Sequence; identical to SEQ ID NO: 139197
  derived and/or modified CDS sequence (opt3) from hemagglutinin__InfluenzaA__AHL81189

SEQ ID NO: 139213 - RNA, 1701 nt, Artificial Sequence
  derived and/or modified CDS sequence (opt3) from hemagglutinin__InfluenzaA__AHL81212
augaagaccaucauugcccugagcuacauacucugccuuguguucgcucagaaacugcccggcaacgacaauuccacagcaacuuuguguuuagggcaccaugccgucccuaacggaacgaucguuaagaccauuacaaaugaucaaaucgaggugacuaacgcgaccgaacugguacagucuucaaguacaggugagauuugcaauagcccacaccagauccuagacggcgaaaacuguacccucauagaugcucugcuuggggacccgcagugcgauggauuucaaaauaaaaagugggaccuguucguggagagauccaaagcccauucuaacuguuaucccuacgaugucccugacuaugcaucguugaggucacucguggccagcaguggcacucuggaauuuaagaaugaguccuucaacuggacagguguuacccagaaugggacgucuagcgcuugcauccggcgcuccaacaauucauuuuucagucgacugaacuggcucacucacuuaaauuuuaaguacccagcacugaacgugaccaugcccaacaaugagcaguucgauaaacuuuauauuuggggaguccaucacccuggcacagacaaggaucagaucuuuuuguacgcccaagcugccggccguauuacugugagcaccaaaagaucucagcaggcgguaaucccaaacauaggguccaggccccggguucgcaauauuccuucaagagugagcaucuauuggacaauugucaagccaggagacauccugcuaaucaacaguaccgguaaucucauugcaccgaggggcuacuucaaaauacggucugggaaguccagcaucaugcgcucggaugcccccauuggaaaguguaacucugcuugcaucacgccuaauggcuccauaccaaacgacaaacccuuucagaaugugaaccgaauuacuuacggugccuguccuagauaugugaagcaaaauacacugaaacuugcaaccgggaugaggaacgucccagaaaagcagacucggggaaucuucggcgcuaucgccggcuuuauugagaaugggugggaaggaaugguugacgguugguacggcuuccgucaccagaacucagaggggcgcggacaagcggccgaucugaaaaguacacaggcagcuaucgaccagauuaauggcaaguugaacagacucauagguaaaaccaacgagaaguuccaucagaucgaaaaggaguuuagcgaaguggaggggaggauucaagaucuggaaaaauauguagaggacacgaagaucgauuuaugguccuacaaugccgagcugcucguggcucuugaaaaccagcacaccaucgaccugacagauucugagaugaauaaauuguucgaaaagacuaaaaagcagcuacgggagaacgccgaagacaugggcaauggaugcuuuaagauuuaucauaaaugugauaacgcaugcauaggcagcauccgaaaugggaccuacgaccacgaugucuaucgcgacgaggcccugaacaauagauuccagauuaagggaguggagcucaaaucagguuacaaggacuggauccuguggauuaguuuugcuaucuccugcuuccuucuguguguugcguugcucggcuuuauaaugugggcaugccaaaaagggaacaucagguguaauauuugcaucuga

SEQ ID NO: 139214 - RNA, 1701 nt, Artificial Sequence
  derived and/or modified CDS sequence (opt3) from hemagglutinin__InfluenzaA__AHL81224
augaaggccauccuggugguccuccuuuacaccuucgcuacagcaaacgccgacacucugugcauuggcuaucacgcgaauaacagcacggauaccguugacacaguguuggagaaaaauguaacugugacccauuccgucaacuuacuggaagauaagcacaaugggaaacuauguaagcucagaggaguggcuccccugcaucuugguaaaugcaacauagccggcuggauccuggggaauccugagugugaaucuuugucaacagcaaguagcugguccuacauuguugagaccucuucgucagacaacggaacuugcuauccaggcgauuuuaucgacuacgaagaacucagggagcagcugagcaguguguccucuuucgaacgguuugagauuuucccgaagacaagcuccuggcccaaucacgauucaaacaagggugucaccgccgcuuguccucaugcaggggccaaaggauuuuauaagaaucugaucuggcucgugaaaaagggcaacaguuacccaaaauuaagcaagucuuauauaaaugacaagggcaaagaaguacugguucuuugggggauccaccaccccuccacgacugcugaucaacagucauuguaccagaacgccgacaccuacguguucgucggaacaagccgcuauaguaagaaauuuaagccugagauugcgauccgaccaaaagugcgugaucaggaggguagaaugaauuacuauuggacucugguggaacccggcgacaagauuaccuucgaggcaacagggaaccuagucguuccuagguacgccuuugcuauggaacggaccgccggaucuggcaucauaauuuccgauacgccagugcaugacugcaacacuacaugucaaaccccgaaaggugcaaucaauacuagccuccccuuccagaacauucacccuaucacaaucgggaagugcccaaaguauguaaaaucgaccaagcugcgccuugcuacgggacugagaaaugugcccucuauucaguccaggggcuuguuuggcgccauagcgggguucaucgagggagguuggaccggcauggucgacgggugguacggauaucaucaccagaacgaacaaggcucagguuacgccgcagaucucaaaaguacacagaaugcuauugacaagaucacuaacaaagugaauagcguuauagagaagaugaacacccaguuuacagccguggggaaggaguucaaucaccuggaaaaacggauugagaacuuaaauaagaaagucgaugacggcuuccuggauaucuggacuuacaacgcugaacuccuugugcuguuggagaaugaacgcacccuagacuaucaugauuccaacguaaagaaucuguacgagaaaguucgaaaccagcucaagaacaaugccaaggagaucggaaacggcuguuuugaguucuaucacaaaugcgacaauacauguauggagucugugaagaacgggaccuacgauuauccuaaauacagcgaagaggcaaagcugaauagagaagagauugacggagucaaacuugagucaacuaggaucuaucaaauucuggccauauacaguacgguggcuuccagcuugguccucgugguuucucugggugcgaucucauuuuggaugugcaguaacggcagcuuacagugccggauuuguaucuga

SEQ ID NO: 139215 - RNA, 1701 nt, Artificial Sequence; identical to SEQ ID NO: 134903
  derived and/or modified CDS sequence (opt3) from hemagglutinin__InfluenzaA__AHL81235

SEQ ID NO: 139216 - RNA, 1701 nt, Artificial Sequence; identical to SEQ ID NO: 134903
  derived and/or modified CDS sequence (opt3) from hemagglutinin__InfluenzaA__AHL81247

SEQ ID NO: 139217 - RNA, 1701 nt, Artificial Sequence; identical to SEQ ID NO: 134903
  derived and/or modified CDS sequence (opt3) from hemagglutinin__InfluenzaA__AHL81259

SEQ ID NO: 139218 - RNA, 1701 nt, Artificial Sequence; identical to SEQ ID NO: 134903
  derived and/or modified CDS sequence (opt3) from hemagglutinin__InfluenzaA__AHL81271

SEQ ID NO: 139219 - RNA, 1701 nt, Artificial Sequence; identical to SEQ ID NO: 134903
  derived and/or modified CDS sequence (opt3) from hemagglutinin__InfluenzaA__AHL81283

SEQ ID NO: 139220 - RNA, 1701 nt, Artificial Sequence; identical to SEQ ID NO: 134903
  derived and/or modified CDS sequence (opt3) from hemagglutinin__InfluenzaA__AHL81295

SEQ ID NO: 139221 - RNA, 1701 nt, Artificial Sequence; identical to SEQ ID NO: 139196
  derived and/or modified CDS sequence (opt3) from hemagglutinin__InfluenzaA__AHL81307

SEQ ID NO: 139222 - RNA, 1701 nt, Artificial Sequence; identical to SEQ ID NO: 134915
  derived and/or modified CDS sequence (opt3) from hemagglutinin__InfluenzaA__AHL81329

SEQ ID NO: 139223 - RNA, 1701 nt, Artificial Sequence
  derived and/or modified CDS sequence (opt3) from hemagglutinin__InfluenzaA__AHL81340
augaagaccaucauugcccugagcuacauacucugccuuguguucgcucagaaacugcccggcaacgacaauuccacagcaacuuuguguuuagggcaccaugccgucccuaacggaacgaucguuaagaccauuacaaaugaucaaaucgaggugacuaacgcgaccgaacugguacagucuucaaguacaggugagauuugcgacagcccacaccagauccuagauggcaaaaauuguacccucauagacgcucugcuuggggauccgcagugcgacggauuucaaaacaagaaaugggaucuguucguggaaagauccaaggccuauucuaauuguuaccccuaugacgucccugauuacgcaucguugaggucacucguggccagcaguggcacucuggaguuuaacaaugaauccuucaacuggacagguguuacccaggacgggacgucuagcgcuugcauccggggauccaaaaauucauuuuucagucgccugaacuggcucacucauuuaaauuuuaaauauccagcacugaacgugaccaugcccaauaacgagcaguucgauaagcuguacauuuggggcguccaccauccuggcacagacaaagaucagaucuuuuuguaugcccaagcuagcgggcgaauuacugugucuaccaagcguucccagcaggccgcgaucccaaacauaggaucaagacccaggguacggaauauuccuagccgcaucaguauuuacuggacaaucguuaaaccaggugacauccugcuaauuaacucuaccggcaaucucauagcaccgagaggguacuucaagaucagguccggaaagagcucgauuaugcggucugacgcccccaucggcaaauguaacuccgagugcauaacgccuaaugguucaauuccaaacgauaagcccuuucagaaugugaaccgcaucacuuauggggcuuguccucgauacgucaaacaaaauacacugaaacuugccaccggaaugagaaacgugccagaaaagcagacuaggggcaucuucggcgcaauugcuggguuuaucgagaauggaugggaagguaugguggacggcugguauggguuccggcaccagaacagugagggacguggccaagccgcggaucuuaagagcacacaggccgcaauugaccagauaaaugguaaauugaaccgccucaucgggaagaccaaugagaaguuccaccagauugaaaaagaguuuuccgaagucgagggcagaauccaagaucuggaaaaguacguugaggacacgaaaaucgauuuauggucuuauaacgcugagcugcucguggcccuugaaaaccagcauaccauugaccugacagauagcgagaugaauaaguuguucgaaaagacuaagaagcagcuaagggagaacgcugaagacaugggaaauggcugcuuuaaaauauaccacaagugugauaacgccugcaucgggucaauucggaauggaaccuauaaccaugacguauaccgagacgaggcacugaauaaacgcuuccagaucaaggguauugagcucaaaaguggcuacaaggauuggauccuguggauauccuuugccaucagcugcuuccuucuguguguggcuuugcucggguuuauuaugugggcgugccaaaagggaaacaucagauguaauauuugcaucuga

SEQ ID NO: 139224 - RNA, 1701 nt, Artificial Sequence; identical to SEQ ID NO: 134903
  derived and/or modified CDS sequence (opt3) from hemagglutinin__InfluenzaA__AHL81352

SEQ ID NO: 139225 - RNA, 1701 nt, Artificial Sequence
  derived and/or modified CDS sequence (opt3) from hemagglutinin__InfluenzaA__AHL81364
augaaggccauccuggugguccuccuuuacaccuucgcuacagcaaacgccgacacucugugcauuggcuaucacgcgaauaacagcacggauaccguugacacaguguuggagaaaaauguaacugugacccauuccgucaacuuacuggaagauaagcacaaugggaaacuauguaagcucagaggaguggcuccccugcaucuugguaaaugcaacauagccggcuggauccuggggaauccugagugugaaucuuugucaacagcaaguagcugguccuacauuguugagaccucuucgucagacaacggagccugcuauccaggcgauuuuaucaauuacgaggagcucagggagcagcugagcaguguguccucuuucgaacgguuugagauuuucccgaagacuaacagcuggcccaaucacgacuccaacaagggugucacagcugcauguccucaugccggggcuaaaucauuuuauaagaaucugaucuggcucgugaaaaagggaaacaguuacccaaaauuaagcaagucuuauauaaaugauaagggcaaagaaguacugguucuuuggggcauccaccaccccuccaccacggccgaccaacagucauuguaccagaacgcggaugcauacguguucgucgggacuagccgcuauaguaagaaauuuaagccugagauugccauccgaccaaaagugcgugaccaggagggaagaaugaacuacuauuggacccugguggaacccggugauaagauuacauucgaggcuacuggcaaucuagucguuccuagguacgccuuugcaauggaacggaacgcugggucuggaaucauaauuuccgacaccccagugcaugauugcaauacaaccugucaaacgccgaaaggcgccaucaacacuagccuccccuuccagaauauucacccuaucacaaucgguaagugcccaaaguauguaaaaucgaccaagcugcgccuugcgacugggcugagaaacgugcccucuauucaguccaggggauuguuuggcgccauagcaggcuucaucgaagggggauggacagguauggucgacggcugguacggguaucaucaccagaaugaacaaggaucaggcuacgcugccgaccucaaaaguacccagaacgcuauugauaagaucacgaauaaagugaacagcguuauagagaagaugaauacccaguuuacagccguggguaaggaguucaaccaccuggaaaaacggauugagaauuuaaacaagaaagucgacgauggguuccuggacaucuggacuuacaaugcagaacuccuugugcuguuggagaacgaacgcacccuagauuaucaugacuccaacguaaagaaucuguacgagaaaguucgaaaccagcucaagaauaacgccaaggagaucggcaauggauguuuugaguucuaucacaaaugcgauaacacauguauggaaucugugaagaauggcacuuacgacuauccuaaauacagcgaagaggcuaagcugaacagagaagagauugauggggucaaacuugagucaaccaggaucuaucaaauucuggcgauauacaguacaguggcauccagcuugguccucgugguuucucugggagccaucucauuuuggaugugcaguaaugguagcuuacagugccggauuuguaucuga

SEQ ID NO: 139226 - RNA, 1701 nt, Artificial Sequence
  derived and/or modified CDS sequence (opt3) from hemagglutinin__InfluenzaA__AHL81386
augaaggccauccuggugguccuccuuuacaccuucgcuacagcaaacgccgacacucugugcauuggcuaucacgcgaauaacagcacggauaccguugacacaguguuggagaaaaauguaacugugacccauuccgucaacuuacuggaagauaagcacaaugggaaacuauguaagcucagaggaguggcuccccugcaucuugguaaaugcaacauagccggcuggauccuggggaauccugagugugaaucuuugucaacagcaaguagcugguccuacauuguugagaccucuucgucagacaacggaacuugcuauccaggcgauuuuaucaauuacgaggagcucagggagcagcugagcaguguguccucuuucgaacgguuugagauuuucccgaagacaaacagcuggcccaaucacgacuccaacaagggugucaccgccgcuuguccucaugcaggggugaaaucauuuuauaagaaucugaucuggcucguuaaaaagggaaacaguuacccaaaauuaagcaagucuuauauaaaugauaagggcaaagaaguacuggugcuuuggggcauccaccaccccuccacgacugccgaccaacagucauuguaccagaacgcugaugccuacgucuucguggggaccagccgcuauaguaagaaauuuaagccugagauugcgauccgaccaaaagugcgugaccaggagggaagaaugaacuacuauuggacacuggucgaacccggugauaagauuacuuucgaggcaaccggcaaucuaguugugccuagguacgccuuugcuauggaacggaacgccgggucuggaaucauaauuuccgacacaccaguacaugauugcaauaccacgugucaaacuccgaaaggcgcaaucaacacaagccuccccuuccagaauauucacccuaucaccaucgguaagugcccaaaguaugugaaaucgacuaagcugcgccuugcuacagggcugagaaacguccccucuauucaguccaggggauuguuuggcgccauagcgggcuucaucgaagggggauggaccgguaugguggacggcugguacggguaucaucaccagaaugaacaaggaucaggcuacgccgcagaccucaaaaguacgcagaacgcuauugauaagaucaccaauaaaguuaacagcgugauagagaagaugaauacacaguuuacugccgucgguaaggaguucaaccaccuggaaaaacggauugagaauuuaaacaagaaaguggacgauggguuccuggacaucuggaccuacaaugcugaacuccuuguacuguuggagaacgaacgcacacuagauuaucaugacuccaacguuaagaaucuguacgagaaagugcgaaaccagcucaagaauaacgccaaggagaucggcaauggauguuuugaguucuaucacaaaugcgauaacacuuguauggaaucugucaagaauggcaccuacgacuauccuaaauacagcgaagaggcaaagcugaacagagaagagauugauggggugaaacuugagucaacaaggaucuaucaaauucuggccauauacaguaccgucgcuuccagcuuggugcucguugugucucugggagcgaucucauuuuggaugugcaguaaugguagcuuacagugccggauuuguaucuga

SEQ ID NO: 139227 - RNA, 1701 nt, Artificial Sequence; identical to SEQ ID NO: 134903
  derived and/or modified CDS sequence (opt3) from hemagglutinin__InfluenzaA__AHL81397

SEQ ID NO: 139228 - RNA, 1701 nt, Artificial Sequence; identical to SEQ ID NO: 139213
  derived and/or modified CDS sequence (opt3) from hemagglutinin__InfluenzaA__AHL81409

SEQ ID NO: 139229 - RNA, 1701 nt, Artificial Sequence; identical to SEQ ID NO: 139183
  derived and/or modified CDS sequence (opt3) from hemagglutinin__InfluenzaA__AHL81419

SEQ ID NO: 139230 - RNA, 1701 nt, Artificial Sequence; identical to SEQ ID NO: 131881
  derived and/or modified CDS sequence (opt3) from hemagglutinin__InfluenzaA__AHL81430

SEQ ID NO: 139231 - RNA, 1701 nt, Artificial Sequence; identical to SEQ ID NO: 128678
  derived and/or modified CDS sequence (opt3) from hemagglutinin__InfluenzaA__AHL88951

SEQ ID NO: 139232 - RNA, 1701 nt, Artificial Sequence; identical to SEQ ID NO: 128678
  derived and/or modified CDS sequence (opt3) from hemagglutinin__InfluenzaA__AHL89030

SEQ ID NO: 139233 - RNA, 1701 nt, Artificial Sequence
  derived and/or modified CDS sequence (opt3) from hemagglutinin__InfluenzaA__AHL89042
augaagaccaucauugcccugagcuacauacucugccuuguguucgcucagaaacugcccggcaacgacaauuccacagcaacuuuguguuuagggcaccaugccgucccuaacggaacgaucguuaagaccauuacaaaugaucaaaucgaggugacuaacgcgaccgaacugguacagucuucaaguacaggugagauuugcgacagcccacaccagauccuagauggcgaaaauuguacccucauagacgcucugcuuggggauccgcagugcgacggauuucaaaacaaaaagugggaucuguucguggagagauccaaagccuauucuaauuguuaccccuaugacgucccugauuacgcaucguugaggucacucguggccagcaguggcacucuggaauuuaacaaugagaacuucaauuggacagguguuacccagaacgggacguccucugcuugcaagcggcgcagcaauaacuccuuuuucucacgacugaauuggcucacucauuuaaaguuuaaauauccagcacugaacgugaccaugcccaacaaugagaaguucgacaaacuuuacaucuggggaguccaccauccuggcacagauaacgaccagauuuuucuuuaugcccaggcuaguggccguaucacugugagcaccaagagaucucaacagacaguaauuccaaauaucggguccaggccccggguucgcaacauaccuucaagaauuagcaucuacuggaccauugugaaaccaggagauauccugcuaaucaauaguacggguaaccucauugccccgaggggcuacuucaagauacggucugggaaguccagcaucaugcgcucggacgcgcccauuggaaaauguaauucugaaugcaucacuccuaacggcuccauaccaaaugacaagcccuuucagaacgucaaucgaauuacauauggugcauguccuagauacgugaaacagaacacccugaaguuggccacugggaugaggaaugugccagagaaacaaacacggggaaucuucggcgcuaucgccggcuuuauugaaaacgggugggagggaauggucgaugguugguauggcuuccgucaccaaaauucagaggggaucggacaggcagcugaccugaagaguacccaggccgcgauuaaccagauaaacggcaaauugaaucgccucaucgguaagacgaacgaaaaguuccaccagauugagaaagaauuuagcgagguugaagggagaauccaggaucuggagaaguacguggaggacaccaaaaucgauuuaugguccuauaaugccgaacugcucguagcacuugagaaccaacauacaauugaccugacugauucugaaaugaauaaguuguucgagaggaccaaaaagcagcuacgggaaaacgcugaggacaugggcaauggaugcuuuaagauauaccacaaaugugauaacgccugcaucggcagcauucgaaaugggacauaugaccaugauguguaccgcgacgaggcucugaacaauagauuccagaucaagggagucgaacucaaaucagguuacaaggacuggauucuguggaucaguuuugccauauccugcuuccuucuguguguggcauugguuggcuuuaucaugugggccugccagaaagggaacauuagguguaauaucugcauuuga

SEQ ID NO: 139234 - RNA, 1701 nt, Artificial Sequence
  derived and/or modified CDS sequence (opt3) from hemagglutinin__InfluenzaA__AHL89054
augaagaccaucauugcccugagcuacauacucugccuuguguucgcucagaaacugcccggcaacgacaauuccacagcaacuuuguguuuagggcaccaugccgucccuaacggaacgaucguuaagaccauuacaaaugaucaaaucgaggugacuaacgcgaccgaacugguacagucuucaaguacagguggcauuugcgacagcccacaccagauccuagauggggagaauuguacccucauagacgcucugcuuggagauccgcagugcgacggcuuucaaaacaaaaagugggaucuguucguggaaagauccaaagccuauucuaauuguuaccccuaugacgucccugauuacgcaucguugaggucacucguggccagcagugguacucuggaguuuaacaaugaauccuucaacuggacagggguuacccagaauggaacgucuagcgcuugcaagcggcgcuccaacaauucauuuuucagucgacugaacuggcucacucauuuaaaguuuaaauauccagcacugaaugugaccaugcccaacaacgagaaguucgacaaacuuuacaucuggggcguccaccauccuggcacagauaaugaccagaucuuuuuguaugcccaggcuagcgggcguauuacugugucuaccaagagaucccaacagacaguaauuccaaacaucggaucaaggccccggguucgcaauauaccuagcagaauuaguaucuacuggaccauugugaaaccaggugauauccugcuaaucaacucuacgggcaaucucauugccccgaggggguacuucaagauacgguccggaaagagcucgaucaugcgcucugacgcgcccauuggcaaauguaacuccgagugcaucacuccuaaugguucaauaccaaacgacaagcccuuucagaaugucaaccgaauuacauauggggcauguccuagauacgugaaacagaauacccugaagcuggccacuggaaugaggaacgugccagaaaaacaaacacggggcaucuucggcgcuaucgccggguuuauugagaauggaugggaagguauggucgauggcugguauggguuccgucaccagaacagugagggaaucggccaggcagcugaccuuaagagcacccaagccgcgauuaaucagauaaacgguaaauugaaccgccucaucgggaagacgaaugagaaguuccaccagauugaaaaagaguuuuccgaaguugagggcagaauccaggaucuggaaaaguacguggaggacaccaaaaucgauuuauggucuuauaacgccgagcugcucguagcacuugaaaaucaacauacaauugaccugacugauagcgagaugaacaaguuguucgaaaggaccaaaaagcagcuacgggagaaugcugaagacaugggaaacggcugcuuuaagauauaccacaaaugugauaaugccugcaucgggucaauucgaaacggaacauaugaccaugauguguaccgcgacgaggcucugaauaacagauuccagaucaagggugucgagcucaaaaguggcuacaaggacuggauucuguggaucuccuuugccaugagcugcuuccuucuguguguggcauugcucggguuuauaaugugggccugccagaaaggaaauaucagguguaacauuugcaucuga

SEQ ID NO: 139235 - RNA, 1701 nt, Artificial Sequence; identical to SEQ ID NO: 129629
  derived and/or modified CDS sequence (opt3) from hemagglutinin__InfluenzaA__AHL89066

SEQ ID NO: 139236 - RNA, 1701 nt, Artificial Sequence
  derived and/or modified CDS sequence (opt3) from hemagglutinin__InfluenzaA__AHL89078
augaagaccaucauugcccugagcuacauacucugccuuguguucgcucagaaacugcccggcgacgauaacuccacagcaacuuuguguuuagggcaccaugccgucccuaauggaacgguugugaagaccaucacaaacgaccaaauugagguaacuaaugcgaccgaacuggugcagucuucaaguacagguggcaucugcgauagcccacaccagauucuagacggggagaacuguacccucaucgaugcucugcuuggagacccgcagugcgauggcuuucaaaauaaaaagugggaccuguucgucgaaagauccaaagccuauucuaacuguuaccccuaugaugugccugacuacgcaucguugaggucacucguugccagcagugguacucuggaguuuaauaacgaauccuucaauuggacaggggugacccagaacggaacgucuagcgcuugcaagcggcgcuccaauaacucauuuuucagucgacugaauuggcucacucauuuaaaguuuaaauauccagcacugaacgucaccaugcccaauaacgagaaguucgauaaacuuuacauauggggcgugcaccauccuggcacagacaacgaucagaucuuuuuguaugcccaggcuagcgggcguauuacuguaucuaccaagagaucccaacagacaguuaucccaaauauuggaucaaggccccgggugcgcaacaucccuagcagaauaaguauuuacuggaccaucgucaaaccaggugacauucugcuaaucaauucuacgggcaaccucaucgccccgaggggguacuucaagauucgguccggaaagagcucgauaaugcgcucugacgcgcccaucggcaaauguaauuccgagugcauuacuccuaacgguucaaucccaaaugauaagcccuuucagaacgugaaucgaauaacauauggggcauguccuagauacgugaaacagaacacccugaagcuggccacuggaaugaggaaugucccagaaaaacaaacacggggcauuuucggcgcuaucgccggguuuaucgagaacggaugggaagguaugguugacggcugguauggguuccgucaccagaauagugagggaauuggccaggcagcugaucuuaagagcacccaagccgcgaucaaccagauuaaugguaaauugaaccgccucauagggaagacgaacgagaaguuccaccagaucgaaaaagaguuuuccgaaguggagggcaggauucaggaccuggaaaaguacguagaggauaccaaaaucgacuuauggucuuauaaugccgagcugcucguggcacuugaaaaccaacauacaaucgaucugacugacagcgagaugaauaaguuguucgaaagaaccaaaaagcagcuacgggagaacgcugaagauaugggaaauggcugcuuuaagauuuaccacaaaugugacaacgccugcauagggucaauccgaaauggaacauaugaucaugacgucuaccgcgacgaggcucugaacaauagauuccagauuaaggguguggagcucaaaaguggcuacaaggauuggauccuguggauuuccuuugccaucagcugcuuccuucuguguguugcauugcucggguuuauaaugugggccugccagaaaggaaacaucagguguaauauuugcaucuga

SEQ ID NO: 139237 - RNA, 1701 nt, Artificial Sequence
  derived and/or modified CDS sequence (opt3) from hemagglutinin__InfluenzaA__AHL89090
augaagaccaucauugcccugagcuacauacucugccuuguguucgcucagaaacugcccggcaacgacaauuccacagcaacuuuguguuuagggcaccaugccgucccuaacggaacgaucguuaagaccauuacaaaugaucaaaucgaggugacuaacgcgaccgaacugguacagucuucaaguacagguggcauuugcgacagcccauaucagauccuagauggggagaauuguacccucauagacgcucugcuuggagauccgcagugcgacggcuuucaaaacaaaaagugggaucuguucguggaaagauccaaagccuacucuaauuguuaucccuacgacgucccugauuaugcaucguugaggucacucguggccagcagugguacucuggaguuuaacaaugaauccuucaacuggacagggguuacccagaauggaacgucuagcgcuugcaagcggcgcuccaacaauucauuuuucagucgacugaacuggcucacucacuuaaaguuuaaauacccagcacugaaugugaccaugcccaacaacgagaaguucgacaaacuuuauaucuggggcguccaucacccuggcacagauaaugaccagaucuuuuuguacgcccaggcuagcgggcguauuacugugucuaccaagagaucccaacagacaguaauuccaaacaucggaucaaggccccggguucgcaauauaccuagcagaauuaguaucuacuggaccauugugaaaccaggugauauccugcuaaucaacucuacgggcaaucucauugccccgaggggguauuucaagauacgguccggaaagagcucgaucaugcgcucugacgcgcccauuggcaaauguaacuccgagugcaucacuccuaaugguucaauaccaaacgacaagcccuuucagaaugucaaccgaauuacauacggggcauguccuagauaugugaaacagaauacccugaagcuggccacuggaaugaggaacgugccagaaaaacaaacacggggcaucuucggcgcuaucgccggguuuauugagaauggaugggaagguauggucgauggcugguacggguuccgucaucagaacagugagggaaucggccaggcagcugaccuuaagagcacccaagccgcgauuaaucagauaaacgguaaauugaaccgccucaucgggaagacgaaugagaaguuccaccagauugaaaaagaguuuuccgaaguugagggcagaauccaggaucuggaaaaguauguggaggacaccaaaaucgauuuauggucuuacaacgccgagcugcucguagcacuugaaaaucaacacacaauugaccugacugauagcgagaugaacaaguuguucgaaaggaccaaaaagcagcuacgggagaaugcugaagacaugggaaacggcugcuuuaagauauaucauaaaugugauaaugccugcaucgggucaauucgaaacggaacauacgaccacgauguguaccgcgacgaggcucugaauaacagauuccagaucaagggugucgagcucaaaaguggcuauaaggacuggauucuguggaucuccuuugccauaagcugcuuccuucuguguguggcauugcucggguuuaucaugugggccugccagaaaggaaauauuagguguaacaucugcauuuga

SEQ ID NO: 139238 - RNA, 1701 nt, Artificial Sequence; identical to SEQ ID NO: 128678
  derived and/or modified CDS sequence (opt3) from hemagglutinin__InfluenzaA__AHL89102

SEQ ID NO: 139239 - RNA, 1701 nt, Artificial Sequence; identical to SEQ ID NO: 128678
  derived and/or modified CDS sequence (opt3) from hemagglutinin__InfluenzaA__AHL89114

SEQ ID NO: 139240 - RNA, 1701 nt, Artificial Sequence
  derived and/or modified CDS sequence (opt3) from hemagglutinin__InfluenzaA__AHL89126
augaagaccaucauugcccugagcuacauacucugccuuguguucgcucagaaacugcccggcaacgacaauuccacagcaacuuuguguuuagggcaccaugccgucccuaacggaacgaucguuaagaccauuacaaaugaucaaaucgaggugacuaacgcgaccgaacugguacagucuucaaguacagguggcauuugcgacagcccacaccagauccuagauggggagaauuguacccucauagacgcucugcuuggagauccgcagugcgacggcuuucaaaacaaaaagugggaucuguucguggaaagauccaaagccuauucuaauuguuaccccuaugacgucccugauuacgcaucguugaggucacucguggccagcagugguacucuggaguuuaacaaugaaaacuucaauuggacagggguuacccagaacggaacguccucugcuugcaagcggcgcagcaauaacuccuuuuucucacgacugaauuggcucacucauuuaaaguuuaaauauccagcacugaacgugaccaugcccaacaaugagaaguucgacaaacuuuacaucuggggcguccaccauccuggcacagauaacgaccagauuuuucuuuaugcccaggcuagugggcguaucacugugagcaccaagagaucucaacagacaguaauuccaaauaucggauccaggccccggguucgcaacauaccuucaagaauuagcaucuacuggaccauugugaaaccaggugauauccugcuaaucaauaguacgggcaaccucauugccccgaggggguacuucaagauacggucuggaaaguccagcaucaugcgcucggacgcgcccauuggcaaauguaauucugagugcaucacuccuaacgguuccauaccaaaugacaagcccuuucagaacgucaaucgaauuacauauggggcauguccuagauacgugaaacagaacacccugaaguuggccacuggaaugaggaaugugccagaaaaacaaacacggggcaucuucggcgcuaucgccggguuuauugagaacggaugggaagguauggucgauggcugguauggguuccgucaccaaaauucagagggaaucggccaggcagcugaccugaagaguacccaggccgcgauuaaccagauaaacgguaaauugaaucgccucaucgggaagacgaacgagaaguuccaccagauugaaaaagaguuuagcgaaguugagggcagaauccaggaucuggaaaaguacguggaggacaccaaaaucgauuuaugguccuauaaugccgagcugcucguagcacuugaaaaccaacauacaauugaccugacugauucugagaugaauaaguuguucgaaaggaccaaaaagcagcuacgggagaacgcugaagacaugggaaauggcugcuuuaagauauaccacaaaugugauaacgccugcaucgggagcauucgaaauggaacauaugaccaugauguguaccgcgacgaggcucugaacaauagauuccagaucaagggugucgagcucaaaucaggcuacaaggacuggauucuguggaucaguuuugccauauccugcuuccuucuguguguggcauugcucggguuuaucaugugggccugccagaaaggaaacauuagguguaauaucugcauuuga

SEQ ID NO: 139241 - RNA, 1701 nt, Artificial Sequence
  derived and/or modified CDS sequence (opt3) from hemagglutinin__InfluenzaA__AHL89138
augaagaccaucauugcccugagcuacauacucugccuuguguucgcucagaaacugcccggcaacgacaauuccacagcaacuuuguguuuagggcaccaugccgucccuaacggaacgaucguuaagaccauuacaaaugaucaaaucgaggugacuaacgcgaccgaacugguacagucuucaaguacaggugagauuugcgacagcccacaccagauccuagauggcgaaaauuguacccucauagacgcucugcuuggggauccgcagugcgacggauuucaaaacaaaaagugggaucuguucguggagagauccaaagccuauucuaauuguuaccccuaugacgucccugauuacgcaucguugaggucacucguggccagcaguggcacucuggaauuuaacaaugaguccuucaacuggacagguguuacccagaaugggacgucuagcgcuugcaagcggcgcuccaacaauucauuuuucagucgacugaacuggcucacucauuuaaaguuuaaauauccagcacugaaugugaccaugcccaacaacgagaaguucgacaaacuuuacaucuggggaguccaccauccuggcacagauaaugaccagauuuuucuuuaugcccagagcucuggccguaucacuguguccaccaagagaucacaacagacaguaauuccaaacaucgggagcaggccccggguucgcaauauaccuaguagaauuucuaucuacuggaccauugugaaaccaggagauauccugcuaaucaacuccacggguaaucucauugcuccgaggggcuacuucaagauacggagcgggaagucgucuaucaugcgcuccgacgcccccauuggaaaauguaacucagaaugcaucacuccuaauggcaguauaccaaacgacaagcccuuucagaaugucaaccgaauuacauauggugcguguccuagauacgugaaacagaauacccugaaguuggcaacugggaugaggaacgugccagagaaacaaacacggggaaucuucggcgccaucgcuggcuuuauugaaaaugggugggagggaauggucgaugguugguauggcuuccgucaccagaacagcgaggggaucggacaggccgcagaccugaaguccacccaagcugccauuaaucagauaaacggcaaauugaaccgccucaucgguaagacgaaugaaaaguuccaccagauugagaaagaauuuucugagguugaagggagaauccaggaucuggagaaguacguggaggacaccaaaaucgauuuauggagcuauaacgcggaacugcucguagcccuugagaaucaacauacaauugaccugacugauucagaaaugaacaaguuguucgagaggaccaaaaagcagcuacgggaaaaugcagaggacaugggcaacggaugcuuuaagauauaccacaaaugugauaaugcuugcaucggcaguauucgaaacgggacauaugaccaugauguguaccgcgacgaggcccugaauaacagauuccagaucaagggagucgaacucaaauccgguuacaaggacuggauucuguggaucagcuuugcuauaucuugcuuccuucuguguguggccuugcucggcuuuaucaugugggcaugccagaaagggaauauuagguguaacaucugcauuuga

SEQ ID NO: 139242 - RNA, 1701 nt, Artificial Sequence
  derived and/or modified CDS sequence (opt3) from hemagglutinin__InfluenzaA__AHL89150
augaagaccaucauugcccugagcuacauacucugccuuguguucgcucagaaacugcccggcaacgacaauuccacagcaacuuuguguuuagggcaccaugccgucccuaacggaacgaucguuaagaccauuacaaaugaucaaaucgaggugacuaacgcgaccgaacugguacagucuucaaguacagguggcauuugcgacagcccacaccagauccuagauggggagaauuguacccucauagacgcucugcuuggagauccgcagugcgacggcuuucaaaacaaaaagugggaucuguucguggaaagauccaaagccuauucuaauuguuaccccuaugacgucccugauuacgcaucguugaggucacucguggccagcagugguacucuggaguuuaacaaugaauccuucaacuggacagggguuacccagaauggaacgucuagcgcuugcaagcggcgcuccaacaauucauuuuucagucgacugaacuggcucacucauuuaaaguuuaaauauccagcacugaaugugaccaugcccaacaacgagaaguucgacaaacuuuacaucuggggcguccaccauccuggcacagauaaugaccagaucuuuuuguaugcccaggcuagcgggcguauuacugugucuaccaagagaucccaacagacaguaauuccaaacaucggaucaaggccccggguucgcaauauaccuagcagaauuaguaucuacuggaccauugugaaaccaggugauauccugcuaaucaacucuacgggcaaucucauugccccgaggggguacuucaagauacgguccggaaagagcucgaucaugcgcucugacgcgcccauuggcaaauguaacuccgagugcaucacuccuaaugguucaauaccaaacgacaagcccuuucagaaugucaaccgaauuacauauggggcauguccuagauacgugaaacagaauacccugaagcuggccacuggaaugaggaacgugccagaaaaacaaacacggggcaucuucggcgcuaucgccggguuuauugagaauggaugggaagguauggucgauggcugguauggguuccgucaccagaacagugagggaaucggccaggcagcugaccuuaagagcacccaagccgcgauuaaucagauaaacgguaaauugaaccgccucaucgggaagacgaaugagaaguuccaccagauugaaaaagaguuuuccgaaguugagggcagaauccaggaucuggaaaaguacguggaggacaccaaaaucgauuuauggucuuauaacgccgagcugcucguagcacuugaaaaucaacauacaauugaccugacugauagcgagaugaacaaguuguucgaaaggaccaaaaagcagcuacgggagaaugcugaagacaugggaaacggcugcuuuaagauauaccacaaaugugauaaugccugcaucgggucaauucgaaacggaacauaugaccaugauguguaccgcgacgaggcucugaauaacagauuccagaucaagggugucgagcucaaaaguggcuacaaggacuggauucuguggaucuccuuugccauaagcugcuuccuucuguguguggcauugcucguuuuuaucaugugggccugccagaaagggaauauuagguguaacaucugcauuuga

SEQ ID NO: 139243 - RNA, 1701 nt, Artificial Sequence
  derived and/or modified CDS sequence (opt3) from hemagglutinin__InfluenzaA__AHL89162
augaagaccaucauugcccugagcuacauacucugccuuguguucgcucagaaacugcccggcaacgacaauuccacagcaacuuuguguuuagggcaccaugccgucccuaacggaacgaucguuaagaccauuacaaaugaucaaaucgaggugacuaacgcgaccgaacugguacagucuucaaguacagguggcauuugcgacagcccacaccagauccuagauggggagaauuguacccucauagacgcucugcuuggagauccgcagugcgacggcuuucaaaacaaaaagugggaucuguucguggaaagauccaaagccuauucuaauuguuaccccuaugacgucccugauuacgcaucguugaggucacucguggccagcagugguacucuggaguuuaacaaugaauccuucaacuggacagggguuacccagaauggaacgucuagcgcuugcaagcggcgcuccaacaauucauuuuucagucgacugaacuggcucacucauuuaaaguuuaaauauccagcacugaaugugaccaugcccaacaacgagaaguucgacaaacuuuacaucuggggcguccaccauccuggcacagauaaugaccagaucuuuuuguaugcccaggcuagcgggcguauuacugugucuaccaagagaucccaacagacaguaauuccaaacaucggaucaaggccccggguucgcaauauaccuagcagaauuaguaucuacuggaccauugugaaaccaggugauauccugcuaaucaacucuacgggcaaucucauugccccgaggggguacuucaagauacgguccggaaagagcucgaucaugcgcucugacgcgcccauuggcaaauguaacuccgagugcaucacuccuaaugguucaauaccaaacgacaagcccuuucagaaugucaaccgaauuacauauggggcauguccuagauacgugaaacagaauacccugaagcuggccacuggaaugaggaacgugccagaaaaacaaacacggggcaucuucggcgcuaucgccggguuuauugagaauggaugggaagguauggucgauggcugguauggguuccgucaccagaacagugagggaaccggccaggcagcugaccuuaagagcacgcaagccgcgaccaaucagaucaacgguaaauugaaccgccucauugggaagacaaaugagaaguuccaccagauagaaaaagaguuuuccgaaguugagggcagaauccaggaucuggaaaaguacguggaggacacuaaaauugauuuauggucuuauaacgccgagcugcucguagcacuugaaaaucaacauaccaucgaccugacagauagcgagaugaacaaguuguucgaaaggacuaaaaagcagcuacgggagaaugcugaagacaugggaaacggcugcuuuaagaucuaccacaaaugugauaaugccugcauugggucaauacgaaacggaaccuaugaccaugauguguaccgcgacgaggcucugaauaacagauuccagaucaagggugucgagcucaaaaguggcuacaaggacuggauucuguggaucuccuuugccauuagcugcuuccuucuguguguggcauugcucggguuuaucaugugggccugccagaaaggaaauauaagguguaacaucugcauuuga

SEQ ID NO: 139244 - RNA, 1701 nt, Artificial Sequence
  derived and/or modified CDS sequence (opt3) from hemagglutinin__InfluenzaA__AHL89174
augaagaccaucauugcccugagcuacacacucugccuuguguucgcucagaaacugcccggcaacgacaauuccacugcaacguuguguuuagggcaccaugccgucccuaacggaaccauaguuaagacaaucacuaaugaucaaauugaggugaccaacgcgacagaacugguacagucuucaaguaccgguggcaucugcgacagcccacaccagauucuagauggggagaauuguacucucaucgacgcucugcuuggagauccgcagugcgacggcuuucaaaacaaaaagugggaucuguucguggaaagauccaaagccuauucuaauuguuaccccuaugacgucccugauuacgcaucguugaggucacucguggccagcagugguacacuggaguuuaacaaugaauccuucaacuggaccgggguuacgcagaauggaacuucuagcgcuugcaagcggcgcuccaacaauucauuuuucagucgacugaacuggcucacccauuuaaaguuuaaauauccagcacugaaugugacaaugcccaacaacgagaaguucgacaaacuuuacauauggggcguccaccauccuggcacugauaaugaccagaucuuuuuguaugcccaggcuagcgggcguauuaccgugucuacaaagagaucccaacagaccguaaucccaaacauuggaucaaggccccggguucgcaauaucccuagcagaauaaguauuuacuggacgaucgugaaaccaggugauauucugcuaaucaacucuacuggcaaucucaucgccccgaggggguacuucaagauucgguccggaaagagcucgauaaugcgcucugacgcgcccaucggcaaauguaacuccgagugcauuacaccuaaugguucaaucccaaacgacaagcccuuucagaaugucaaccgaauaaccuauggggcauguccuagauacgugaaacagaauacucugaagcuggccacaggaaugaggaacgugccagaaaaacaaacccggggcauuuucggcgcuaucgccggguuuaucgagaauggaugggaagguauggucgauggcugguauggguuccgucaccagaacagugagggaauuggccaggcagcugaccuuaagagcacgcaagccgcgaucaaucagauuaacgguaaauugaaccgccucauagggaagaccaaugagaaguuccaccagaucgaaaaagaguuuuccgaaguugagggcaggauucaggaucuggaaaaguacguggaggacacaaaaaucgauuuauggucuuauaacgccgagcugcucguagcacuugaaaaucaacauacuaucgaccugaccgauagcgagaugaacaaguuguucgaaagaacuaaaaagcagcuacgggagaaugcugaagacaugggaaacggcugcuuuaagauuuaccacaaaugugauaaugccugcauagggucaauccgaaacggaacauaugaccaugauguguaccgcgacgaggcucugaauaacagauuccagauuaagggugucgagcucaaaaguggcuacaaggacuggauccuguggauuuccuuugccaucagcugcuuccuucuguguguggcauugcucggguuuauaaugugggccugccagaaaggaaauaucagguguaacauuugcaucuga

SEQ ID NO: 139245 - RNA, 1701 nt, Artificial Sequence
  derived and/or modified CDS sequence (opt3) from hemagglutinin__InfluenzaA__AHL89210
augaagaccaucauugcccugagcuacauacucugccuuguguucgcucagaaacugcccggcaacgacaauuccacagcaacuuuguguuuagggcaccaugccgucccuaacggaacgaucguuaagaccauuacaaaugaucaaaucgaggugacuaacgcgaccgaacugguacagucuucaaguacaggugagauuugcgacagcccacaccagauccuagauggcgaaaauuguacccucauagacgcucugcuuggggauccgcagugcgacggauuucaaaacaaaaagugggaucuguucguggagagauccaaagccuauucuaauuguuaccccuaugacgucccugauuacgcaucguugaggucacucguggccagcaguggcacucuggaauuuaacaaugaguccuucaacuggacagguguuacccagaaugggacgucuagcgcuugcaagcggcgcuccaacaauucauuuuucagucgacugaacuggcucacucauuuaaaguuuaaauauccagcacugaaugugaccaugcccaacaacgagaaguucgacaaacuuuacaucuggggaguccaccauccuggcacagauaaugaccagaucuuuuuguaugcccaggcuagcggccguauuacugugucuaccaagagaucccaacagacaguaauuccaaacaucgggucaaggccccggguucgcaauauaccuagcagaauuaguaucuacuggaccauugugaaaccaggagauauccugcuaaucaacucuacggguaaucucauugccccgaggggcuacuucaagauacgguccggaaagagcucgaucaugcgcucugacgcgcccauugggaaauguaacuccgaaugcaucacuccuaauggcucaauaccaaacgacaagcccuuucagaaugucaaccgaauuacauauggugcauguccuagauacgugaaacagaauacccugaagcuggccacugggaugaggaacgugccagagaaacaaacacggggaaucuucggcgcuaucgccggcuuuauugaaaaugggugggagggaauggucgaugguugguauggcuuccgucaccagaacagugaggggaucggacaggcagcugaccuuaagagcacccaagccgcgauuaaucagauaaacggcaaauugaaccgccucaucgguaagacgaaugaaaaguuccaccagauugagaaagaauuuuccgagguugaagggagaauccaggaucuggagaaguacguggaggacaccaaaaucgauuuauggucuuauaacgccgaacugcucguagcacuugagaaucaacauacaauugaccugacugauagcgaaaugaacaaguuguucgagaggaccaaaaagcagcuacgggaaaaugcugaggacaugggcaacggaugcuuuaagauauaccacaaaugugauaaugccugcaucggcucaauucgaaacgggacauaugaccaugauguguaccgcgacgaggcucugaauaacagauuccagaucaagggagucgaacucaaaagugguuacaaggacuggauucuguggaucuccuuugccauaagcugcuuccuucuguguguggcauugcucggcuuuaucaugugggccugccagaaagggaauauuagguguaacaucugcauuuga

SEQ ID NO: 139246 - RNA, 1701 nt, Artificial Sequence; identical to SEQ ID NO: 139245
  derived and/or modified CDS sequence (opt3) from hemagglutinin__InfluenzaA__AHL89222

SEQ ID NO: 139247 - RNA, 1701 nt, Artificial Sequence
  derived and/or modified CDS sequence (opt3) from hemagglutinin__InfluenzaA__AHL89234
augaagaccaucauugcccugagcuacauacucugccuuguguucgcucagaaacugcccggcaacgacaauuccacagcaacuuuguguuuagggcaccaugccgucccuaacggaacgaucguuaagaccauuacaaaugaucaaaucgaggugacuaacgcgaccgaacugguacagucuucaaguacaggugagauuugcgacagcccacaccagauccuagauggcgaaaauuguacccucauagacgcucugcuuggggauccgcagugcgacggauuucaaaacaaaaagugggaucuguucguggagagauccaaagccuauucuaauuguuaccccuaugacgucccugauuacgcaucguugaggucacucguggccagcaguggcacucuggaauuuaacaaugaguccuucaacuggacagguguuacccagaaugggacgucuagcgcuugcaagcggcgcuccaacaauucauuuuucagucgacugaacuggcucacucauuuaaaguuuaaauauccagcacugaaugugaccaugcccaacaacgagaaguucgacaaacuuuacaucuggggaguccaccauccuggcacagauaaugaccagaucuuuuuguaugcccaggcuagcggccguauuacugugucuaccaagagaucccaacagacaguaauuccaaacaucgggucaaggccccggguucgcaauauaccuagcagaauuaguaucuacuggaccauugugaaaccaggagauauccugcuaaucaacucuacggguaaucucauugccccgaggggcuacuucaagauacgguccggaaagagcucgaucaugcgcucugacgcgcccauugggaaauguaacuccgaaugcaucacuccuaauggcucaauaccaaacgacaagcccuuucagaaugucaaccgaauuacauauggugcauguccuagauacgugaaacagaauacccugaagcuggccacugggaugaggaacgugccagagaaacaaacacggggaaucuucggcgcuaucgccggcuuuauugaaaaugggugggagggaauggucgaugguugguauggcuuccgucaccagaacagugaggggaugggacaggcagcugaccuuaagagcacccaagccgcgaucaaucagauuaacggcaaauugaaccgccucauagguaagacgaaugaaaaguuccaccagaucgagaaagaauuuuccgagguugaagggaggauucaggaucuggagaaguacguggaggacaccaaaaucgauuuauggucuuauaacgccgaacugcucguagcacuugagaaucaacauacaaucgaccugacugauagcgaaaugaacaaguuguucgagagaaccaaaaagcagcuacgggaaaaugcugaggacaugggcaacggaugcuuuaagauuuaccacaaaugugauaaugccugcauaggcucaauccgaaacgggacauaugaccaugauguguaccgcgacgaggcucugaauaacagauuccagauuaagggagucgaacucaaaagugguuacaaggacuggauccuguggauuuccuuugccaucagcugcuuccuucuguguguggcauugcucggcuuuauaaugugggccugccagaaagggaauaucagguguaacauuugcaucuga

SEQ ID NO: 139248 - RNA, 1701 nt, Artificial Sequence
  derived and/or modified CDS sequence (opt3) from hemagglutinin__InfluenzaA__AHL89246
augaagaccaucauugcccugagcuacauacucugccuuguguucgcucagaaacugcccggcaacgacaauuccacagcaacuuuguguuuagggcaccaugccgucccuaacggaacgaucguuaagaccauuacaaaugaucaaaucgaggugacuaacgcgaccgaacugguacagucuucaaguacaggugagauuugcgacagcccacaccagauccuagauggcgaaaauuguacccucauagacgcucugcuuggggauccgcagugcgacggauuucaaaacaaaaagugggaucuguucguggagagauccaaagccuauucuaauuguuaccccuaugacgucccugauuacgcaucguugaggucacucguggccagcaguggcacucuggaauuuaacaaugaguccuucaacuggacagguguuacccagaaugggacgucuagcgcuugcaagcggcgcuccaacaauucauuuuucagucgacugaacuggcucacucauuuaaaguuuaaauauccagcacugaaugugaccaugcccaacaacgagaaguucgacaaacuuuacaucuggggaguccaccauccuggcacagauaaugaccagaucuuuuuguaugcccaggcuagcggccguauuacugugucuaccaagagaucccaacagacaguaauuccaaacaucgggucaaggccccggguucgcaauauaccuagcagaauuaguaucuacuggaccauugugaaaccaggagauauccugcuaaucaacucuacggguaaucucauugccccgaggggcuacuucaagauacgguccggaaagagcucgaucaugcgcucugacgcgcccauugggaaauguaacuccgaaugcaucacuccuaauggcucaauaccaaacgacaagcccuuucagaaugucaaccgaauuacauauggugcauguccuagauacgugaaacagaauacccugaagcuggccacugggaugaggaacgugccagagaaacaaacacggggaaucuucggcgcuaucgccggcuuuauugaaaaugggugggagggaauggucgaugguugguauggcuuccgucaccagaacagugaggggaucggacaggcagcugaccuuaagagcacccaagccgcgauuaaucagauaaacggcaaauugaaccgccucaucgguaagacgaaugaaaaguuccaccagauugagaaagaauuuuccgagguugaagggagaauccaggaucuggagaaguacguggaggacaccaaaaucgauuuauggucuuauaacgccgaacugcucguagcacuugagaaucaacauacaauugaccugacugauagcgaaaugaacaaguuguucgagaggaccaaaaagcagcuacgggaaaaugcugaggacaugggcaacggaugcuuuaagauauaccacaaauguggcaaugccugcaucgggucaauucgaaacggaacauaugaucaugacguguaccgcgaugaggcucugaauaacagauuccagaucaagggugucgaacucaaaaguggcuacaaggacuggauucuguggaucuccuuugccauaagcugcuuccuucuguguguggcauugcucggguuuaucaugugggccugccagaaaggaaauauuagguguaacaucugcauuuga

SEQ ID NO: 139249 - RNA, 1701 nt, Artificial Sequence
  derived and/or modified CDS sequence (opt3) from hemagglutinin__InfluenzaA__AHL89258
augaagaccaucauugcccugagcuacauacucugccuuguguucgcucagaaacugcccggcaacgacaauuccacagcaacuuuguguuuagggcaccaugccgucccuaacggaacgaucguuaagaccauuacaaaugaucaaaucgaggugacuaacgcgaccgaacugguacagucuucaaguacaggugagauuugcgacagcccacaccagauccuagauggcgaaaauuguacccucauagacgcucugcuuggggauccgcagugcgacggauuucaaaacaaaaagugggaucuguucguggagagauccaaagccuauucuaauuguuaccccuaugacgucccugauuacgcaucguugaggucacucguggccagcaguggcacucuggaauuuaacaaugaguccuucaacuggacagguguuacccagaaugggacgucuagcgcuugcaagcggcgcuccaacaauucauuuuucagucgacugaacuggcucacucauuuaaaguuuaaauaucaggcacugaaugugaccaugccaaacaacgagaaguucgacaaacuuuacaucuggggaguccaccaucccggcacagauaaugaccagaucuuuuuguaugcccaagcuagcggccguauuacugugucuaccaagagaucccagcagacaguaauuccuaacaucgggucaaggccacggguucgcaauauacccagcagaauuaguaucuacuggaccauugugaaaccuggagauauccugcuaaucaacucuacggguaaucucauugccccaaggggcuacuucaagauacgguccggaaagagcucgaucaugcgcucugacgcgccgauugggaaauguaacuccgaaugcaucacucccaauggcucaauaccuaacgacaagccauuucagaaugucaaccgaauuacauauggugcaugucccagauacgugaaacaaaauacccugaagcuggccacugggaugaggaacgugccugagaaacagacacggggaaucuucggcgcuaucgccggcuuuauugaaaaugggugggagggaauggucgaugguugguauggcuuccgucaccagaacagugaggggaucggacaagcagcugaccuuaagagcacccaggccgcgauuaaucagauaaacggcaaauugaaccgccucaucgguaagacgaaugaaaaguuccaccagauugagaaagaauuuuccgagguugaagggagaauccaagaucuggagaaguacguggaggacaccaaaaucgauuuauggucuuauaacgccgaacugcucguagcacuugagaaucagcauacaauugaccugacugauagcgaaaugaacaaguuguucgagaggaccaaaaagcagcuacgggaaaaugcugaggacaugggcaacggaugcuuuaagauauaccacaaaugugauaaugccugcaucggcucaauucgaaacgggacauaugaccaugauguguaccgcgacgaggcucugaauaacagauuccagaucaagggagucgaacucaaaagugguuacaaggacuggauucuguggaucuccuuugccauaagcugcuuccuucugugugugguuuugcucggcuuuaucaugugggcaugccaaaaagggaauauuagguguaacaucugcauuuga

SEQ ID NO: 139250 - RNA, 1701 nt, Artificial Sequence; identical to SEQ ID NO: 139245
  derived and/or modified CDS sequence (opt3) from hemagglutinin__InfluenzaA__AHL89270

SEQ ID NO: 139251 - RNA, 1701 nt, Artificial Sequence; identical to SEQ ID NO: 139245
  derived and/or modified CDS sequence (opt3) from hemagglutinin__InfluenzaA__AHL89282

SEQ ID NO: 139252 - RNA, 1701 nt, Artificial Sequence; identical to SEQ ID NO: 139245
  derived and/or modified CDS sequence (opt3) from hemagglutinin__InfluenzaA__AHL89294

SEQ ID NO: 139253 - RNA, 1701 nt, Artificial Sequence; identical to SEQ ID NO: 139245
  derived and/or modified CDS sequence (opt3) from hemagglutinin__InfluenzaA__AHL89306

SEQ ID NO: 139254 - RNA, 1701 nt, Artificial Sequence; identical to SEQ ID NO: 129629
  derived and/or modified CDS sequence (opt3) from hemagglutinin__InfluenzaA__AHL89318

SEQ ID NO: 139255 - RNA, 1701 nt, Artificial Sequence
  derived and/or modified CDS sequence (opt3) from hemagglutinin__InfluenzaA__AHL89330
augaagaccaucauugcccugagcuacauacucugccuuguguucgcucagaaacugcccggcaacgacaauuccacagcaacuuuguguuuagggcaccaugccgucccuaacggaacgaucguuaagaccauuacaaaugaucaaaucgaggugacuaacgcgaccgaacugguacagucuucaaguacaggugagauuugcgacagcccacaccagauccuagauggcaaaaauuguacccucauagacgcucugcuuggggauccgcagugcgacggauuucaaaacaagaaaugggaucuguucguggaaagauccaaggccuauucuaauuguuaccccuaugacgucccugauuacgcaucguugaggucacucguggccagcaguggcacucuggaguuuaacaaugaauccuucaacuggacagguguuacccagaaugggacgucuagcgcuugcaagcggcgcuccaacaauucauuuuucagucgacugaacuggcucacucauuuaaaauuuaaguauccagcacugaaugugaccaugcccaacaacgagaaauucgacaaguuguacaucuggggaguccaccauccuggcacagauaaugaccagauuuuucuuuaugcccaggcuagcggccguaucacugugucuaccaaaagaucccaacagacaguaauuccaaacaucgggucaaggccccggguucgcaauauaccuagcagaauuaguaucuacuggaccauugugaagccaggagauauccugcuaaucaacucuacggguaaucucauugccccgaggggcuacuucaagauacgguccgggaaaagcucgaucaugcgcucugacgcgcccauuggaaaguguaacuccgagugcaucacuccuaauggcucaauaccaaacgacaaacccuuucagaaugucaaccgaauuacauauggugcauguccuagauacgugaagcagaauacccugaaacuugccacugggaugaggaacgugccagaaaagcaaacacggggaaucuucggcgcuaucgccggcuuuauugagaaugggugggaaggaauggucgaugguugguauggcuuccgucaccagaacagugaggggaucggacaggcagcugaccugaaaagcacccaagccgcgauuaaucagauaaacggcaaguugaaccgccucaucgguaagacgaaugagaaauuccaccagauugaaaaggaguuuuccgaaguugaggggagaauccaggaucuggaaaaauacguggaggacaccaagaucgauuuauggucuuauaacgccgagcugcucguagcacuugaaaaucaacauacaauugaccugacugauagcgagaugaacaaauuguucgaaaggaccaagaagcagcuacgggagaaugcugaagacaugggcaacggaugcuuuaaaauauaccacaagugugauaaugccugcaucggcucaauucgaaacgggacauaugaccaugauguguaccgcgacgaggcucugaauaacagauuccagaucaaaggagucgagcucaagagugguuacaaagacuggauucuguggaucuccuuugccauaagcugcuuccuucuguguguggcauugcucggcuuuaucaugugggccugccagaaggggaauauuagguguaacaucugcauuuga

SEQ ID NO: 139256 - RNA, 1701 nt, Artificial Sequence; identical to SEQ ID NO: 128678
  derived and/or modified CDS sequence (opt3) from hemagglutinin__InfluenzaA__AHL89342

SEQ ID NO: 139257 - RNA, 1701 nt, Artificial Sequence; identical to SEQ ID NO: 129609
  derived and/or modified CDS sequence (opt3) from hemagglutinin__InfluenzaA__AHL89354

SEQ ID NO: 139258 - RNA, 1701 nt, Artificial Sequence
  derived and/or modified CDS sequence (opt3) from hemagglutinin__InfluenzaA__AHL89366
augaagaccaucauugcccugagcuacauacucugccuuguguucgcucagaaacugcccggcaacgacaauuccacagcaacuuuguguuuagggcaccaugccgucccuaacggaacgaucguuaagaccauuacaaaugaucaaaucgaggugacuaacgcgaccgaacugguacagucuucaaguacaggugagauuugcgacagcccacaccagauccuagauggcgaaaauuguacccucauagacgcucugcuuggggauccgcagugcgacggauuucaaaacaaaaagugggaucuguucguggagagauccaaagccuauucuaauuguuaccccuaugacgucccugauuacgcaucguugaggucacucguggccagcaguggcacucuggaauuuaacaaugaguccuucaacuggacagguguuacccagaaugggacgucuagcgcuugcaagcggcgcuccaacaauucauuuuucagucgacugaacuggcucacucauuuaaaguuuaaauauccagcacugaaugugaccaugcccaacaacgagaaguucgacaaacuuuacaucuggggaguccaccauccuggcacagauaaugaccagaucuuuuuguaugcccaggcuagcggccguauuacugugucuaccaagagaucccaacagacaguaauuccaaacaucgggucaaggccccggguucgcaauauaccuagcagaauuaguaucuacuggaccauugugaaaccaggagauauccugcuaaucaacucuacggguaaucucauugccccgaggggcuacuucaagauacgguccggaaagagcucgaucaugaaaucugacgcgcccauugggaaguguaacuccgaaugcaucacuccuaauggcucaauaccaaacgacaaacccuuucagaaugucaaccgcauuacauauggugcauguccucgauacgugaagcagaauacccugaaacuugccacugggaugagaaacgugccagagaagcaaacaaggggaaucuucggcgcuaucgccggcuuuauugaaaaugggugggagggaauggucgaugguugguauggcuuccggcaccagaacagugaggggaucggacaggcagcugaccugaaaagcacccaagccgcgauuaaucagauaaacggcaaguugaaccgucucaucgguaagacgaaugaaaaauuccaccagauugagaaggaauuuuccgagguugaagggcgcauccaggaucuggagaaauacguggaggacaccaagaucgauuuauggucuuauaacgccgaacugcucguagcacuugagaaucaacauacaauugaccugacugauagcgaaaugaacaaauuguucgagagaaccaagaagcagcuaagggaaaaugcugaggacaugggcaacggaugcuuuaaaauauaccacaagugugauaaugccugcaucggcucaauucggaacgggacauaugaccaugauguguaccgagacgaggcucugaauaaccgcuuccagaucaaaggaauugaacucaagagugguuacaaagacuggauccuguggauauccuuugccaucagcugcuuccuucugugugucguguugcucggcuuuauuaugugggcaugccagaaggggaauaucagauguaacauuugcaucuga

SEQ ID NO: 139259 - RNA, 1701 nt, Artificial Sequence; identical to SEQ ID NO: 139245
  derived and/or modified CDS sequence (opt3) from hemagglutinin__InfluenzaA__AHL89378

SEQ ID NO: 139260 - RNA, 1701 nt, Artificial Sequence; identical to SEQ ID NO: 129876
  derived and/or modified CDS sequence (opt3) from hemagglutinin__InfluenzaA__AHL89390

SEQ ID NO: 139261 - RNA, 1701 nt, Artificial Sequence; identical to SEQ ID NO: 139245
  derived and/or modified CDS sequence (opt3) from hemagglutinin__InfluenzaA__AHL89402

SEQ ID NO: 139262 - RNA, 1701 nt, Artificial Sequence; identical to SEQ ID NO: 129629
  derived and/or modified CDS sequence (opt3) from hemagglutinin__InfluenzaA__AHL89414

SEQ ID NO: 139263 - RNA, 1701 nt, Artificial Sequence
  derived and/or modified CDS sequence (opt3) from hemagglutinin__InfluenzaA__AHL89426
augaagaccaucauugcccugagcuacauacucugccuuguguucgcucagaaacugcccggcaacgacaauuccacagcaacuuuguguuuagggcaccaugccgucccuaacggaacgaucguuaagaccauuacaaaugaucaaaucgaggugacuaacgcgaccgaacugguacagucuucaaguacaggugagauuugcgacagcccacaccagauccuagauggcgaaaauuguacccucauagacgcucugcuuggggauccgcagugcgacggauuucaaaacaaaaagugggaucuguucguggagagauccaaagccuauucuaauuguuaccccuaugacgucccugauuacgcaucguugaggucacucguggccagcaguggcacucuggaauuuaacaaugaguccuucaacuggacagguguuacccagaaugggacgucuagcgcuugcaagcggcgcuccaacaauucauuuuucagucgacugaacuggcucacucauuuaaaguuuaaauauccagcacugaaugugaccaugcccaacaacgagaaguucgacaaacuuuacaucuggggaguccaccauccuggcacagauaaugaccagauuuucuuguaugcccaggcuagcggccguaucacugugucuaccaagagaucccaacagacaguaauuccaaacaucgggucaaggccccggguucgcaauauaccuagcagaauuaguaucuacuggaccauugugaaaccaggagauauccuguucaucaacucuacggguaaucuaauugccccgaggggcuacuuuaagauacgguccggaaagagcucgaucaugcgcucugacgcgcccauugggaaauguaacuccgaaugcaucacuccuaauggcucaauaccaaacgacaagcccuuccagaaugucaaccgaauuacauauggugcauguccuagauacgugaaacagaauacccucaagcuggccacugggaugaggaacgugccagagaaacaaacacggggaaucuuuggcgcuaucgccggcuucauugaaaaugggugggagggaauggucgaugguugguauggcuuccgucaccagaacagugaggggaucggacaggcagcugaccuuaagagcacccaagccgcgauuaaucagauaaacggcaaacugaaccgcuugaucgguaagacgaaugaaaaguuucaccagauugagaaagaauuuuccgagguugaagggagaauccaggaucucgagaaguacguggaggacaccaaaaucgaucuguggucuuauaacgccgaauuacugguagcacucgagaaucaacauacaauugaccuuacugauagcgaaaugaacaagcuguuugagaggaccaaaaagcaguugcgggaaaaugcugaggacaugggcaacggaugcuucaagauauaccacaaaugugauaaugccugcaucggcucaauucgaaacgggacauaugaccaugauguguaccgcgacgaggcucuaaauaacagauuucagaucaagggagucgaacugaaaagugguuacaaggacuggauucucuggaucuccuucgccauaagcugcuuucugcuuugugugguucuguugggcuucaucaugugggcaugccagaaagggaauauuagguguaacaucugcauuuga

SEQ ID NO: 139264 - RNA, 1701 nt, Artificial Sequence; identical to SEQ ID NO: 139245
  derived and/or modified CDS sequence (opt3) from hemagglutinin__InfluenzaA__AHL89438

SEQ ID NO: 139265 - RNA, 1701 nt, Artificial Sequence; identical to SEQ ID NO: 139245
  derived and/or modified CDS sequence (opt3) from hemagglutinin__InfluenzaA__AHL89450

SEQ ID NO: 139266 - RNA, 1701 nt, Artificial Sequence; identical to SEQ ID NO: 139245
  derived and/or modified CDS sequence (opt3) from hemagglutinin__InfluenzaA__AHL89462

SEQ ID NO: 139267 - RNA, 1701 nt, Artificial Sequence; identical to SEQ ID NO: 139245
  derived and/or modified CDS sequence (opt3) from hemagglutinin__InfluenzaA__AHL89474

SEQ ID NO: 139268 - RNA, 1701 nt, Artificial Sequence; identical to SEQ ID NO: 129876
  derived and/or modified CDS sequence (opt3) from hemagglutinin__InfluenzaA__AHL89486

SEQ ID NO: 139269 - RNA, 1701 nt, Artificial Sequence; identical to SEQ ID NO: 129629
  derived and/or modified CDS sequence (opt3) from hemagglutinin__InfluenzaA__AHL89498

SEQ ID NO: 139270 - RNA, 1701 nt, Artificial Sequence; identical to SEQ ID NO: 129629
  derived and/or modified CDS sequence (opt3) from hemagglutinin__InfluenzaA__AHL89510

SEQ ID NO: 139271 - RNA, 1701 nt, Artificial Sequence; identical to SEQ ID NO: 129629
  derived and/or modified CDS sequence (opt3) from hemagglutinin__InfluenzaA__AHL89522

SEQ ID NO: 139272 - RNA, 1701 nt, Artificial Sequence
  derived and/or modified CDS sequence (opt3) from hemagglutinin__InfluenzaA__AHL89534
augaagaccaucauugcccugagcuacauacucugccuuguguucgcucagaaacugcccggcaacgacaauuccacagcaacuuuguguuuagggcaccaugccgucccuaacggaacgaucguuaagaccauuacaaaugaucaaaucgaggugacuaacgcgaccgaacugguacagucuucaaguacaggugagauuugcgacagcccacaccagauccuagauggcgaaaauuguacccucauagacgcucugcuuggggauccgcagugcgacggauuucaaaacaaaaagugggaucuguucguggagagauccaaagccuauucuaauuguuaccccuaugacgucccugauuacgcaucguugaggucacucguggccagcaguggcacucuggaauuuaacaaugaguccuucaacuggacagguguuacccagaaugggacgucuagcgcuugcaagcggcgcuccaacaauucauuuuucagucgacugaacuggcucacucauuuaaaguuuaaauauccagcacugaaugugaccaugcccaacaacgagaaguucgacaaacuuuacaucuggggaguccaccauccuggcacagauaaugaccagaucuuuuuguaugcccaggcuagcggccguauuacugugucuaccaagagaucccaacagacaguaauuccaaacaucgggucaaggccccggguucgcaauauaccuagcagaauuaguaucuacuggaccauugugaaaccaggagauauccugcuaaucaacucuacggguaaucucauugccccgaggggcuacuucaagauacgguccggaaagagcucgaucaugcgcucugacgcgcccauugggaaauguaacuccgaaugcaucacuccuaauggcucaauaccaaacgacaagcccuuucagaaugucaaccgaauuacauauggugcauguccuagauacgugaaacagaauacccugaagcuggccacugggaugaggaacgugccagagaaacaaacacggggaaucuucggcgcuaucgccggcuuuauugaaaaugggugggagggaauggucgaugguugguauggcuuccgucaccagaacagugaggggaucggacaggcagcugaccuuaagagcacccaagccgcgauuaaucagauaaacggcaaauugaaccgccucaucgguaagacgaaugaaaaguuccaccagauugagaaagaauuuuccgagguugaagggagaauccaggaucuggagaaguacguggaggacaccaaaaucgauuuauggucuuauaacgccgaacugcucguagcacuugagaaucaacauacaauugaccugacugauagcgaaaugaacaaguuguucgagaggaccaaaaagcagcuacgggaaaaugcugaggacaugggcaacggaugcuuuaagauauaccacaaaugugauaaugccugcaucggcucaauucgaaacgggacauaugaccaugauguguaccgcgacgaggcucugaauaacagauuccagaucaagggaauugaacucaaaagugguuacaaggacuggauccuguggauauccuuugccaucagcugcuuccuucugugugucguguugcucggcuuuauuaugugggcaugccagaaagggaauaucagguguaacauuugcaucuga

SEQ ID NO: 139273 - RNA, 1698 nt, Artificial Sequence
  derived and/or modified CDS sequence (opt3) from hemagglutinin__InfluenzaA__AHL89546
augaaggugaaacugcucguccuucugugcaccuucacagccacuuacgcugacacgaucuguauuggcuaucacgcaaacaauagcaccgauacaguugacacuguguuggagaagaacguaaccgugacacauuccgucaauuuacuggaagauucucacaacgggaaacuaugccuccugaagggaauagcgccccuucagcuggguaauuguucaguggccggcuggaucuuggggaacccugagugcgaacuccugauuaguaaagagagcugguccuacaucguugaaaccccaaauccggagaacggaacuuguuaucccggcuacuuugcugacuaugaggaacugagagagcaacucucuucggugagcucauucgaaagguuugagauuuucccuaaggagaguuccuggccaaaucauacagucaccggugugucugccagcugcucccacaacgggaagucaaguuuuuaccggaauuuacuguggcuuacgggcaaaaacggauuguaucccaaucugagcaagucuuacgcaaacaauaaagaaaaggagguucuaguacucuggggcgugcaucacccuccaaacaucggggaucagcgcgcccuguaccacacugaauccgcuuaugucucaguggugagcagucauuacucucgacguuucacccccgagauagcaaaaagaccuaaggucagggaccaggaaggacggaucaacuauuacuggacacuucuggagccaggugauacuauuaucuuugaggccaauggcaacuugauugcuccgcgcuucgccuuugcgcucuccagaggguucggaagcggcaucauaaccucgaaugcacccauggacgaaugugaugccaagugccagacaccucaaggugcuauuaacucuucccugccauuucagaauguucaccccgugaccaucggggaguguccuaaauauguaaggucagccaaguuacggauggugacgggacugcgcaacauuccaaguauccagagccgaggccucuucggcgcaaucgcuggguuuauugaaggagguuggacuggcauggucgacgggugguacggauaucaucaccagaaugagcaaggcuccgguuacgccgcggaucagaaaucuacacagaacgccauaaaugggaucaccaacaaggugaauagcguuauugaaaagaugaacacucaguucacagcagugggcaaagaguucaauaaacuugagagaaggauggaaaaccugaauaagaaggucgacgauggauuuuuggacaucuggaccuacaacgcugagcuacuggugcuccuggaaaacgagcggacgcuugacuuccacgauucaaauguuaaaaaccuguaugaaaagguaaaaagucaauugaagaauaacgccaaagagauaggcaaugggugcuuugaguucuaccauaaguguaacgacgaaugcauggaguccgugaagaauggaaccuaugauuaccccaaauauagcgaagagucuaagcucaaccgugagcgcauugacggugucaaacuggaaucaaugggcguguaccagaucuuagcuaucuauaguacagucgccagcucccuggugcuacucguuucucugggggcaauuucguuuuggaugugcagcaauggaucccuucaguguagaaucugcauuuga

SEQ ID NO: 139274 - RNA, 1698 nt, Artificial Sequence; identical to SEQ ID NO: 129962
  derived and/or modified CDS sequence (opt3) from hemagglutinin__InfluenzaA__AHL89558

SEQ ID NO: 139275 - RNA, 1698 nt, Artificial Sequence; identical to SEQ ID NO: 129962
  derived and/or modified CDS sequence (opt3) from hemagglutinin__InfluenzaA__AHL89570

SEQ ID NO: 139276 - RNA, 1698 nt, Artificial Sequence; identical to SEQ ID NO: 129978
  derived and/or modified CDS sequence (opt3) from hemagglutinin__InfluenzaA__AHL89582

SEQ ID NO: 139277 - RNA, 1698 nt, Artificial Sequence; identical to SEQ ID NO: 129978
  derived and/or modified CDS sequence (opt3) from hemagglutinin__InfluenzaA__AHL89594

SEQ ID NO: 139278 - RNA, 1698 nt, Artificial Sequence; identical to SEQ ID NO: 129978
  derived and/or modified CDS sequence (opt3) from hemagglutinin__InfluenzaA__AHL89606

SEQ ID NO: 139279 - RNA, 1698 nt, Artificial Sequence; identical to SEQ ID NO: 129962
  derived and/or modified CDS sequence (opt3) from hemagglutinin__InfluenzaA__AHL89618

SEQ ID NO: 139280 - RNA, 1698 nt, Artificial Sequence; identical to SEQ ID NO: 129978
  derived and/or modified CDS sequence (opt3) from hemagglutinin__InfluenzaA__AHL89630

SEQ ID NO: 139281 - RNA, 1698 nt, Artificial Sequence
  derived and/or modified CDS sequence (opt3) from hemagglutinin__InfluenzaA__AHL89642
augaaggugaaacugcucguccuucugugcaccuucacagccacuuacgcugacacgaucuguauuggcuaucacgcaaacaauagcaccgauacaguugacacuguguuggagaagaacguaaccgugacacauuccgucaauuuacuggaagauaaccacaaugggaaacuaugccuccugaagggaauagcgccccuucagcuggguaacuguucuguggccggcuggaucuuggggaauccugagugcgaacuccugauuucaaaagagaguuggagcuacaucguugaaaccccaaacccggagaauggaacuuguuaucccggcuacuuugcugacuaugaggaacugagagagcaacucuccucugugucgucauucgaaagguuugagauuuucccuaaggagagcaguuggccaaaccauacagucaccgguguguccgccucuugcagccacaaugggaaguccucauuuuaccggaacuuacuguggcuuacgggcaaaaauggauuguaucccaaccugaguaagagcuacgcaaauaacaaagaaaaggaggugcuaguucucuggggcgugcaucacccuccaaacaucggggaucagcgcgcccuguaccacacugaaaaugcuuaugucucugugguguccucacauuacagccgacguuucacccccgagauagcaaaaagaccuaaggucagggaccaggaaggacggaucaacuauuacuggacacuucuggagccaggugauacuauuaucuuugaggccaauggcaacuugauugcuccgcgcuucgccuuugcgcucaguagaggguucggaucuggcaucauaaccuccaaugcacccaugggugaaugugacgccaagugccagacaccucaaggggcuauuaacagcucgcugccauuucagaauguucaccccgugaccaucggagaguguccuaaauauguaaggucugccaaguuacggauggugacgggccugcgcaacauuccauccauccagucacgaggccucuucggggcaaucgcuggauuuauugaagguggcuggacugggauggucgauggaugguacggcuaucaucaccagaaugagcaagguaguggguacgccgcggaccagaaaagcacacagaacgccauaaauggcaucaccaacaagguaaauuccguuauugaaaagaugaacacucaguucacagcagugggaaaagaguucaauaaacuugagagaaggauggaaaaccugaacaagaaggucgaugacggcuuuuuggauaucuggaccuacaaugcugagcuacuggugcuccuggaaaacgagcggacgcuugacuuccacgacucuaauguuaaaaaccuguaugaaaagguaaaaagccaauugaagaauaacgccaaagagauagggaauggaugcuuugaguucuaccauaaguguaacgaugaaugcauggagucagugaagaaugguaccuaugacuaccccaaauauagugaagaguccaagcucaaccgugagaaaauugauggcgucaagcuggaaagcauggggguguaccagaucuuagcuaucuauucuacagucgccucaagucuggugcuacucguuagccugggagcaauuuccuuuuggaugugcucuaauggcucgcuucagugucgcaucugcauuuga

SEQ ID NO: 139282 - RNA, 1698 nt, Artificial Sequence; identical to SEQ ID NO: 129993
  derived and/or modified CDS sequence (opt3) from hemagglutinin__InfluenzaA__AHL89654

SEQ ID NO: 139283 - RNA, 1698 nt, Artificial Sequence
  derived and/or modified CDS sequence (opt3) from hemagglutinin__InfluenzaA__AHL89666
augaaggugaaacugcucguccuucugugcaccuucacagccacuuacgcugacacgaucuguauuggcuaucacgcaaacaauagcaccgauacaguugacacuguguuggagaagaacguaaccgugacacauuccgucaauuuacuggaagauaaccacaaugggaaacuaugccuccugaagggaauagcgccccuucagcuggguaacuguucuguggccggcuggaucuuggggaauccugagugcgaacuccugauuucaaaagagaguuggagcuacaucguugaaaccccaaacccggagaauggaacuuguuaucccggcuacuuugcugacuaugaggaacugagagagcaacucuccucugugucgucauucgaaagguuugagauuuucccuaaggagagcaguuggccaaaccauacagucaccgguguguccgccucuugcagccacaaugggaaguccucauuuuaccggaacuuacuguggcuuacgggcaaaaauggauuguaucccaaccugaguaagagcuacgcaaauaacaaagaaaaggaggugcuaguucucuggggcgugcaucacccuccaaacaucggggaucagcgcgcccuguaccacacugaaaaugcuuaugucucugugguguccucacauuacagccgacguuucacccccgagauagcaaaaagaccuaaggucagggaccaggaaggacggaucaacuauuacuggacacuucuggagccaggugauacuauuaucuuugaggccaauggcaacuugauugcuccgcgcuucgccuuugcgcucaguagaggguucggaucuggcaucauaaccuccaaugcacccaugggugaaugugacgccaagugccagacaccucaaggggcuauuaacagcucgcugccauuucagaauguucaccccgugaccaucggagaguguccuaaauauguaaggucugccaaguuacggauggugacgggccugcgcaacauuccauccauccagucacgaggccucuucggggcaaucgcuggauuuauugaagguggcuggacugggauggucgauggaugguacggcuaucaucaccagaaugagcaagguaguggguacgccgcggaccagaaaagcacacagaacgccauaaauggcaucaccaacaagguaaauuccguuauugaaaagaugaacacucaguucacagcagugggaaaagaguucaauaaacuugagagaaggauggaaaaccugaacaagaaggucgaugacggcuuuuuggauaucuggaccuacaaugcugagcuacuggugcuccuggaaaacgagcggacgcuugacuuccacgacucuaauguuaaaaaccuguaugaaaagguaaaaagccaauugaagaauaacgccgaggagauagggaauggaugcuuugaguucuaccauaaauguaacgaugaaugcauggaaucagugaagaaugguaccuaugacuaccccaaguauagugaggaguccaaacucaaccgugaaaagauugauggcgucaaacuggagagcauggggguguaccagaucuuagcuaucuauucuacagucgccucaagucuggugcuacucguuagccugggagcaauuuccuuuuggaugugcucuaauggcucgcuucagugucgcaucugcauuuga

SEQ ID NO: 139284 - RNA, 1698 nt, Artificial Sequence
  derived and/or modified CDS sequence (opt3) from hemagglutinin__InfluenzaA__AHL89678
augaaggugaaacugcucguccuucugugcaccuucacagccacuuacgcugacacgaucuguauuggcuaucacgcaaacaauagcaccgauacaguugacacuguguuggagaagaacguaaccgugacacauuccgucaauuuacuggaagauucucacaacgggaaacuaugccuccugaagggaauagcgccccuucagcuggguaauuguucaguggccggcuggaucuuggggaacccugagugcgaacuccugauuaguaaagagagcugguccuacaucguugaaaccccaaauccggagaacggaacuuguuaucccggcuacuuugcugacuaugaggaacugagagagcaacucucuucggugagcucauucgaaagguuugagauuuucccuaaggagaguuccuggccaaaucauacagucaccggugugucugccagcugcucccacaacgggaagucaaguuuuuaccggaauuuacuguggcuuacgggcaaaaacggauuguaucccaaucugagcaagucuuacgcaaacaauaaagaaaaggagguucuaguacucuggggcgugcaucacccuccaaacaucggggaucagcgcgcccuguaccacacugaaaacgcuuaugucuccguggugucaagccauuacagucgacguuucacccccgagauagcaaaaagaccuaaggucagggaccaggaaggacggaucaauuauuacuggacacuucuggagccaggugauacuauuaucuuugaggccaacggcaauuugauugcuccgcgcuucgccuuugcgcucucuagaggguucggauccggcaucauaaccagcaacgcacccaugggugaaugugacgccaagugccagacaccucaaggggcuauuaauucgucucugccauuucagaacguucaccccgugaccaucggagaguguccuaaauauguaagguccgccaaguuacggauggugacgggccugcgcaauauuccaucaauccagagucgaggccucuucggggcaaucgcuggauuuauugaagguggcuggacugggauggucgauggaugguacggcuaucaucaccagaacgagcaagguagcggguacgccgcggaccagaaauccacacagaaugccauaaacggcaucaccaauaaggugaacucuguuauugaaaagaugaauacucaguucacagcagugggaaaagaguucaacaaacuugagagaaggauggaaaaucugaacaagaaggucgaugacggcuuuuuggauaucuggaccuacaacgcugagcuacuggugcuccuggaaaaugagcggacgcuugacuuccacgacagcaacguuaaaaaucuguaugaaaagguaaaaucacaauugaagaacaaugccaaagagauagggaacggaugcuuugaguucuaccauaaguguaaugaugaaugcauggagagugugaagaacgguaccuaugacuaccccaaauauuccgaagagagcaagcucaaucguaaaaagauugauggcgucaaacuggagucuauggggguguaccagaucuuagcuaucuauucaacagucgccaguagccuggugcuacucguuucccugggagcaauuucuuuuuggaugugcucgaacggcagccuucagugucgcaucugcauuuga

SEQ ID NO: 139285 - RNA, 1698 nt, Artificial Sequence
  derived and/or modified CDS sequence (opt3) from hemagglutinin__InfluenzaA__AHL89690
augaaggugaaacugcucguccuucugugcaccuucacagccacuuacgcugacacgaucuguauuggcuaucacgcaaacaauagcaccgauacaguugacacuguguuggagaagaacguaaccgugacacauuccgucaauuuacuggaagauucucacaacgggaaacuaugccuccugaagggaauagcgccccuucagcuggguaauuguucaguggccggcuggaucuuggggaacccugagugcgaacuccugauuaguaaagagagcugguccuacaucguugaaaagccagacccggagaauggaaccuguuaucccggccauuuugcugauuacgaggaacugagagagcaacucucuucggugagcucauucgaaagguuugagauuuucccuaaggagaguuccuggccaaaccacacugucacaggugugucugccagcugcucccauaaugggaaaucaaguuuuuauaagaacuuacuguggcuuaccggcaaaaauggauuguaccccaaccugagcaagucuuaugcaaauaacaaagaaaaggagguucuaguacucuggggcgugcaccacccuccaaauaucggggaccagaaggcccuguaccauacggaaaacgcuuacgucuccguggugucaagccacuauagucggaaauucacucccgagauagcaaagcgcccuaaaguccgagaucaggaaggacguaucaacuacuauuggacccuucuggagccaggugacacaauuaucuuugaggccaauggcaacuugauugcuccgagauacgccuucgcgcucucuaggggguuuggauccggcaucauaaauagcaacgcacccauggauaagugugacgccaaaugccagacuccucaaggugcuauuaauucgucucugccauuccagaacguucaucccgugaccaucggggaauguccuaaguauguacgguccgccaaauuacgcauggugacaggacugagaaauauuccaucaauccagaguaggggccucuuuggcgcaaucgcuggguucauugagggagguuggaccggcauggucgaugggugguacggauaucaccaccagaacgaacaaggcagcgguuacgccgcggaccagaaguccacgcagaaugccauaaacgggaucacuaauaaggugaacucuguuauugagaaaaugaauacacaguuuaccgcagugggcaaggaguucaacaaacuugaacggcgcauggagaaucugaacaagaaagucgaugacggauucaucgacauauggacuuacaacgcugaauugcuagugcugcucgagaaugaacgaacacuggauuuucaugacagcaacguaaagaaucuuuaugagaagguuaaaucacaacugaagaacaaugccaaagaaauuggcaacgggugcuucgaguuuuaccacaaguguaaugaugagugcauggaaagugugaaaaacggaaccuaugacuaccccaaguauuccgaggaaagcaaguugaauagagagaaaaucgauggugucaagcucgagucuaugggcguguaccagauccuggcuauuuauucaacggucgccaguagcuuagugcugcuaguuucccucggggcaaucucuuucuggaugugcucgaacggaagccugcaguguaggauuugcauauga

SEQ ID NO: 139286 - RNA, 1698 nt, Artificial Sequence; identical to SEQ ID NO: 129993
  derived and/or modified CDS sequence (opt3) from hemagglutinin__InfluenzaA__AHL89702

SEQ ID NO: 139287 - RNA, 1698 nt, Artificial Sequence; identical to SEQ ID NO: 129962
  derived and/or modified CDS sequence (opt3) from hemagglutinin__InfluenzaA__AHL89714

SEQ ID NO: 139288 - RNA, 1698 nt, Artificial Sequence
  derived and/or modified CDS sequence (opt3) from hemagglutinin__InfluenzaA__AHL89726
augaaggugaaacugcucguccuucugugcaccuucacagccacuuacgcugacacgaucuguauuggcuaucacgcaaacaauagcaccgauacaguugacacuguguuggagaagaacguaaccgugacacauuccgucaauuuacuggaagauucucacaacgggaaacuaugccuccugaagggaauagcgccccuucagcuggguaauuguucaguggccggcuggaucuuggggaacccugagugcgaacuccugauuaguaaagagagcugguccuacaucguugaaaccccaaauccggagaacggaacuuguuaucccggcuacuuugcugacuaugaggaacugagagagcaacucucuucggugagcucauucgaaagguuugagauuuucccuaaggagaguuccuggccaaaucauacagucaccggugugucugccagcugcucccacaacgggaagucaaguuuuuaccggaauuuacuguggcuuacgggaaagaacggcuuguaucccaaucugagcaagucuuacgcaaacaauaaagaaaaggagguucuaguacucuggggcgugcaucacccuccaaacaucggggaucagaaagcccuguaccacacugaaaacgcuuaugucuccguggugucaagccauuacagucgccgauucacccccgagauagcaaagcguccuaaggucagagaccaggaaggaaggaucaauuauuacuggacacuucuggagccaggugauacuauuaucuuugaggccaacggcaauuugauugcuccgcgguucgccuuugcgcucucucgcggguucggauccggcaucauaaccagcaacgcacccauggacgaaugugaugccaaaugccagacaccucaaggugcuauuaauucgucucugccauuucagaacguucaccccgugaccaucggggaguguccuaaguauguaagauccacgaaauuaaggauggugacuggacugcggaauauuccaucaauccagagucgcggccucuucggcgccaucgcaggguuuauugaaggagguuggacaggcauggucgacgggugguacggauaucaucaccagaacgagcaaggcagcgguuacgcugccgaucagaaguccacccagaaugcgauaaacgggaucacuaauaaagugaacucuguuauugaaaagaugaauacacaguucaccgccgugggcaaagaguucaacaaacuugagcgaagaauggaaaaucugaacaagaaagucgacgauggauuuuuggacaucuggacguacaacgcagagcuacuggugcuccuggaaaaugagaggacccuugacuuccacgauagcaacguaaagaaucuguaugaaaaaguuaagucacaauugaaaaacaaugcuaaggagauaggcaacgggugcuuugaguucuaccauaaguguaaugacgaaugcauggagagugugaaaaacggaacauaugauuaccccaaguauuccgaagagagcaaacucaaucgggagaagauugacggugucaaacuggaaucuaugggcguguaccagaucuuagccaucuauucaacugucgcuaguagccuggugcuacucguuucccugggggccauuucuuuuuggaugugcucgaacggaagccuucagugucguaucugcauuuga

SEQ ID NO: 139289 - RNA, 1698 nt, Artificial Sequence
  derived and/or modified CDS sequence (opt3) from hemagglutinin__InfluenzaA__AHL89750
augaaggugaaacugcucguccuucugugcaccuucacagccacuuacgcugacacgaucuguauuggcuaucacgcaaacaauagcaccgauacaguugacacuguguuggagaagaacguaaccgugacacauuccgucaauuuacuggaagauucucacaacgggaaacuaugccuccugaagggaauagcgccccuucagcuggguaauuguucaguggccggcuggaucuuggggaacccugagugcgaacuccugauuaguaaagagagcugguccuacaucguugaaaccccaaauccggagaacggaacuuguuaucccggcuacuuugcugacuaugaggaacugagagagcaacucucuucggugagcucauucgaaagguuugagauuuucccuaaggagaguuccuggccaaaucauacagucaccggugugucugccagcugcucccacaacgggaagucaaguuuuuaccggaauuuacuguggcuuacgggcaaaaacggauuguaucccaaucugagcaagucuuacgcaaacaauaaagaaaaggagguucuaguacucuggggcgugcaucacccuccaaacaucggggaucagcgcgcccuguaccacacugaaaacgcuuaugucuccguggugucaagccauuacagucgacguuucacccccgagauagcaaaaagaccuaaggucagggaccaggaaggacggaucaauuauuacuggacacuucuggagccaggugauacuauuaucuuugaggccaacggcaauuugauugcuccgcgcuucgccuuugcgcucucuagaggguucggauccggcaucauaaccagcaacgcacccauggacgguugugaugccaagugccagacaccucaaggggcuauuaauucgucucugccauuucagaacguucaccccgugaccaucggagaauguccuaaauauguaagguccacgaaguuacggauggugacuggccugcgcaauauuccaucaauccagagucgaggccucuucggggccaucgcaggauuuauugaggguggcuggacagggauggucgacggaugguacggcuaucaucaccagaacgaacaagguagcggguacgcugccgaucagaaauccacccagaaugcgauaaacggcaucacuaauaaggugaacucuguuauugagaaaaugaauacacaguucaccgccgugggaaaggaguucaacaaacuugaaagaaggauggagaaucugaacaagaaggucgacgauggcuuuuuggacaucuggacguacaacgcagaacuacuggugcuccuggagaaugaacggacccuugacuuccacgauagcaacguuaaaaaucuguaugagaagguaaaaucacaauugaagaacaaugcuaaagaaauagggaacggaugcuuugaguucuaccauaaguguaaugacgagugcauggaaagugugaagaacgguacauaugauuaccccaaauauuccgaggaaagcaagcucaaucgugagaaaauugacggcgucaagcuggagucuauggggguguaccagaucuuagccaucuauucaacugucgcuaguagccuggugcuacucguuucccugggagccauuucuuuuuggaugugcucgaacggcagccuucagugucgcaucugcauuuga

SEQ ID NO: 139290 - RNA, 1698 nt, Artificial Sequence; identical to SEQ ID NO: 129958
  derived and/or modified CDS sequence (opt3) from hemagglutinin__InfluenzaA__AHL89762

SEQ ID NO: 139291 - RNA, 1698 nt, Artificial Sequence; identical to SEQ ID NO: 130004
  derived and/or modified CDS sequence (opt3) from hemagglutinin__InfluenzaA__AHL89774

SEQ ID NO: 139292 - RNA, 1698 nt, Artificial Sequence; identical to SEQ ID NO: 129993
  derived and/or modified CDS sequence (opt3) from hemagglutinin__InfluenzaA__AHL89786

SEQ ID NO: 139293 - RNA, 1698 nt, Artificial Sequence
  derived and/or modified CDS sequence (opt3) from hemagglutinin__InfluenzaA__AHL89798
augaaggugaaacugcucguccuucugugcaccuucacagccacuuacgcugacacgaucuguauuggcuaucacgcaaacaauagcaccgauacaguugacacuguguuggagaagaacguaaccgugacacauuccgucaauuuacuggaagauagacacaacgggaaacuaugccuccugaagggaauagcgccccuucagcuggguaauuguucuguggccggcuggaucuuggggaacccugagugcgaacuccugauuucaaaagagaguuggagcuacaucguugaaaccccaaauccggagaacggaacuuguuaucccggcuacuuugcugacuaugaggaacugagggagcaacucuccucugugucgucauucgaacgguuugagauuuucccuaaggagagcaguuggccaaaucauacagucaccgguguguccgccucuugcagccacaacgggaaguccucauuuuaccgcaauuuacuguggcuuacgggaaagaacggcuuguaucccaaucugagucgaagcuacgcaaacaauaaggaaaaagaggugcuaguucucuggggcgugcaucacccuccaucuaucggggaucagcgugcccuguaccacacugaaaacgcuuaugucuccguggugucaagccauuacaguagaagguucacccccgagauagcaaagcggccuaaaguccgcgaccaggaaggaagaaucaacuauuacuggacacuucuggagccaggugauacuauuaucuuugaggccaauggcaacuugauugcuccgagguucgccuuugcgcucucucggggguucggauccggcaucauaaccagcaaugcacccauggacgaaugugaugccaagugccagacaccucaaggugcuauuaacucgucucugccauuucagaauguucaccccgugaccaucggggaguguccuaaguauguacgcuccgccaaauuacgaauggugacgggacugagaaacauuccaucaauccagaguaggggccucuucggcgcaaucgcuggguuuauugaaggagguuggacuggcauggucgacgggugguacggauaucaucaccagaaugagcaaggcagcgguuacgccgcggaucagaaguccacacagaacgccauaaaugggaucaccaacaaaguaaauucuguuauugaaaagaugaacacucaguucacagcagugggcaaagaguucaauaaacuugagcggcguauggaaaaccugaauaaaaaggucgacgauggauuuuuggacaucuggaccuacaacgcugagcuacuggugcuccuggaaaacgagcgcacgcuugacuuccacgauagcaauguaaagaaccuguaugaaaaaguuaagucacaauugaaaaauaacgccaaggagauaggcaaugggugcuuugaguucuaccauaaauguaacgacgaaugcauggagagugugaagaauggaaccuaugauuaccccaaguauuccgaagagagcaaacucaacagagagaagauugacggugucaaacuggaaucuaugggcguguaccagaucuuagcuaucuauucaacagucgccaguagccuggugcuacucguuucccugggggcaauuucuuuuuggaugugcucgaauggaagccuucaguguaggaucugcauuuga

SEQ ID NO: 139294 - RNA, 1698 nt, Artificial Sequence
  derived and/or modified CDS sequence (opt3) from hemagglutinin__InfluenzaA__AHL89810
augaaggugaaacugcucguccuucugugcaccuucacagccacuuacgcugacacgaucuguauuggcuaucacgcaaacaauagcaccgauacaguugacacuguguuggagaagaacguaaccgugacacauuccgucaauuuacuggaagauucucacaacgggaaacuaugccuccugaagggaauagcgccccuucagcuggguaauuguucaguggccggcuggaucuuggggaacccugagugcgaacuccugauuaguaaagagagcugguccuacaucguugaaaccccaaauccggagaacggaacuuguuaucccggcuacuuugcugacuaugaggaacugagagagcaacucucuucggugagcucauucgaaagguuugagauuuucccuaaggagaguuccuggccaaaucauacagucaccggugugucugccagcugcucccacaacgggaagucaaguuuuuaccggaauuuacuguggcuuacgggaaagaacggcuuguaucccaaucugagcaagucuuacgcaaacaauaaagaaaaggagguucuaguacucuggggcgugcaucacccuccaaacaucggggaucagcgcgcccuguaccacacugaaaacgcuuaugucuccguggugucaagccauuacagucgacguuucacccccgagauagcaaaaagaccuaaggucagggaccaggaaggacggaucaauuauuacuggacacuucuggagccaggugauacuauuaucuuugaggccaacggcaauuugauugcuccgcgcuucgccuuugcgcucucuagaggguucggauccggcaucauaaccagcaacgcacccaugggugaaugugacgccgagugccagacaccucaaggggcuauuaauucgucucugccauuucagaacguucaccccgugaccaucggagaauguccuaaguauguaagguccgccaaauuacggauggugacgggccugcgcaauauuccaucaauccagagucgaggccucuucggggcaaucgcuggauuuauugaggguggcuggacugggauggucgauggaugguacggcuaucaucaccagaacgaacaagguagcggguacgccgcggaccagaaguccacacagaaugccauaaacggcaucaccaauaaagugaacucuguuauugagaagaugaauacucaguucacagcagugggaaaagaguucaacaaacuugaaagaaggauggagaaucugaacaaaaaggucgaugacggcuuuuuggauaucuggaccuacaacgcugaacuacuggugcuccuggagaaugaacggacgcuugacuuccacgacagcaacguaaagaaucuguaugagaaaguuaagucacaauugaaaaacaaugccaaggagauagggaacggaugcuuugaguucuaccauaaauguaaugaugaaugcauggaaagugugaagaacgguaccuaugacuaccccaaguauuccgaggagagcaaacucaaucgugaaaagauugauggcgucaaacuggagucuauggggguguaccagaucuuagcuaucuauucaacagucgccaguagccuggugcuacucguuucccugggagcaauuucuuuuuggaugugcucgaacggcagccuucagugucgcaucugcauuuga

SEQ ID NO: 139295 - RNA, 1698 nt, Artificial Sequence
  derived and/or modified CDS sequence (opt3) from hemagglutinin__InfluenzaA__AHL89822
augaaggugaaacugcucguccuucugugcaccuucacagccacuuacgcugacacgaucuguauuggcuaucacgcaaacaauagcaccgauacaguugacacuguguuggagaagaacguaaccgugacacauuccgucaauuuacuggaagauagacacaacgggaaacuaugccuccugaagggaauagcgccccuucagcuggguaauuguucuguggccggcuggaucuuggggaacccugagugcgaacuccugauuucaaaagagaguuggagcuacaucguugaaaccccaaauccggagaacggaacuuguuaucccggcuacuuugcugacuaugaggaacugagggagcaacucuccucugugucgucauucgaacgguuugagauuuucccuaaggagagcaguuggccaaaucauacagucaccgguguguccgccucuugcagccacaacgggaaguccucauuuuaccgcaauuuacuguggcuuacgggcaaaaacggauuguaucccaaucugaguaagagcuacgcaaacaauaaagaaaaggagguucuaguacucuggggcgugcaucacccuccaaacaucggggaucagcgagcccuguaccacacugaaaacgcuuaugucucugugguguccucacauuacagccguagauucacccccgagauagcaaaaaggccuaagguccgggaccaggaaggacgcaucaauuauuacuggacacuucuggagccaggugauacuauuaucuuugaggccaacggcaauuugauugcuccgagauucgccuuugcgcucaguaggggguucggaucuggcaucauaaccuccaacgcacccauggacgaaugugaugccaagugccagacaccucaaggugcuauuaauagcucgcugccauuucagaacguucaccccgugaccaucggggaguguccuaaauauguacggucugccaaguuacgcauggugacgggacugcgaaauauuccauccauccagucaagaggccucuucggcgcaaucgcuggguuuauugaaggagguuggacuggcauggucgacgggugguacggauaucaucaccagaacgagcaaggcagugguuacgccgcggaucagaaaagcacacagaaugccauaaacgggaucaccaauaaggugaacuccguuauugaaaagaugaauacucaguucacagcagugggcaaagaguucaacaaacuugagaggcggauggaaaaucugaacaagaaggucgacgauggauuuuuggacaucuggaccuacaacgcugagcuacuggugcuccuggaaaaugagcguacgcuugacuuccacgauucuaacguuaaaaaucuguaugaaaagguaaaaagccaauugaagaacaaugccaaagagauaggcaacgggugcuuugaguucuaccauaaguguaaugacgaaugcauggagucagugaagaacggaaccuaugauuaccccaaauauagugaagaguccaagcucaaucgcgagaaaauugacggugucaagcuggaaagcaugggcguguaccagaucuuagcuaucuauucuacagucgccucaagucuggugcuacucguuagccugggggcaauuuccuuuuggaugugcucuaacggaucgcuucaguguagaaucugcauuuga

SEQ ID NO: 139296 - RNA, 1698 nt, Artificial Sequence
  derived and/or modified CDS sequence (opt3) from hemagglutinin__InfluenzaA__AHL89834
augaaggugaaacugcucguccuucugugcaccuucacagccacuuacgcugacacgaucuguauuggcuaucacgcaaacaauagcaccgauacaguugacacuguguuggagaagaacguaaccgugacacauuccgucaauuuacuggaagauucucacaacgggaaacuaugccuccugaagggaauagcgccccuucagcuggguaauuguucaguggccggcuggaucuuggggaacccugagugcgaacuccugauuaguaaagagagcugguccuacaucguugaaaccccaaauccggagaacggaacuuguuaucccggcaauuuugcugacuacgaggaacugagagagcaacucucuucggugagcucauucgaaagguuugagauuuucccuaaggagaguuccuggccaaaccauacagucaccggugugucugccagcugcucccacaaugggaagucaaguuuuuaucggaacuuacuguggcuuacgggcaaaaauggauuguaccccaaccugagcaagucuuaugcaaauaacaaagaaaaggaggugcuaguucucuggggcgugcaucacccuccaaacaucggggaucagcgcgcccuguaccacacugaaaaugcuuacgucuccguggugucaagccauuauagucgacguuucacccccgagauagcaaaaagaccuaaggucagggaccaggaaggacggaucaacuacuauuggacacuucuggagccaggugauacuauuaucuuugaggccaauggcaacuugauugcuccgcgcuucgccuuugcgcucucuagaggguucggauccggcaucauaaccagcaaugcacccauggacgaaugugaugccaagugccagacaccucaaggugcuauuaacucgucucugccauuucagaauguucaccccgugaccaucggggaguguccuaaauacguaagguccgccaaguuacggauggugacgggacugcgcaacauuccaucaauccagagucgaggccucuucggcgcaaucgcuggguuuauugaaggagguuggacuggcauggucgacgggugguauggauaccaucaccagaaugagcaaggcagcgguuaugccgcggaucagaaauccacacagaacgccauaaaugggaucaccaacaagguaaauucuguuauugaaaagaugaacacucaguucacagcagugggcaaagaguucaauaaacuugagagaaggauggaaaaccugaacaagaaggucgacgauggauuuuuggacaucuggaccuacaaugcugagcuacuggugcuccuggaaaacgagcggacgcuugacuuccacgauagcaauguuaaaaaccuguacgaaaagguaaaaucacaauugaagaauaacgccaaagagauaggcgacgggugcuuugaguucuaucauaaguguaaugaugaaugcauggagagugugaagaacggaaccuacgacuaucccaaauacuccgaagagagcaagcucaaucgugagaaaauugauggugucaagcuggaaucuaugggcguguaucagaucuuagcuaucuacucaacagucgccaguagccuggugcuacucguuucccugggggcaauuucuuuuuggaugugcucgaacggaagccuucagugucgcaucugcauuuga

SEQ ID NO: 139297 - RNA, 1698 nt, Artificial Sequence; identical to SEQ ID NO: 130004
  derived and/or modified CDS sequence (opt3) from hemagglutinin__InfluenzaA__AHL89846

SEQ ID NO: 139298 - RNA, 1701 nt, Artificial Sequence; identical to SEQ ID NO: 129976
  derived and/or modified CDS sequence (opt3) from hemagglutinin__InfluenzaA__AHL89858

SEQ ID NO: 139299 - RNA, 1701 nt, Artificial Sequence; identical to SEQ ID NO: 129976
  derived and/or modified CDS sequence (opt3) from hemagglutinin__InfluenzaA__AHL89870

SEQ ID NO: 139300 - RNA, 1701 nt, Artificial Sequence
  derived and/or modified CDS sequence (opt3) from hemagglutinin__InfluenzaA__AHL89882
augaagaccaucauugcccugagcuacauacucugccuuguguucgcucagaaacugcccggcaacgacaauuccacagcaacuuuguguuuagggcaccaugccgucccuaacggaacgaucguuaagaccauuacaaaugaucaaaucgaggugacuaacgcgaccgaacugguacagucuucaaguacagguggcauuugcgacagcccacaccagauccuagauggggagaauuguacccucauagacgcucugcuuggagauccgcagugcgacggcuuucaaaacaaaaagugggaucuguucguggaaagauccaaagccuauucuaauuguuaccccuaugacgucccugauuacgcaucguugaggucacucguggccagcagugguacucuggaguuuaacaaugaauccuucaacuggacagggguuacccagaauggaacgucuagcgcuugcaagcggggcuccgacaacucauuuuucagucgccugaauuggcucacucauuuaaaguuuaaauauccagcacugaacgugaccaugcccaauaacgagaaguucgauaaacuuuacaucuggggcguccaccauccugggacagacaacgaucagaucuuuuuguaugcccaggcuagcggacgaauuacugugucuaccaagcguucccaacagacaguaauuccaaauaucgguucaagacccaggguucggaacauaccuagccgcauuaguaucuacuggaccauugugaaaccaggcgacauccugcuaaucaauucuacggggaaccucauugccccgagaggauacuucaagauaagguccggcaagagcucgaucaugcggucugacgcgcccauugguaaauguaauuccgagugcaucacuccuaacgggucaauaccaaaugauaagcccuuucagaacgucaaucgcauuacauauggagcauguccucgauacgugaaacagaacacccugaagcuggccacuggcaugagaaaugugccagaaaaacaaacaaggggcaucuucggggcuaucgccggauuuauugagaacgguugggaaggcauggucgacgggugguauggauuccggcaccagaauagugagggcaucggucaggcagcugaucuuaagagcacccaagccgcgauuaaccagauaaaugggaaauugaaccgucucaucggcaagacgaacgagaaguuccaccagauugaaaaagaguuuuccgaaguugagggacgcauccaggaccuggaaaaguacguggaggauaccaaaaucgacuuauggucuuauaaugccgagcugcucguagcacuugaaaaccaacauacaauugaucugacugacagcgagaugaauaaguuguucgaaagaaccaaaaagcagcuaagggagaacgcugaagauaugggcaaugggugcuuuaagauauaccacaaaugugacaacgccugcaucggaucaauucggaaugguacauaugaucaugacguguaccgagacgaggcucugaacaaucgcuuccagaucaagggcgucgagcucaaaaguggguacaaggauuggauucuguggaucuccuuugccauaagcugcuuccuucuguguguggcauugcucggauuuaucaugugggccugccagaaaggcaacauuagauguaauaucugcauuuga

SEQ ID NO: 139301 - RNA, 1701 nt, Artificial Sequence; identical to SEQ ID NO: 129976
  derived and/or modified CDS sequence (opt3) from hemagglutinin__InfluenzaA__AHL89894

SEQ ID NO: 139302 - RNA, 1701 nt, Artificial Sequence
  derived and/or modified CDS sequence (opt3) from hemagglutinin__InfluenzaA__AHL89906
augaagaccaucauugcccugagcuacauacucugccuuguguaugcucagaaacugcccggcaucgacaacuccacagcaacuuuguguuuagggcaccaugccgucccuaauggaacgauuguuaagaccaucacaaacgaucaaauugaggugacuaaugcgaccgaacugguacagucuucaaguacaggugagaucugcgacagcccacaccagauacuagauggcgaaaacuguacccucaucgacgcucugcuuggggauccgcagugcgacggauuccaaaauaaaaagugggaucuguuuguggagagauccaaagccuacucuaacuguuaucccuacgacgucccugauuaugcaucguugaggucacucguggccagcaguggcacucuggaguucaauaacgaauccuuuaauugggcugguguuacacagaacgggaccucuagcgcaugcaagcggggauccaauaacucauucuuuagucgccugaauuggcucacgcauagcaaguucaaauacccagccuuaaacgugacuaugcccaauaacgaggaauuugacaagcuguauauuuggggcguccaccauccuggcaccgauaacgaccagaucuuccuuuacgcucaggccucugggcgaauuacaguguccacuaaacguucacaacagaccguaaucccaaauauaggaagcagacccaggguucggaacauuccuagucgcaucucuauuuacuggacaaucgugaagccaggugauaucuugcugauuaauuccaccggcaaccuaauagcgccgagaggguauuuuaaaaucaggagcggaaagucgucuauuaugcgguccgacgcacccaucggcaaguguaauucagagugcauaacgccuaacgguaguauuccaaaugacaaacccuuccagaacgucaaucgcaucacuuacggggccuguccucgauaugugagacagaacacacucaagcuggcuaccggaaugaggaaugugccagaaaaacaaacucggggcaucuuuggcgccauugcaggguucaucgagaacggaugggaggguauggucgauggcugguacggguuucgucaccagaauagcgaaggaauuggccaggcugccgaccuuaaguccacacaagcggccauagaucagaucaacgguaaacugaaucgcuugauugggaagaccaacgagaaauuccaccagaucgaaaaggaguucucugaaguugagggcagaauccaggaccucgagaaguauguggaagauacgaaaauugaccuguggagcuacaacgcagaguuacugguagcucucgaaaaucaacauaccauagaucuuacagacucagagaugaacaagcuguuugagaaaacuaagaaacaguugagggaaaaugccgaggauaugggaaacggcugcuucaagaucuaucacaagugugacaaugcuugcauugggaguauccggaacggaaccuacgaucaugacguguaccgagacgaagcccuaaauaaccgcuuucagauuaaaggugucgagcugaaguccggcuauaaagauuggauccucuggaucagcuucgcaauaucuugcuuucugcuuuguguggcccuguugggguucauuaugugggcuugccagaagggaaauaucagauguaacauuugcaucuga

SEQ ID NO: 139303 - RNA, 1701 nt, Artificial Sequence
  derived and/or modified CDS sequence (opt3) from hemagglutinin__InfluenzaA__AHL89918
augaagaccaucauugcccugagcuacauacucugccuuguguucgcucagaaacugcccggcaacgacaauuccacagcaacuuuguguuuagggcaccaugccgucccuaacggaacgaucguuaagaccauuacaaaugaucaaaucgaggugacuaacgcgaccgaacugguacagucuucaaguacaggugagauuugcgacagcccacaccagauccuagauggcgaaaauuguacccucauagacgcucugcuuggggauccgcagugcgacggauuucaaaacaaaaagugggaucuguucguggagagauccaaagccuauucuaauuguuaccccuaugacgucccugauuacgcaucguugaggucacucguggccagcaguggcacucuggaauuuaacaaugaguccuucaacuggacagguguuacccagaaugggacgucuagcgcuugcauccggcgcuccaacaauucauuuuucagucgacugaacuggcucacucauuuaaaguuuaaguauccagcacugaaugugaccaugcccaacaacgagaaauucgacaaguuguacauuuggggaguccaccauccuggcacagauaaugaccagacuuuucuuuaugcccaggcuagcggccguaucaccgugucuacaaaaagaucccaacagaccguaauuccaaacaucgggucaaggccccggguucgcaauauaccuagcagaauuaguaucuacuggacgauugugaagccaggagauauccugcuaaucaacucuacugguaaucucauugccccgaggggcuacuucaaaauacaguccgggaaaagcucgaucaugcggucugacgcgcccauuggaaaguguaacuccgaaugcaucacaccuaauggcucaauaccaaacgacaaacccuuucagaaugucaaccgcauuaccuauggugcauguccucgauacgugaagcaaaauacucugaaacuugccacagggaugagaaacgugccagagaagcagaccaggggaaucuucggcgcuaucgccggcuuuauugaaaaugggugggagggaauggucgaugguugguauggcuuccggcaccagaacagugaggggaucggacaagcagcugaccugaaaagcacgcaggccgcgauugaucagauaaauggcaaguugaaccgucucaucgguaaaaccaacgaaaaguuccaccagauugagaaggaauuuuccgagguugaagggcgcauccaagaccuggagaaauacguggaggauacaaagaucgacuuauggucuuauaaugccgaacugcucguagcacuugagaaccagcauacuauugaucugaccgacagcgaaaugaauaaauuguucgagaagacaaagaagcagcuaagagaaaacgcugaggauaugggcaauggaugcuuuaagauauaccacaaaugugacaacgccugcaucggcucaauuaggaaugggacuuaugaucaugacguguaccgggacgaggcucugaacaaucgauuccagaucaagggagucgaacucaaaagugguuacaaggauuggauucuguggaucuccuuugccauaagcugcuuccuucuguguguggcauugcucggcuuuaucaugugggccugccaaaaagggaacauucgcuguaauaucugcauuuga

SEQ ID NO: 139304 - RNA, 1701 nt, Artificial Sequence
  derived and/or modified CDS sequence (opt3) from hemagglutinin__InfluenzaA__AHL89930
augaagaccaucauugcccugagcuacauacucugccuuguguucgcucagaaacugcccggcaucgacaacuccacagcaacuuuguguuuagggcaccaugccgucccuaauggaacgauuguuaagaccaucacaaacgaucaaauugaggugacuaaugcgaccgaacugguacagucuucaaguacagguggcaucugcgacagcccacaccagauacuagauggggagaacuguacccucaucgacgcucugcuuggagauccgcagugcgacggcuuucaaaauaaaaagugggaucuguucguggaaagauccaaagccuauucuaacuguuaccccuaugacgucccugauuacgcaucguugaggucacucguggccagcagugguacucuggaguuuaauaacgaauccuucaauugggcugggguuacacagaacggaaccucuagcgcaugcaagcggggcuccaauaacucauuuuucagucgccugaauuggcucacgcauagcaaguuuaaauauccagccuuaaacgugacuaugcccaauaacgaggaguucgacaagcuguacauuuggggcguccaccauccugggaccgauaacgaccagaucuuucuuuaugcucaggccucuggacgaauuacaguguccacuaaacguucacaacagaccguaaucccaaauauagguagcagacccaggguucggaacauuccuagucgcaucucuauuuacuggacaaucgugaagccaggcgauaucuugcugauuaauuccaccgggaaccuaauagcgccgagaggauacuucaaaaucaggagcggcaagucgucuauuaugcgguccgacgcacccaucucaaaguguaauagugaaugcauaacgccuaacgguagcauuccaaaugacaaacccuuucagaacgucaaucgcaucacuuauggggccuguccucgauacgugaagcagaacacacucaaacuggcuaccggaaugagaaaugugccagagaagcaaacuaggggcaucuucggcgccauugcaggguuuaucgaaaacggaugggaggguauggucgauggcugguauggguuccggcaccaaaauuccgagggaaugggccaggcugccgaccuuaaaucuacacaggcggccauugaucagauaaacgguaagcugaaucguuugaucgggaaaaccaacgaaaaguuccaccagauugagaaggaauuuagcgagguugaaggccgcauccaggaccucgagaaauacguggaggauacgaagaucgaccuguggucauauaacgcagaauuacugguagcucucgagaaucaacauaccauugaucuuacagacagugaaaugaacaaacuguucgagaagacuaaaaagcaguugagagaaaaugccgaggauaugggaaacggcugcuuuaagauauaccacaaaugugacaaugcuugcaucggguccauuaggaacggaaccuaugaucaugacguguaccgggacgaggcccuaaauaaccgauuccagaucaagggugucgaacugaaaagcggcuacaaggauuggauucucuggaucucuuuugcaauaucaugcuuccugcuuuguguggcccuguugggguuuaucaugugggcuugccagaaaggaaauauucgcuguaacaucugcauuuga

SEQ ID NO: 139305 - RNA, 1701 nt, Artificial Sequence; identical to SEQ ID NO: 129963
  derived and/or modified CDS sequence (opt3) from hemagglutinin__InfluenzaA__AHL89942

SEQ ID NO: 139306 - RNA, 1701 nt, Artificial Sequence
  derived and/or modified CDS sequence (opt3) from hemagglutinin__InfluenzaA__AHL89954
augaagaccaucauugcccugagcuacauacucugccuuguguucgcucagaaacugcccggcaacgacaauuccacagcaacuuuguguuuagggcaccaugccgucccuaacggaacgaucguuaagaccauuacaaaugaucaaaucgaggugacuaacgcgaccgaacugguacagucuucaaguacaggugagauuugcgacagcccacaccagauccuagauggcgaaaauuguacccucauagacgcucugcuuggggauccgcagugcgacggauuucaaaacaaaaagugggaucuguucguggagagauccaaagccuauucuaauuguuaccccuaugacgucccugaucaugcaucguugaggucacucguggccagcaguggcacucuggaauuuaacaaugaguccuucaacuggacagguguuacccagaaugggacgucuagcgcuugcauccggcgcuccaacaauucauuuuucagucgacugaacuggcucacucacuuaaaguuuaaguacccagcacugaaugugaccaugcccaacaacgagaaauucgacaaacuuuauauuuggggaguccaucacccuggcacagauaaugaccagaucuuuuuguacgcccaggcuagcggccguauuacugugucuaccaagagaucccaacagacaguaaucccaaacauagggucaaggccccggguucgcaauauuccuagcagaaucaguauuuauuggaccaucgugaagccaggagauauccugcuaauuaacucuacggguaaucucauagccccgaggggcuacuucaaaauccgguccggaaagagcucgauuaugcgcucugacgcgcccaucgggaaguguaacuccgaaugcauaacuccuaauggcucaauuccaaacgacaaacccuuucagaaugucaaccgaaucacauacggugcauguccuagauaugugaagcagaauacccugaaacuugccacugggaugaggaacgugccagagaagcaaacacggggaaucuucggcgcuauugccggcuuuaucgaaaaugggugggagggaauggucgaugguugguacggcuuccgucaccagaacagugaggggauuggacaggcagcugaccugaaaagcacccaagccgcgauagaucagaucaauggcaaguugaaccgccucauugguaaaacgaacgaaaaguuccaucagaucgagaaggaauuuuccgagguugaagggagaauccaggaccuggagaaauauguggaggauaccaagauugacuuauggucuuacaaugccgaacugcucguagcacuugagaaccaacacacaauagaucugacugacagcgaaaugaauaaauuguucgagaagaccaaaaagcagcuaagggaaaacgcugaggauaugggcaauggaugcuuuaagaucuaucauaaaugugacaacgccugcauuggcucaauccggaaugggacauacgaucacgacguguaucgagacgaggcucugaacaaucgcuuccagauuaagggagucgaacucaaaagugguuacaaggauuggauccuguggauauccuuugccaucagcugcuuccuucuguguguggcauugcucggcuuuauuaugugggccugccagaaagggaacaucagauguaauauuugcaucuga

SEQ ID NO: 139307 - RNA, 1701 nt, Artificial Sequence; identical to SEQ ID NO: 129976
  derived and/or modified CDS sequence (opt3) from hemagglutinin__InfluenzaA__AHL89966

SEQ ID NO: 139308 - RNA, 1701 nt, Artificial Sequence; identical to SEQ ID NO: 129976
  derived and/or modified CDS sequence (opt3) from hemagglutinin__InfluenzaA__AHL89978

SEQ ID NO: 139309 - RNA, 1701 nt, Artificial Sequence; identical to SEQ ID NO: 130035
  derived and/or modified CDS sequence (opt3) from hemagglutinin__InfluenzaA__AHL89990

SEQ ID NO: 139310 - RNA, 1701 nt, Artificial Sequence
  derived and/or modified CDS sequence (opt3) from hemagglutinin__InfluenzaA__AHL90002
augaagaccaucauugcccugagcuacauacucugccuuguguucgcucagaaacugcccggcaucgacaacuccacagcaacuuuguguuuagggcaccaugccgucccuaauggaacgauuguuaagaccaucacaaacgaucaaauugaggugacuaaugcgaccgaacugguacagucuucaaguacagguggcaucugcgacagcccacaccagauacuagauggggagaacuguacccucaucgacgcucugcuuggagauccgcagugcgacggcuuucaaaauaaaaagugggaucuguucguggaaagauccaaagccuauucuaacuguuaccccuaugacgucccugauuacgcaucguugaggucacucguggccagcagugguacucuggaguuuaauaacgaauccuucaauugggcugggguuacacagaacggaaccucuagcgcaugcaagcggggcuccaauaacucauuuuucagucgccugaauuggcucacgcauagcaaguuuaaauauccagccuuaaacgugacuaugcccaauaacgaggaguucgacaagcuguacauuuggggcguccaccauccugggaccgauaacgaccagaucuuucuuuaugcucaggccucuggacgaauuacaguguccacuaaacguucacaacagaccguaaucccaaauauagguagcagacccaggguucggaacauuccuagucgcaucucuauuuacuggacaaucgugaagccaggcgauaucuugcugauuaauuccaccgggaaccuaauagcgccgagaggauacuucaaaaucaggagcggcaagucgucuauuaugcgguccgacgcacccaucgguaaguguaauucagaaugcauaacgccuaacgggaguauuccaaaugacaaacccuuucagaacgucaaucgcaucacuuauggagccuguccucgauacgugaagcagaacacacucaaacuggcuaccggcaugagaaaugugccagagaagcaaacuaggggcaucuucggggccauugcaggauuuaucgaaaacgguugggagggcauggucgaugggugguauggauuccggcaccagaauagcgagggcaugggucaggcugccgaccuuaaauccacacaagcggccauugaucagauaaacgggaagcugaaucguuugaucggcaaaaccaacgaaaaguuccaccagauugagaaggaauuuucugagguugaaggacgcauccaggaccucgagaaauacguggaggauacgaagaucgaccuguggagcuauaacgcagaauuacugguagcucucgagaaucaacauaccauugaucuuacagacucagaaaugaacaaacuguucgagaagacuaaaaagcaguugagagaaaaugccgaggauaugggcaacgggugcuuuaagauauaccacaaaugugacaaugcuugcaucggaaguauuaggaacgguaccuaugaucaugacguguaccgggacgaggcccuaaauaaccgauuccagaucaagggcgucgaacugaaauccggguacaaggauuggauucucuggaucagcuuugcaauaucuugcuuccugcuuuguguggcccuguugggauuuaucaugugggcuugccagaaaggcaauauucgcuguaacaucugcauuuga

SEQ ID NO: 139311 - RNA, 1701 nt, Artificial Sequence
  derived and/or modified CDS sequence (opt3) from hemagglutinin__InfluenzaA__AHL90014
augaagaccaucauugcccugagcuacauacucugccuuguguucgcucagaaacugcccggcaacgacaauuccacagcaacuuuguguuuagggcaccaugccgucccuaacggaacgaucguuaagaccauuacaaaugaucaaguggagguaacuaacgcgaccgaacuggugcagucuucaaguacaggugagaucugcgacagcccacaccagauucuagauggcgaaaauuguacccucaucgacgcucugcuuggggauccgcagugcgacggauuucaaaacaaaaagugggaucuguucgucgagagauccaaagccuauucuaauuguuaccccuaugacgugccugauuacgcaucguugaggucacucguugccagcaguggcacucuggaauuuaacaaugaguccuucaacuggacaggugugacccagaaugggacgucuagcgcuugcauacggcgcuccaacaauucauuuuucagucgacugaacuggcucacucauuuaaaguuuaaguauccagcacugaaugucaccaugcccaacaacgagaaauucgacaaguuguacaucuggggagugcaccauccuggcacagauaaugaccagauuuuucuuuaugcccaggcuagcggccguaucacuguaucuaccaaaagaucccaacagacaguuauuccaaacaucgggucaaggccccgggugcgcaauauaccuagcagaauuaguaucuacuggaccauugucaagccaggagauauccugcuaaucaacucuacggguaaucucauugccccgaggggcuacuucaaaauacgguccggaaagagcucgaucaugcgcucugacgcgcccauugggaaguguaacuccgaaugcaucacuccuaauggcucaauaccaaacgacaaacccuuucagaaugugaaccgaauuacauauggugcauguccuagauacgugaagcagaauacccugaaacuugccacugggaugaggaacgucccagagaagcaaacacggggaaucuucggcgcuaucgccggcuuuauugaaaaugggugggagggaaugguugaugguugguauggcuuccgucaccagaacagugaggggaucggacaggcagcugaccugaaaagcacccaagccgcgauugaucagauaaauggcaaguugaaccgccucaucgguaaaacgaacgaaaaguuccaccagauugagaaggaauuuuccgagguggaagggagaauccaggaccuggagaaauacguagaggauaccaagaucgacuuauggucuuauaaugccgaacugcucguggcacuugagaaccaacauacaauugaucugacugacagcgaaaugaauaaauuguucgagaagaccaaaaagcagcuaagggaaaacgcugaggauaugggcaauggaugcuuuaagauauaccacaaaugugacaacgccugcaucggcucaauucggaaugggacauaugaucaugacgucuaccgagacgaggcucugaacaaucgcuuccagaucaagggaguggaacucaaaagugguuacaaggauuggauucuguggaucuccuuugccauaagcugcuuccuucuguguguugcauugcucggcuuuaucaugugggccugccagaaagggaacauuagauguaauaucugcauuuga

SEQ ID NO: 139312 - RNA, 1701 nt, Artificial Sequence; identical to SEQ ID NO: 139311
  derived and/or modified CDS sequence (opt3) from hemagglutinin__InfluenzaA__AHL90026

SEQ ID NO: 139313 - RNA, 1701 nt, Artificial Sequence
  derived and/or modified CDS sequence (opt3) from hemagglutinin__InfluenzaA__AHL90050
augaagaccaucauugcccugagcuacauacucugccuuguguucgcucagaaacugcccggcaacgacaauuccacagcaacuuuguguuuagggcaccaugccgucccuaacggaacgaucguuaagaccauuacaaaugaucaaaucgaggugacuaacgcgaccgaacugguacagucuucaaguacaggugagauuugcgacagcccacaccagauccuagauggcgaaaauuguacccucauagacgcucugcuuggggauccgcagugcgacggauuucaaaacaaaaagugggaucuguucguggagagauccaaagccuauucuaauuguuaccccuaugacgucccugauuacgcaucguugaggucacucguggccagcaguggcacucuggaauuuaacaaugaguccuucaacuggacagguguuacccagaaugggacgucuagcgcuugcauccggcgcuccaacaauucauuuuucagucgacugaacuggcucacucauuuaaaguuuaaguauccagcacugaaugugaccaugcccaacaacgagaaauucgacaaacuuuacauuuggggaguccaccauccuggcacagauaaugaccagaucuuuuuguaugcccaggcuagcggccguauuacugugucuaccaagagaucccaacagacaguaaucccaaacauagggucaaggccccggguucgcaauauuccuagcagaaucaguauuuacuggaccaucgugaagccaggagauauccugcuaauuaacucuacggguaaucucauagccccgaggggcuacuucaaaauccgguccggaaagagcucgauuaugcgcucugacgcgcccaucgggaaguguaacuccgaaugcauaacuccuaauggcucaauuccaaacgacaaacccuuucagaaugucaaccgaaucacauauggugcauguccuagauacgugaagcagaauacccugaaacuugccacugggaugaggaacgugccagagaagcaaacacggggaaucuucggcgcuauugccggcuuuaucgaaaaugggugggagggaauggucgaugguugguauggcuuccgucaccagaacagugaggggauuggacaggcagcugaccugaaaagcacccaagccgcgauagaucagaucaauggcaaguugaaccgccucauugguaaaacgaacgaaaaguuccaccagaucgagaaggaauuuuccgagguugaagggagaauccaggaccuggagaaauacguggaggauaccaagauugacuuauggucuuauaaugccgaacugcucguagcacuugagaaccaacauacaauagaucugacugacgcugaaaugaauaaauuguucgagaagaccaaaaagcagcuaagggaaaacgccgaggauaugggcaauggaugcuuuaagaucuaccacaaaugugacaacgcuugcauuggcagcauccggaaugggacauaugaucaugacguguaccgagacgaggcccugaacaaucgcuuccagauuaagggagucgaacucaaaucagguuacaaggauuggauccuguggauaaguuuugcaaucuccugcuuccuucuguguguggccuugcucggcuuuauuaugugggcuugccagaaagggaacaucagauguaauauuugcaucuga

SEQ ID NO: 139314 - RNA, 1701 nt, Artificial Sequence
  derived and/or modified CDS sequence (opt3) from hemagglutinin__InfluenzaA__AHL90062
augaagaccaucauugcccugagcuacauacucugccuuguguucgcucagaaacugcccgagaacgacaauuccacagcaacuuuguguuuaggccaccaugccgucccuaacgggacgaucguuaagaccauuacaaaugaucaaaucgaagugacuaacgcgaccgagcugguacagucuucaaguacaggagaaauuugcgacagcccacaccagauccuagauggugagaauuguacccucauagacgcucugcuuggcgauccgcagugcgacggguuucaaaacaaaaagugggaucuguucguggaaagauccaaagccuauucuaauuguuaccccuaugacgucccugauuacgcaucguugaggucacucguggccagcaguggaacucuggaguuuaacaaugaguccuucaacuggacaggcguuacccagaaugguacgucuagcgcuugcauccggcgcuccaacaauucauuuuucagucgacugaacuggcucacucauuuaaaguuuaaguauccagcacugaaugugaccaugcccaacaacgaaaaauucgacaaacuuuacauuuggggaguccaccauccugggacagauaaugaccagaucuuuuuguaugcccaggcuagcggccguauuacugugucuaccaagagaucccaacagacaguaaucccaaacauaggcucaaggccccggguucgcaauauuccuagcagaaucaguauuuacuggaccaucgugaagccaggggauauccugcuaauuaacucuacgggaaaucucauagccccgagggguuacuucaaaauccgguccggcaagagcucgauuaugcgcucugacgcgcccaucgggaaguguaacuccgagugcauaacuccuaauggaucaauuccaaacuauaaacccuuucagaaugucaaccgaaucacauacggcgcauguccuagauaugugaagcagaauacccugaaacuugccacugguaugaggaacgugccagaaaagcaaacacgggggaucuucggagcuauugccggcuuuaucgagaauggcugggaggggauggucgacggaugguacgguuuccgucaccagaacagugaaggcauugggcaggcagcugaucugaaaagcacccaagccgcgauagaccagaucaauggaaaguugaaccgccucauuggcaaaacgaacgagaaguuccaccagaucgaaaaggaguuuuccgaaguugaggguagaauccaggaucuggagaaauauguggaagacaccaagauugauuuauggucuuacaaugccgagcugcucguagcacuugaaaaccaacauacaauagaccugacugauagcgagaugaauaaauuguucgaaaagaccaaaaagcagcuaagggagaacgcugaggacauggggaauggcugcuuuaagaucuaucacaaaugugauaacgccugcauuggaucaauccggaauggcacauacgaccaugauguguaccgagacgaagcucugaacaaucgcuuccagauuaagggggucgagcucaaaaguggauauaaggacuggauccuguggauauccuuugccaucagcugcuuccuucuguguguggcauugcucgguuuuauuaugugggccugccagaaaggcaacaucagauguaauauuugcaucuga

SEQ ID NO: 139315 - RNA, 1701 nt, Artificial Sequence; identical to SEQ ID NO: 129976
  derived and/or modified CDS sequence (opt3) from hemagglutinin__InfluenzaA__AHL90074

SEQ ID NO: 139316 - RNA, 1701 nt, Artificial Sequence
  derived and/or modified CDS sequence (opt3) from hemagglutinin__InfluenzaA__AHL90086
augaagaccaucauugcccugagcuacauacucugccuuguguucgcucagaaacugcccggcaacgacaauuccacagcaacuuuguguuuagggcaccaugccgucccuaacggaacgaucguuaagaccauuacaaaugaucaaaucgaggugacuaacgcgaccgaacugguacagucuucaaguacaggugagauuugcgacagcccacaccagauccuagauggcgaaaauuguacccucauagacgcucugcuuggggauccgcagugcgacggauuucaaaacaaaaagugggaucuguucguggagagauccaaagccuauucuaauuguuaccccuaugacgucccugauuacgcaucguugaggucacucguggccagcaguggcacucuggaauuuaacaaugaguccuucaacuggacagguguuacccagaaugggacgucuagcgcuugcauccggcgcuauaacaauuccuuuuucucacgacugaacuggcucacucauuuaaaguuuaaguacccagcacugaaugugaccaugcccaacaacgagaaauucgacaaacuuuauauuuggggaguccaccauccuggcacagauaaugaccagaucuuuuuguacgcccaggcuaguggccguauuacugugagcaccaagagaucucaacagacaguaaucccaaacauaggguccaggccccggguucgcaauauuccuucaagaaucagcauuuacuggaccaucgugaagccaggagauauccugcuaauuaacaguacggguaaucucauagccccgaggggcuauuucaaaauccggucugggaaguccagcauuaugcgcucggacgcgcccaucggaaaguguaacucugaaugcauaacuccuaauggcuccauuccaaacgacaaacccuuucagaaugucaaccgaaucacauacggugcauguccuagauaugugaagcagaauacccugaaacuugccacugggaugaggaacgugccagagaagcaaacacggggaaucuucggcgcuauugccggcuuuaucgaaaaugggugggagggaauggucgaugguugguacggcuuccgucaccagaacucagaggggauuggacaggcagcugaccugaaaaguacccaagccgcgauagaucagaucaauggcaaguugaaccgccucauugguaaaacgaacgaaaaguuccaccagaucgagaaggaauuuagcgagguugaagggagaauccaggaccuggagaaauauguggaggauaccaagauugacuuaugguccuacaaugccgaacugcucguagcacuugagaaccaacauacaauagaucugacugacucugaaaugaauaaauuguucgagaagaccaaaaagcagcuaagggaaaacgcugaggauaugggcaauggaugcuuuaagaucuaucacaaaugugacaacgccugcauuggcagcauccggaaugggacauacgaucaugacguguaccgagacgaggcucugaacaaucgcuuccagauuaagggagucgaacucaaaucagguuauaaggauuggauccuguggauaaguuuugccaucuccugcuuccuucuguguguggcauugcucggcuuuauuaugugggccugccagaaagggaacaucagauguaauauuugcaucuga

SEQ ID NO: 139317 - RNA, 1701 nt, Artificial Sequence
  derived and/or modified CDS sequence (opt3) from hemagglutinin__InfluenzaA__AHL90098
augaagaccaucauugcccugagcuacauacucugccuuguguucgcucagaaacugcccggcaacgacaauuccacagcaacuuuguguuuagggcaccaugccgucccuaacggaacgaucguuaagaccauuacaaaugaucaaaucgaggugacuaacgcgaccgaacugguacagucuucaaguacagguggcauuugcgacagcccacaccagauccuagauggggagaauuguacccucauagacgcucugcuuggagauccgcagugcgacggcuuucaaaacaaaaagugggaucuguucguggaaagauccaaagccuauucuaauuguuaccccuaugacgucccugauuacgcaucguugaggucacucguggccagcagugguacucuggaguuuaacaaugaauccuucaacuggacagggguuacccagaauggaacgucuagcgcuugcaagcggggcuccgacaacucauuuuucagucgccugaauuggcucacucauuuaaaguuuaaauauccagcacugaacgugaccaugcccaauaacgagaaguucgauaaacuuuacaucuggggcguccaccauccugggacagacaacgaucagaucuuuuuguaugcccaggcuagcggacgaauuacugugucuaccaagcguucccaacagacaguaauuccaaauaucgguucaagacccaggguucggaacauaccuagccgcauuaguaucuacuggaccauugugaaaccaggcgacauccugcuaaucaauucuacggggaaccucauugccccgagaggauacuucaagauaagguccggcaagagcucgaucaugcggucugacgcgcccauugauaaauguaauuccgagugcaucacuccuaacgguucaauaccaaaugacaagcccuuucagaacgucaaucgcauuacauauggggcauguccucgauacgugaaacagaacacccugaagcuggccacuggaaugagaaaugugccagaaaaacaaacaaggggcaucuucggcgcuaucgccggguuuauugagaacggaugggaagguauggucgauggcugguauggguuccggcaccagaauagugagggaaucggccaggcagcugaccuuaagagcacccaagccgcgauuaaccagauaaaugguaaauugaaccgucucaucgggaagacgaacgagaaguuccaccagauugaaaaagaguuuuccgaaguugagggccgcauccaggaucuggaaaaguacguggaggacaccaaaaucgauuuauggucuuauaaugccgagcugcucguagcacuugaaaaccaacauacaauugaccugacugauagcgagaugaauaaguuguucgaaagaaccaaaaagcagcuaagggagaacgcugaagacaugggaaauggcugcuuuaagauauaccacaaaugugauaacgccugcaucgggucaauucggaauggaacauaugaccaugacguguaccgagaugaggcucugaacaaucgcuuccagaucaagggugucgagcucaaaaguggcuacaaggacuggauucuguggaucuccuuugccauaagcugcuuccuucuguguguggcauugcucggguuuaucaugugggccugccagaaaggaaacauuagauguaauaucugcauuuga

SEQ ID NO: 139318 - RNA, 1701 nt, Artificial Sequence
  derived and/or modified CDS sequence (opt3) from hemagglutinin__InfluenzaA__AHL90110
augaagaccaucauugcccugagcuacauacucugccuuguguucgcucagaaacugcccggcaacgacaauuccacagcaacuuuguguuuagggcaccaugccgucccuaacggaacgaucguuaagaccauuacaaaugaucaaaucgaggugacuaacgcgaccgaacugguacagucuucaaguacaggugagauuugcgacagcccacaccagauccuagauggcgaaaauuguacccucauagacgcucugcuuggggauccgcagugcgacggauuucaaaacaaaaagugggaucuguucguggagagauccaaagccuauucuaauuguuaccccuaugacgucccugauuacgcaucguugaggucacucguggccagcaguggcacucuggaauuuaacaaugaguccuucaacuggacagguguuacccagaaugggacgucuagcgcuugcauccggcgcuccaacaauucauuuuucagucgacugaacuggcucacucauuuaaaguuuaaguauccagcacugaaugugaccaugcccaacaacgagaaauucgacaaacuuuacauuuggggaguccaccauccuggcacagauaaugaccagaucuuuuuguaugcccaggcuagcggccguauuacugugucuaccaagagaucccaacagacaguaaucccaaacauagggucaaggccccggguucgcaauauuccuagcagaaucaguauuuacuggaccaucgugaagccaggagauauccugcuaauuaacucuacggguaaucucauagccccgaggggcuacuucaaaauccaguccggaaagagcucggucaugcggucugacgcgcccauugggaaguguaacuccgaaugcaucacuccuaauggcucaauaccaaacgacaaacccuuucagaaugugaaccgcauuacauauggugcauguccucgauacgugaagcaaaauacccugaaacuugccacugggaugagaaacgucccagagaagcagacaaggggaaucuucggcgcuaucgccggcuuuauugaaaaugggugggagggaaugguugaugguugguauggcuuccggcaccagaacagugaggggaucggacaagcagcugaccugaaaagcacccaggccgcgauugaucagauaaauggcaaguugaaccgucucaucgguaaaacgaacgaaaaguuccaccagauugagaaggaauuuuccgagguggaagggcgcauccaagaccuggagaaauacguagaggauaccaagaucgacuuauggucuuauaaugccgaacugcucguggcacuugagaaccagcauacaauugaucugacugacagcgaaaugaauaaauuguucgagaagaccaaaaagcagcuaagagaaaacgcugaggauaugggcaauggaugcuuuaagauauaccacaaaugugacaacgccugcaucggcucaauuaggaaugggacauaugaucaugacgucuaccgggacgaggcucugaacaaucgauuccagaucaagggaguggaacucaaaagugguuacaaggauuggauucuguggaucuccuuugccauaagcugcuuccuucuguguguugcauugcucggcuuuaucaugugggccugccaaaaagggaacauucgcuguaauaucugcauuuga

SEQ ID NO: 139319 - RNA, 1698 nt, Artificial Sequence; identical to SEQ ID NO: 132143
  derived and/or modified CDS sequence (opt3) from hemagglutinin__InfluenzaA__AHL90122

SEQ ID NO: 139320 - RNA, 1698 nt, Artificial Sequence; identical to SEQ ID NO: 130536
  derived and/or modified CDS sequence (opt3) from hemagglutinin__InfluenzaA__AHL90133

SEQ ID NO: 139321 - RNA, 1698 nt, Artificial Sequence; identical to SEQ ID NO: 132143
  derived and/or modified CDS sequence (opt3) from hemagglutinin__InfluenzaA__AHL90145

SEQ ID NO: 139322 - RNA, 1698 nt, Artificial Sequence
  derived and/or modified CDS sequence (opt3) from hemagglutinin__InfluenzaA__AHL90157
augaaggugaaacugcucguccuucugugcaccuucacagccacuuacgcugacacgaucuguauuggcuaucacgcaaacaauagcaccgauacaguugacacuguguuggagaagaacguaaccgugacacauuccgucaauuuacuggaaaacucucacaaugggaaacuaugccuccugaagggaauagcgccccuucagcuggguaacuguucaguggccggcuggaucuuggggaauccugagugcgaacuccugauuaguaaagagagcugguccuacaucguugaaaagccaaacccggagaauggaaccuguuaucccggccauuuugcugauuacgaggaacugagagagcaacucucuucggugagcucauucgaaagguuugagauuuucccuaaggagaguuccuggccaaaccacacugucacaggugugucugccagcugcucccauaauggggaaucaaguuuuuaucggaacuuacuguggcuuaccggcaaaaauggauuguaccccaaccugagcaagucuuaugcaaauaacaaagagaaggaaguucuaguacucuggggcgugcaccacccuccaaacaucggggaccagaaagcccuguaccauacggagaaugcuuacgucuccguggugucaagccacuauagucgcaaguucacucccgaaauagcaaagcgaccuaaaguccgugaucaggagggaagaaucaacuacuauuggacccuucuggagccaggugacacaauuaucuuugaagccaauggcaacuugauugcuccgagguacgccuucgcgcucucucggggguuuggauccggcaucauaaauagcaacgcacccauggauaagugugacgccaaaugccagacuccucaaggugcuauuaauucgucucugccauuccagaacguucaucccgugaccaucggggaguguccuaaguauguacgcuccgccaaauuaagaauggugacaggacugaggaauauuccaucaauccagagucggggccucuuuggcgcaaucgcuggguucauugaaggagguuggaccggcauggucgaugggugguacggauaucaccaccagaacgagcaaggcagcgguuacgccgcggaccagaaguccacgcagaaugccauaaacgggaucacuaauaaagugaacucuguuauugaaaagaugaauacacaguuuaccgcagugggcaaggaguucaacaaacuugagcgccgaauggaaaaccugaauaagaaagucgaugacggauucaucgauauauggacuuacaacgcugaguugcuagugcugcucgaaaaugagagaacacuggacuuucaugacagcaacguaaagaaucuuuaugaaaaaguuaagauucaacugaagaacaaugccaaagagaucggcaacgggugcuucgaguuuuaccacaaguguaaugaugaaugcauggagucagugaaaaacggaaccuaugacuaccccaaguauagugaagaguccaaauugaauagggagaagaucgauggugucaagcucgaaagcaugggcguguaccagauucuggcuaucuauucuacgauugccucaaguuuaguccugcuagugagccucggggcaauauccuucuggaugugcucuaacggaucgcugcagugucggaucugcauuuga

SEQ ID NO: 139323 - RNA, 1698 nt, Artificial Sequence; identical to SEQ ID NO: 132143
  derived and/or modified CDS sequence (opt3) from hemagglutinin__InfluenzaA__AHL90169

SEQ ID NO: 139324 - RNA, 1698 nt, Artificial Sequence
  derived and/or modified CDS sequence (opt3) from hemagglutinin__InfluenzaA__AHL90181
augaaggugaaacugcucguccuucugugcaccuucgccgcuacauacgcagacacuaucuguauuggcuaucacgccaacaauagcacggauaccguugacacaguguuggagaagaacguaacugugacccauuccgucaauuuacuggaaaacucucacaaugggaaacuaugccuccugaagggaauagcgccccuucagcuggguaacuguucaguggcuggcuggaucuuggggaauccugagugcgaacuccugauuaguaaagagagcugguccuacaucguugaaaagccaaacccgaagaauggaacauguuaucccggccauuuugccgauuacgaggagcugagagaacaacucucuucggugagcucauucgagagguuugaaauuuucccuaaagagaguuccuggccaaaccacaccgucacuggugugucugcaagcugcucccauaauggggagucaaguuuuuaucggaacuuacuguggcuuacaggaaagaauggcuuguaccccaaccugagcaaaucuuaugccaauaacaaggaaaaagagguucuaguacucuggggcgugcaccacccuccaaacaucggggaccagaaggcucuguaccauaccgaaaaugcauacgucuccguggugucaagccacuauagucgcaaguucacgcccgagauagccaaacgaccuaagguccgugaucaggaaggaagaaucaacuacuauuggacucuucuggagccaggugacaccauuaucuuugaggcuaauggcaacuugauugccccgagguacgcguucgcacucucucggggguuuggauccggcaucauaaauagcaacgcccccauggauaaaugugacgcuaagugccagacaccucaaggugccauuaauucgucucugccauuccagaacguucaucccgugacuaucggggaauguccuaaauauguacgcuccgcaaaguuaagaauggugaccggacugaggaauauuccaucaauccagagucggggccucuuuggcgcuaucgccggguucauugagggagguuggacaggcauggucgaugggugguacggauaucaccaccagaacgaacaaggcagcgguuacgcggccgaccagaaauccacccagaaugcaauaaacgggaucacgaauaaggugaacucuguuauugagaagaugaauacucaguuuacagcugugggcaaagaguucaacaaacuugaacgccgaauggagaaccugaauaaaaaggucgaugacggauucaucgauauauggaccuacaacgccgaauugcuagugcugcucgagaaugaaagaacucuggacuuucaugacagcaacguaaagaaucuuuaugagaagguuaagucacaacugaaaaacaaugcuaaggaaauuggcaacgggugcuucgaguuuuaccacaaauguaaugaugagugcauggaaagugugaagaacggaacauaugacuaccccaaauauuccgaggaaagcaaguugaauagggagaagaucgauggugucaaacucgagucuaugggcguguaccagauccuggccauuuauucaaccgucgcaaguagcuuagugcugcuaguuucccucggggccaucucuuucuggaugugcucgaacggaagccugcagugucggauuugcauauga

SEQ ID NO: 139325 - RNA, 1698 nt, Artificial Sequence; identical to SEQ ID NO: 131218
  derived and/or modified CDS sequence (opt3) from hemagglutinin__InfluenzaA__AHL90217

SEQ ID NO: 139326 - RNA, 1698 nt, Artificial Sequence; identical to SEQ ID NO: 131218
  derived and/or modified CDS sequence (opt3) from hemagglutinin__InfluenzaA__AHL90229

SEQ ID NO: 139327 - RNA, 1698 nt, Artificial Sequence
  derived and/or modified CDS sequence (opt3) from hemagglutinin__InfluenzaA__AHL90241
augaaggugaaacugcucguccuucugugcaccuucacagccacuuacgcugacacgaucuguauuggcuaucacgcaaacaauagcaccgauacaguugacacuguguuggagaagaacguaaccgugacacauuccgucaauuuacuggaaaacucucacaaugggaaacuaugccuccugaagggaauagcgccccuucagcuggguaacuguucaguggccggcuggaucuuggggaauccugagugcgaacuccugauuccaaaagagaguuggagcuacaucguugaaaagccgaaccccgagaauggaaccuguuauccuggccauuuugcugauuacgaggaacugagagagcaacucuccucugugucgucauucgaaagguuugagauuuucccaaaggagagcaguuggcccaaccacacugucacagguguguccgccucuugcagccauaauggggaauccucauuuuaucggaacuuacuguggcuuaccggaaagaauggcuuguacccuaaccugaguaagagcuaugcaaauaacaaagagaaggaaguucuaguacucuggggcgugcaccacccacccaacaucggggaccagaaagcccuguaccauacggagaaugcuuacgucucugugguguccucacacuauagccgcaaguucacuccugaaauagcaaagcgaccaaaaguccgugaucaggagggaagaaucaacuacuauuggacccuucuggagccgggugacacaauuaucuuugaagccaauggcaacuugauugcucccagguacgccuucgcgcucagucggggguuuggaucuggcaucauaaauuccaacgcaccuauggauaagugugacgccaaaugccagacuccacaaggugcuauuaauagcucgcugcccuuccagaacguucauccugugaccaucggggaguguccaaaguauguacgcucugccaaauuaagaauggugacaggacugaggaauauucccuccauccagucacggggccucuuuggcgcaaucgcuggguucauugaaggagguuggaccggcauggucgaugggugguacggauaucaccaccagaacgagcaaggcagugguuacgccgcggaccagaaaagcacgcagaaugccauaaacgggaucacuaauaaagugaacuccguuauugaaaagaugaauacacaguuuaccgcagugggcaaggaguucaacaaacuugagcgccgaauggaaaaccugaauaagaaagucgaugacggauucaucgauauauggacuuacaacgcugaguugcuagugcugcucgaaaaugagagaacacuggacuuucaugacucuaacguaaagaaucuuuaugaaaaaguuaagagccaacugaagaacaaugccaaagagauuggcaacgggugcuucgaguuuuaccacaaguguaaugaugaaugcauggagucagugaaaaacggaaccuaugacuacccgaaguauagugaagaguccaaauugaauagggagaagaucgauggugucaagcucgaaagcaugggcguguaccagauccuggcuauuuauucuacggucgccucaaguuuagugcugcuaguuagccucggggcaaucuccuucuggaugugcucuaacggaucgcugcagugucggauuugcauauga

SEQ ID NO: 139328 - RNA, 1698 nt, Artificial Sequence
  derived and/or modified CDS sequence (opt3) from hemagglutinin__InfluenzaA__AHL90253
augaaggugaaacugcucguccuucugugcaccuucacagccacuuacgcugacacgaucuguauuggcuaucacgcaaacaauagcaccgauacaguugacacuguguuggagaagaacguaaccgugacacauuccgucaauuuacuggaaaacucucacaaugggaaacuaugccuccugaagggaauagcgccccuucagcuggguaacuguucaguggccggcuggaucuuggggaauccugagugcgaacuccugauuaguaaagagagcugguccuacaucguugaaaagccaaacccggagaauggaaccuguuaucccggccauuuugcugauuacgaggaacugagagagcaacucucuucggugagcucauucgaaagguuugagauuuucccuaaggguaguuccuggccaaaccacacugucacaggggugucugccagcugcucccauaauggagagucaaguuuuuaucggaacuuacuguggcuuaccggcaaaaauggcuuguaccccaaccugagcaagucuuaugcaaauaacaaagaaaaggagguucuaguacucuggggagugcaccacccuccaaacaucggggaccagaaaacgcuguaccauacugaaaaugccuacgucuccguggugucaagccacuauagucgcaaguucacccccgagauagcuaagcgaccuaaaguccgugaucaggaagguagaaucaacuacuauuggacacuucuggagccaggcgacacuauuaucuuugaggcaaaugggaacuugauugccccgagguacgcuuucgcccucucucggggauuuggcuccgguaucauaaauagcaacgcgcccauggauaagugugacgcaaaaugccagaccccucaaggggccauuaauucgucucugccauuccagaacguucaucccgugacaaucggagaauguccuaaguauguacgcuccgcuaaauuaagaauggugaccggccugaggaauauuccaucaauccagagucggggccucuuuggggccaucgcaggauucauugaggguggcuggacggggauggucgauggaugguacggcuaucaccaccagaacgaacaagguagcggguacgcugccgaccagaaguccacucagaaugcgauaaacggcaucacaaauaaagugaacucuguuauugagaagaugaauacccaguuuacugccgugggaaaggaguucaacaaacuugaacgccgaauggagaaccugaauaagaaagucgaugacggcuucaucgauauauggacauacaacgcagaauugcuagugcugcucgagaaugaaagaacccuggacuuucaugacagcaacguaaagaaucuuuaugagaaaguuaagucacaacugaagaacaaugcuaaagaaauugggaacggaugcuucgaguuuuaccacaaguguaaugaugagugcauggaaagugugaaaaacgguacguaugacuaccccaaguauuccgaggucagcaaauugaauagggaaaagaucgauggcgugaagcucgagucuaugggggucuaccagauccuggccauuuauucaaccguggcuaguagcuuaguucugcuagugucccucggagccaucucuuucuggaugugcucgaacggcagccugcagugucggauuugcauauga

SEQ ID NO: 139329 - RNA, 1698 nt, Artificial Sequence; identical to SEQ ID NO: 130536
  derived and/or modified CDS sequence (opt3) from hemagglutinin__InfluenzaA__AHL90265

SEQ ID NO: 139330 - RNA, 1698 nt, Artificial Sequence
  derived and/or modified CDS sequence (opt3) from hemagglutinin__InfluenzaA__AHL90277
augaaggugaaacugcucguccuucugugcaccuucacagccacuuacgcugacacgaucuguauuggcuaucacgcaaacaauagcaccgauacaguugacacuguguuggagaagaacguaaccgugacacauuccgucaauuuacuggaaaacucucacaaugggaaacuaugccuccugaagggaauagcgccccuucagcuggguaacuguucaguggccggcuggaucuuggggaauccugagugcgaacuccugauuaguaaagagagcugguccuacaucguugaaaagccaaacccggagaauggaaccuguuaucccggccauuuugcugauuacgaggaacugagagagcaacucucuucggugagcucauucgaaagguuugagauuuucccuaaggagaguuccuggccaaaccacacugucacaggugugucugccagcugcucccauaauggggaaucaaguuuuuaucggaacuuacuguggcuuaccggcaaaaauggauuguaccccaaccugagcaagucuuaugcaaauaacaaagagaaggaaguucuaguacucuggggcgugcaccacccuccaaacaucgucgaccagaaaacgcuguaccauacugagaaugccuacguguccguggucucaagccacuauagucgcaaguucacccccgaaauagcuaagcgaccuaaaguucgugaucaggaggggagaaucaacuacuauuggacacuucuggagccaggagacacuauuaucuuugaagcaaaugguaacuugauugccccgagguacgcuuucgcccucucucggggcuuuggguccggaaucauaaauagcaacgcgcccauggauaagugugacgcaaaaugccagaccccucaaggcgccauuaauucgucucugccauuccagaacgugcaucccguaacaaucggugaguguccuaaguaugugcgcuccgcuaaauuaagaauggucaccgggcugaggaauauuccaucaauccagagucggggacucuuuggcgccaucgcaggcuucauugaagggggauggacggguaugguggauggcugguacggguaucaccaccagaacgagcaaggaagcggcuacgcugccgaccagaaguccacucagaaugcgauaaacgguaucacaaauaaaguuaacucugugauugaaaagaugaauacccaguuuacugccgucgggaaggaguucaacaaacuugagcgccgaauggaaaaccugaauaagaaaguggaugacggcuucaucgauauauggacauacaacgcagaguugcuaguacugcucgaaaaugagagaacccuggacuuucaugacagcaacguuaagaaucuuuaugaaaaagugaagucacaacugaagaacaaugcuaaagagauuggaaacggcugcuucgaguuuuaccacaaguguaaugaugaaugcauggagagugucaaaaacgggacguaugacuaccccaaguauuccgaagagagcaaauugaauagggagaagaucgauggagugaagcucgaaucuaugggugucuaccagauccuggccauuuauucaaccguggcuaguagcuuaguucugcuagugucccucggcgccaucucuuucuggaugugcucgaacgggagccugcagugucggauuugcauauga

SEQ ID NO: 139331 - RNA, 1698 nt, Artificial Sequence
  derived and/or modified CDS sequence (opt3) from hemagglutinin__InfluenzaA__AHL90289
augaaggugaaacugcucguccuucugugcaccuucacagccacuuacgcugacacgaucuguauuggcuaucacgcaaacaauagcaccgauacaguugacacuguguuggagaagaacguaaccgugacacauuccgucaauuuacuggaaaacucucacaaugggaaacuaugccuccugaagggaauagcgccccuucagcuggguaacuguucaguggccggcuggaucuuggggaauccugagugcgaacuccugauuaguaaagagagcugguccuacaucguugaaaagccaaacccggagaauggaaccuguuaucccggccauuuugcugauuacgaggaacugagagagcaacucucuucggugagcucauucgaaagguuugagauuuucccuaaggagaguuccuggccaaaccacacugucacaggugugucugccagcugcucccauaauggggaaucaaguuuuuaucggaacuuacuguggcuuaccggcaaaaauggauuguaccccaaccugagcaagucuuaugcaaauaacaaagagaaggaaguucuaguacucuggggcgugcaccacccuccaaacaucggggaccagaaagcccuguaccauacggagaaugcuuacgucuccguggugucaagccacuauagucgcaaguucacucccgaaauagcaaagcgaccuaaaguccgugaucaggagggaagaaucaacuacuauuggacccuucuggagccaagggacacaauuaucuuugaagccaaugguaacuugauugcuccgcgguacgccuucgcgcucucucgcggcuuuggguccggaaucauaaauagcaacgcacccauggauaagugugacgccaaaugccagacuccucaaggcgcuauuaauucgucucugccauuccagaacguucaucccgugaccaucggugaguguccuaaguauguaagauccgccaaauuaaggauggugacagggcugcggaauauuccaucaauccagagucgcggacucuuuggcgcaaucgcuggcuucauugaagggggauggaccgguauggucgauggcugguacggguaucaccaccagaacgagcaaggaagcggcuacgccgcggaccagaaguccacgcagaaugccauaaacgguaucacuaauaaagugaacucuguuauugaaaagaugaauacacaguuuaccgcaguggggaaggaguucaacaaacuugagcgaagaauggaaaaccugaauaagaaagucgaugacggcuucaucgauauauggacuuacaacgcugaguugcuagugcugcucgaaaaugagaggacacuggacuuucaugacagcaacguaaagaaucuuuaugaaaaaguuaagucacaacugaagaacaaugccaaagagauuggaaacggcugcuucgaguuuuaccacaaguguaaugaugaaugcauggagagugugaaaaacgggaccuaugacuaccccaaguauuccgaagagagcaaauugaaucgggagaagaucgauggagucaagcucgaaucuauggguguguaccagauccuggcuauuuauucaacggucgccaguagcuuagugcugcuaguuucccucggcgcaaucucuuucuggaugugcucgaacgggagccugcagugucguauuugcauauga

SEQ ID NO: 139332 - RNA, 1698 nt, Artificial Sequence; identical to SEQ ID NO: 139331
  derived and/or modified CDS sequence (opt3) from hemagglutinin__InfluenzaA__AHL90301

SEQ ID NO: 139333 - RNA, 1698 nt, Artificial Sequence
  derived and/or modified CDS sequence (opt3) from hemagglutinin__InfluenzaA__AHL90325
augaaggugaaacugcucguccuucugugcaccuucacagccacuuacgcugacacgaucuguauuggcuaucacgcaaacaauagcaccgauacaguugacacuguguuggagaagaacguaaccgugacacauuccgucaauuuacuggaaaacucucacaaugggaaacuaugccuccugaagggaauagcgccccuucagcuggguaacuguucaguggccggcuggaucuuggggaauccugagugcgaacuccugauuaguaaagagagcugguccuacaucguugaaaagccaaacccggagaauggaaccuguuaucccggccauuuugcugauuacgaggaacugagagagcaacucucuucggugagcucauucgaaagguuugagauuuucccuaaggagaguuccuggccaaaccacacugucacaggugugucugccagcugcucccauaauggggaaucaaguuuuuaucggaacuuacuguggcuuaccggcaaaaauggauuguaccccaaccugagcaagucuuaugcaaauaacaaagagaaggaaguucuaguacucuggggcgugcaccacccuccaaacaucggggaccagaaagcccuguaccauacggagaaugcuuacgucuccguggugucaagccacuauagucgcaaguucacucccgaaauagcaaagcgaccuaaaguccgugaucaggagggaagaaucaacuacuauuggacccuucuggagccaggugacacaauuaucuuugaagccaauggcaacuugauugcuccgagguacgccuucgcgcucucucggggguuuggauccggcaucauaaauagcaacgcacccauggauaagugugacgccaaaugccagacuccucaaggugcuauuaauucgucucugccauuccagaacguucaucccgugaccaucggggaguguccuaaguauguacgcuccgccaaauuaagaauggugacaggacugaggaauauuccaucaauccagagucggggccucuuuggcgcaaucgcuggguucauugaaggagguuggaccggcauggucgaugggugguacggauaucaccaccagaacgagcaaggcagcgguuacgccgcggaccagaaguccacgcagaaugccauaaacgggaucacuaauaaagugaacucuguuauugaaaagaugaauacacaguuuaccgcagugggcaaggaguucaacaaacuugagcgccgaauggaaaaccugaauaagaaagucgaugacggauucaucgauauauggacuuacaacgcugaguugcuagugcugcucgaaaaugagagaacacuggacuuucaugacagcaacguaaagaaucuuuaugaaaaaguuaagucacaacugaagaacaaugccaaagagaugggcaacgggugcuucgaguuuuaccacaaguguaaugaugaaugcauggagagugugaaaaacggaaccuaugacuaccccaaguauuccgaagagagcaaauugaauagggagaagauugauggugucaagcucgaaucuaugggcguguaccagauccuggcuaucuauucaacggucgccaguagcuuagugcugcuaguuucccucggggcaauuucuuucuggaugugcucgaacggaagccugcagugucggaucugcauuuga

SEQ ID NO: 139334 - RNA, 1698 nt, Artificial Sequence; identical to SEQ ID NO: 139333
  derived and/or modified CDS sequence (opt3) from hemagglutinin__InfluenzaA__AHL90337

SEQ ID NO: 139335 - RNA, 1698 nt, Artificial Sequence; identical to SEQ ID NO: 130536
  derived and/or modified CDS sequence (opt3) from hemagglutinin__InfluenzaA__AHL90349

SEQ ID NO: 139336 - RNA, 1698 nt, Artificial Sequence; identical to SEQ ID NO: 130536
  derived and/or modified CDS sequence (opt3) from hemagglutinin__InfluenzaA__AHL90361

SEQ ID NO: 139337 - RNA, 1698 nt, Artificial Sequence; identical to SEQ ID NO: 139330
  derived and/or modified CDS sequence (opt3) from hemagglutinin__InfluenzaA__AHL90373

SEQ ID NO: 139338 - RNA, 1701 nt, Artificial Sequence
  derived and/or modified CDS sequence (opt3) from hemagglutinin__InfluenzaA__AHL90385
augaagaccaucauugcccugagcuacauacagugccucguguucgcucaaaaauuucccggcaacgacaauuccacagcaacucuuugucuggggcaccaugccgucccuaacggaacgaucguuaagaccauuacaaaugaucagaucgaggugacuaacgcgaccgaauugguacagucuucaaguacaggugagauuugcgacagcccacaccagaucuuagauggcgaaaauuguacccugauagacgcucuacucggggauccgcaaugcgacggauuccagaacaaaaauugggaucuguuuguggagagauccaaggccuauucuaacuguuaccccuaugacgucccugauuacgcaucgcuuaggucacugguggccagcaguggcacuuuggaguucaauaacgaauccuuuaauuggacagguguuacccagaacgggacgucuagcgcuugcauccggcgcuccaauaacucauucuuuagucgacucaauuggcugacucauagcaaauucaaguauccagcacugaacgugaccaugcccaacaaugagaacuuugacaagcucuacauuuggggaguccaccauccuggcacagauaaugaccagaucuucuuauaugcccaagcuagcggccguauuacuguguccaccaaaagaucacagcagacaguaaucccaaacauagggagcaggccccggguucgcaauauuccuaguagaaucucuauuuacuggaccaucgugaagccaggagauauccugcuuauuaacuccacggguaauuugauagccccgaggggcuacuuuaaaauccggagcgggaagucgucuauuaugcgcuccgacgcgcccaucggaaaauguaacucagaaugcauaacuccuaauggcaguauuccaaacgacaagcccuuccagaaugucaaccgaaucacauauggugcauguccuagauacgugaagcaaaauacccugaaacuagccacugggaugaggaacgugccagagaagcagacacggggaaucuuuggcgcuauugccggcuucaucgaaaaugggugggagggaauggucgaugguugguauggcuuccgucaccagaacagcgaggggauuggacaagcagcugaccucaaauccacccaggccgcgauagaucagaucaacggcaagcugaaucgccuuauugguagaacgaacgaaaaauuucaccagaucgagaaggaguucucugaaguugaagggaggauccaagaccuggagaaauacguggaggauaccaagauugacuuguggagcuauaaugccgaacuccugguagcauuagagaaccagcauacaauagaucugacugacucagaaaugaauaagcucuuugagaaaaccaagaaacagcuucgggaaaacgcugaggauaugggcaauggaugcuucaagaucuaccacaaaugugacaacgccugcauuggcaguauccgaaaugggacauaugaucaugacguguaccgcgacgaggcucugaacaauagauuucagauuaagggagucgaauugaaguccgguuacaaagauuggauccuauggauaucuuucgccaucucuugcuuucugcucuguauugcacugcuuggcuucaucaugugggccugccaaaaggggaacauuagguguaauaucugcauauga

SEQ ID NO: 139339 - RNA, 1701 nt, Artificial Sequence
  derived and/or modified CDS sequence (opt3) from hemagglutinin__InfluenzaA__AHL90397
augaagaccaucauugcccugagcuacauacucugccuuguguucgcucagaaacugcccggcaacgacaauuccacagcaacuuuguguuuagggcaccaugccgucccuaacggaacgaucguuaagaccauuacaaaugaucaaaucgaggugacuaacgcgaccgaacugguacagucuucaaguacaggugagauuugcgacagcccacaccagauccuagauggcgaaaauuguacccucauagacgcucugcuuggggauccgcagugcgacggauuucaaaacaaaaagugggaucuguucguggagagauccaaagccuauucuaauuguuaccccuaugacgucccugauuacgcaucguugaggucacucguggccagcaguggcacucuggaauuuaacaaugaguccuucaacuggacagguguuacccagaaugggacgucuagcgcuugcauccggcgcuccaacaauucauuuuucagucgacugaacuggcucacucauuuaaaguuuaaguauccagcacugaaugugaccaugcccaacaacgagcaguucgacaaacuuuacauuuggggaguccaccauccuggcacagauaaugaccagaucuuuuuguaugcccaagcuagcggccguauuacugugucuaccaagagaucccagcagacaguaaucccaaacauagggucaaggccccggguucgcaauauuccuagcagaaucaguauuuacuggaccaucgugaaaccaggagauauccugcuaauuaacucuacggguaaucucauagccccgaggggcuacuucaagauccgguccgggaaaagcucgauuaugcgcucugacgcgcccaucggaaaguguuccucagaaugcauaacuccuaacggcaguauuccaaaugacaagcccuuucagaacgucaaucgaaucacauauggugcauguccuagauacgugaaacaaaacacccugaaacuugccacugggaugaggaaugugccagagaagcagacacggggaaucuucggcgcuauugccggcuuuaucgaaaacgggugggagggaauggucgaugguugguauggcuuccgucaccagaauagcgaggggcgcggacaagcagcugaccugaaguccacccaggccgcgauugaucagauaaacggcaaauugaauagacucaucgguaagacgaacgaaaaauuccaccagauugagaaggaauuuucugagguugaagggaggauccaagaccuggagaaguacguggaggauaccaaaaucgacuuauggagcuauaacgccgaacugcucguagcacuugagaaucagcauacaauugaucugacugacucagaaaugaacaaguuguucgagaaaaccaagaaacagcuacgggaaaaugcugaggauaugggcaacggaugcuuuaagauauaccacaagugugacaaugccugcaucggcaguauucgaaacgggacauaugaucaugacguguaccgcgacgaggcucugaauaacagauuccagaucaaaggagucgaacucaaguccgguuacaaagauuggauucuguggaucagcuuugccauaucuugcuuccuucuguguguggcauugcucggcuuuaucaugugggccugccaaaaggggaauauuagguguaacaucugcauuuga

SEQ ID NO: 139340 - RNA, 1701 nt, Artificial Sequence; identical to SEQ ID NO: 130482
  derived and/or modified CDS sequence (opt3) from hemagglutinin__InfluenzaA__AHL90410

SEQ ID NO: 139341 - RNA, 1701 nt, Artificial Sequence
  derived and/or modified CDS sequence (opt3) from hemagglutinin__InfluenzaA__AHL90422
augaagaccaucauugcccugagcuacauacucugccuuguguucgcucagaaacugcccggcaacgacaauuccacagcaacuuuguguuuagggcaccaugccgucccuaacggaacgaucguuaagaccauuacaaaugaucaaaucgaggugacuaacgcgaccgaacugguacagucuucaaguacaggugagauuugcgacagcccacaccagauccuagauggcgaaaauuguacccucauagacgcucugcuuggggauccgcagugcgacggauuucaaaacaaaaagugggaucuguucguggagagauccaaagccuauucuaauuguuaccccuaugacgucccugauuacgcaucguugaggucacucguggccagcaguggcacucuggaauuuaacaaugaguccuucaacuggacagguguuacccagaaugggacgucuagcgcuugcauccggcgcuccaacaauucauuuuucagucgacugaacuggcucacucauagcaaguuuaaguauccagcauuaaaugugaccaugcccaacaacgaggaguucgacaaacuguacauuuggggaguccaccauccuggcacagauaaugaccagaucuuucuuuaugcccaggcuucuggccguauuacuguguccaccaagagaucacaacagacaguaaucccaaacauagggagcaggccccggguucgcaauauuccuaguagaaucucuauuuacuggaccaucgugaaaccaggagauaucuugcugauuaacuccacggguaaucuaauagccccgaggggcuacuucaagauccggagcgggaaaucgucuauuaugcgcuccgacgcgcccaucggaaaguguaacucagaaugcauaacuccuaauggcaguauuccaaacgacaagcccuuucagaaugucaaccgaaucacauauggugcauguccuagauacgugaaacagaauacccucaagcuggccacugggaugaggaacgugccagaaaaacaaacacggggaaucuucggcgcuauugccggcuuuaucgagaaugggugggagggaauggucgaugguugguauggcuuccgucaccagaacagcgaagggauuggacaggcagcugaccuuaaguccacccaagccgcgauagaucagaucaauggcaaacugaaccgcuugauugguaagacgaacgagaaauuccaccagaucgaaaaggaguuuucugaaguugaggggagaauccaggaccucgagaaguacguggaagauaccaaaauugaccuguggagcuauaaugccgaguuacugguagcacucgaaaaccaacauacaauagaucuuacugacucagagaugaguaagcuguucgaaaagaccaagaaacaguugagggagaaugcugaggauaugggcaacggaugcuuuaagaucuaccacaagugugacaauacaugcauuggcuccauccggaacgggacuuaugaucauaauguguaccgagacgaagcccuaaacaaucgcuuccagauuaaaggagucgagcugaaaagcgguuacaaagacuggauccucuggauaucuuuugcuaucucaugcuuccugcuuuguguggcccuguugggcuuuauuaugugggcaugccagaaggggaacaucagauguaauauuugcaucuga

SEQ ID NO: 139342 - RNA, 1701 nt, Artificial Sequence; identical to SEQ ID NO: 130482
  derived and/or modified CDS sequence (opt3) from hemagglutinin__InfluenzaA__AHL90434

SEQ ID NO: 139343 - RNA, 1701 nt, Artificial Sequence; identical to SEQ ID NO: 130482
  derived and/or modified CDS sequence (opt3) from hemagglutinin__InfluenzaA__AHL90446

SEQ ID NO: 139344 - RNA, 1701 nt, Artificial Sequence
  derived and/or modified CDS sequence (opt3) from hemagglutinin__InfluenzaA__AHL90458
augaagaccaucauugcccugagcuacauacucugccuuguguucgcucagaaacugcccggcaacgacaauuccacagcaacuuuguguuuagggcaccaugccgucccuaacggaacgaucguuaagaccauuacaaaugaucaaaucgaggugacuaacgcgaccgaacugguacagucuucaaguacaggugagauuugcgacagcccacaccagauccuagauggcgaaaauugugcucucauagacgcccugcuuggggauccgcagugcgacggauuucaaaacaaaaagugggaucuguucguggagagauccaaagcauauucuaauuguuaccccuaugacgucccugauuacgccucguugaggucacucguggcuagcaguggcacccuggaauuuaacaaugaguccuucaacuggacugguguuacacagaaugggaccucuagcgcaugcauccggcgcuccaacaauucauuuuucagucgacugaacuggcucacgcauuuaaaguuuaaguauccagcccugaaugugacuaugcccaacaacgagcaguucgacaaacuuuacauuuggggaguccaccauccuggcaccgauaaugaccagaucuuuuuguaugcucaagccagcggccguauuacagugucuacuaagagaucccagcagaccguaaucccaaacauagggucaaggccccggguucgcaauauuccuagcagaaucaguauuuacuggacaaucgugaaaccaggagauauccugcuaauuaacucuaccgguaaucucauagcgccgaggggcuacuucaagauccgguccgggaaaagcucgauuaugcgcucugacgcacccaucggaaaguguaacuccgaaugcauaacgccuaauggcucaauuccaaacgacaagcccuuucagaaugucaaccgaaucacuuauggugccuguccuagauacgugaaacaaaauacacugaagcuggcuaccgggaugaggaacgugccagagaaacagacucggggaaucuucggcgccauugcaggcuuuaucgaaaaugggugggagggaauggucgaugguugguauggcuuccgucaccagaacagugaggggcgcggacaagcugccgaccuuaagagcacacaggcggccauugaucagauaaauggcaaauugaacagacucaucgguaagaccaacgaaaaauuccaccagauugagaaggaauuuuccgagguugaagggaggauccaagaccuggagaaguacguggaggauacgaaaaucgacuuauggucuuauaaugcagaacugcucguagcucuugagaaccagcauaccauugaucugacagacagcgaaaugaauaaguuguucgagaaaacuaagaaacagcuacgggaaaacgccgaggauaugggcaauggaugcuuuaagauauaccacaagugugacaacgcuugcaucggcucaauucgaaaugggaccuaugaucaugacguguaccgcgacgaggcccugaacaauagauuccagaucaaaggagucgaacucaagagugguuacaaagauuggauucuguggaucuccuuugcaauaagcugcuuccuucuguguguggccuugcucggcuuuaucaugugggcuugccaaaaggggaacauuagguguaauaucugcauuuga

SEQ ID NO: 139345 - RNA, 1701 nt, Artificial Sequence; identical to SEQ ID NO: 130482
  derived and/or modified CDS sequence (opt3) from hemagglutinin__InfluenzaA__AHL90470

SEQ ID NO: 139346 - RNA, 1701 nt, Artificial Sequence; identical to SEQ ID NO: 130482
  derived and/or modified CDS sequence (opt3) from hemagglutinin__InfluenzaA__AHL90482

SEQ ID NO: 139347 - RNA, 1701 nt, Artificial Sequence; identical to SEQ ID NO: 130585
  derived and/or modified CDS sequence (opt3) from hemagglutinin__InfluenzaA__AHL90494

SEQ ID NO: 139348 - RNA, 1701 nt, Artificial Sequence; identical to SEQ ID NO: 130585
  derived and/or modified CDS sequence (opt3) from hemagglutinin__InfluenzaA__AHL90506

SEQ ID NO: 139349 - RNA, 1701 nt, Artificial Sequence
  derived and/or modified CDS sequence (opt3) from hemagglutinin__InfluenzaA__AHL90518
augaagaccaucauugcccugagcuacauacucugccuuguguucgcucagaaacugcccggcaacgacaauuccacagcaacuuuguguuuagggcaccaugccgucccuaacggaacgaucguuaagaccauuacaaaugaucaaaucgaggugacuaacgcgaccgaacugguacagucuucaaguacaggugagauuugcgacagcccacaccagauccuagauggcgaaaauuguacccucauagacgcucugcuuggggauccgcagugcgacggauuucaaaacaaaaagugggaucuguucguggagagauccaaagccuauucuaauuguuaccccuaugacgucccugauuacgcaucguugaggucacucguggccagcaguggcacucuggaauuuaagaacgaguccuucaauuggacagguguuacccagaacgggacgucuagcgcuugcauccggcgcuccaauaacucauuuuucagucgacugaauuggcucacucauuuaaaguuuaaauauccagcacugaacgugaccaugcccaauaaggagaaauucgacaaacuuuacauuuggggaguccaccauccuggcacagauaacgaccagaucuuuuuguaugcccaggcuagcggccguauuacugugucuaccaagagaucccaacagacaguaaucccaaacauagggucaaggccccggguucgcaauauuccuagcagaaucaguauuuacuggaccaucgugaagccaggagauauccugcuaauuaacucuacggguaaucucauagccccgaggggcuacuucaagauccgguccgggaaaagcucgauuaugcgcucugacgcgcccaucggaaaguguaacuccgaaugcauaacuccuaauggcucaauuccaaacgacaaacccuuucagaaugucaaccgaaucacauauggugcauguccuagauacgugaagcagaauacccugaaacuugccacugggaugaggaacgugccagagaagcaaacacggggaaucuucggcgcuauugccggcuuuaucgaaaaugggugggagggaauggucgaugguugguauggcuuccgucaccagaacagugaggggaccggacaggcagcugaccugaaaagcacgcaagccgcgauugaucagauaaauggcaaguugaaccgccucaucgguaagaccaaugaaaaauuccaccagauugagaaggaauuuuccgagguugaagggagaauccaggaccuggagaaauacguggaggauacaaagaucgacuuauggucuuauaacgccgaacugcucguagcacuugagaaccaacauacuauugaucugaccgacagcgaaaugaauaaauuguucgagaagacaaagaaacagcuaagggaaaacgcugaggauaugggcaauggaugcuuuaagauauaccacaaaugugacaacgccugcaucggcucaauucggaaugggacuuaugaucaugacguguaccgagacgaggcucugaacaaucgcuuccagaucaagggagucgaacucaaaagugguuacaaggauuggauucuguggaucuccuuugccauaagcugcuuccuucuguguguggcauugcucggcuuuaucaugugggccugccagaaggggaacauuagauguaauaucugcauuuga

SEQ ID NO: 139350 - RNA, 1701 nt, Artificial Sequence; identical to SEQ ID NO: 131261
  derived and/or modified CDS sequence (opt3) from hemagglutinin__InfluenzaA__AHL90530

SEQ ID NO: 139351 - RNA, 1701 nt, Artificial Sequence; identical to SEQ ID NO: 130482
  derived and/or modified CDS sequence (opt3) from hemagglutinin__InfluenzaA__AHL90542

SEQ ID NO: 139352 - RNA, 1701 nt, Artificial Sequence; identical to SEQ ID NO: 130482
  derived and/or modified CDS sequence (opt3) from hemagglutinin__InfluenzaA__AHL90554

SEQ ID NO: 139353 - RNA, 1701 nt, Artificial Sequence; identical to SEQ ID NO: 130482
  derived and/or modified CDS sequence (opt3) from hemagglutinin__InfluenzaA__AHL90566

SEQ ID NO: 139354 - RNA, 1701 nt, Artificial Sequence; identical to SEQ ID NO: 130482
  derived and/or modified CDS sequence (opt3) from hemagglutinin__InfluenzaA__AHL90578

SEQ ID NO: 139355 - RNA, 1701 nt, Artificial Sequence; identical to SEQ ID NO: 130585
  derived and/or modified CDS sequence (opt3) from hemagglutinin__InfluenzaA__AHL90590

SEQ ID NO: 139356 - RNA, 1701 nt, Artificial Sequence; identical to SEQ ID NO: 130482
  derived and/or modified CDS sequence (opt3) from hemagglutinin__InfluenzaA__AHL90602

SEQ ID NO: 139357 - RNA, 1701 nt, Artificial Sequence; identical to SEQ ID NO: 130482
  derived and/or modified CDS sequence (opt3) from hemagglutinin__InfluenzaA__AHL90614

SEQ ID NO: 139358 - RNA, 1701 nt, Artificial Sequence
  derived and/or modified CDS sequence (opt3) from hemagglutinin__InfluenzaA__AHL90638
augaagaccaucauugcccugagcuacauacucugccuuguguucgcucagaaacugcccggcaacgacaauuccacagcaacuuuguguuuagggcaccaugccgucccuaacggaacgaucguuaagaccauuacaaaugaucaaaucgaggugacuaacgcgaccgaacugguacagucuucaaguacaggugagauuugcgacagcccacaccagauccuagauggcgaaaauuguacccucauagacgcucugcuuggggauccgcagugcgacggauuucaaaacaaaaagugggaucuguucguggagagauccaaagccuauucuaauuguuaccccuaugacgucccugauuacgcaucguugaggucacucguggccagcaguggcacucuggaauuuaacaaugaguccuucaacuggacagguguuacccagaaugggacgucuagcgcuugcauccggcgcuccaacaauucauuuuucagucgacugaacuggcucacucauuuaaaguuuaaguauccagcacugaaugugaccaugcccaacaacgagcaguucgacaaacuuuacauuuggggaguccaccauccuggcacagauaaugaccagaucuuuuuguaugcccaagcuagcggccguauuacugugucuaccaagagaucccagcagacaguaaucccaaacauagggucaaggccccggguucgcaauauuccuagcagaaucaguauuuacuggaccaucgugaaaccaggagauauccugcuaauuaacucuacggguaaucucauagccccgaggggcuacuucaagauccggucccgcaaaagcucgauuaugcgaucugacgcgcccaucgggaaguguaacuccgaaugcauaacuccuaauggaucaauuccaaacgacaagcccuuucagaaugucaacagaaucacauauggcgcauguccuagguacgugaaacaaaauacccugaagcuggccacugguaugcggaacgugccagagaaacagacacgugggaucuucggagcuauugccggcuuuaucgaaaauggcugggaggggauggucgauggaugguaugguuuccgccaccagaacagugagggcagagggcaagcagcugaccuuaagagcacccaggccgcgauugaucagauaaauggaaaauugaacaggcucaucggcaagacgaacgaaaaauuccaccagauugagaaggaauuuuccgagguugaaggucggauccaagaccuggagaaguacguggaggauaccaaaaucgacuuauggucuuauaaugccgaacugcucguagcacuugagaaccagcauacaauugaucugacugacagcgaaaugaauaaguuguucgagaaaaccaagaaacagcuacgagaaaacgcugaggauauggggaauggcugcuuuaagauauaccacaagugugacaacgccugcaucggaucaauucgcaauggcacauaugaucaugacguguacagagacgaggcucugaacaauagguuccagaucaaaggggucgaacucaagaguggauacaaagauuggauucuguggaucuccuuugccauaagcugcuuccuucuguguguggcauugcucgguuuuaucaugugggccugccaaaagggcaacauucgguguaauaucugcauuuga

SEQ ID NO: 139359 - RNA, 1701 nt, Artificial Sequence
  derived and/or modified CDS sequence (opt3) from hemagglutinin__InfluenzaA__AHL90650
augaagaccaucauugcccugagcuacauacucugccuuguguucgcucagaaacugcccggcaacgacaauuccacagcaacuuuguguuuagggcaccaugccgucccuaacggaacgaucguuaagaccauuacaaaugaucaaaucgaggugacuaacgcgaccgaacugguacagucuucaaguacaggugagauuugcgacagcccacaccagauccuagauggcgaaaauuguacccucauagacgcucugcuuggggauccgcagugcgacggauuucaaaacaaaaagugggaucuguucguggagagauccaaagccuauucuaauuguuaccccuaugacgucccugauuacgcaucguugaggucacucguggccagcaguggcacucuggaauuuaacaaugaguccuucaacuggacagguguuacccagaaugggacgucuagcgcuugcauccggcgcuccaacaauucauuuuucagucgacugaacuggcucacucauuuaaaguuuaaguauccagcacugaaugugaccaugcccaacaacgagcaguucgacaaacuuuacauuuggggaguccaccauccuggcacagauaaugaccagaccuuuuuguaugcccaagcuagcggccguaucacugugucuacaaagagaucccagcagaccguaauuccaaacaucgggucaaggccccggguucgcaauauaccuagcagaauuaguaucuacuggacgauugugaaaccaggagauauccugcuaaucaacucuacugguaaucucauugccccgaggggcuacuucaagauacgguccgggaaaagcucgaucaugcgcucugacgcgcccauuggaaaguguaacuccgaaugcaucacaccuaauggcucaauaccaaacgacaagcccuuucagaaugucaaccgaauuaccuauggugcauguccuagauacgugaaacaaaauacucugaagcuggccacagggaugaggaacgugccagagaaacagacccggggaaucuucggcgcuaucgccggcuuuauugaaaaugggugggagggaauggucgaugguugguauggcuuccgucaccagaacagugaggggcgcggacaagcagcugaccuuaagagcacgcaggccgcgaucgaucagauuaauggcaaauugaacagacucauagguaagaccaacgaaaaauuccaccagaucgagaaggaauuuuccgagguugaagggaggauucaagaccuggagaaguacguggaggauacaaaaaucgacuuauggucuuauaaugccgaacugcucguagcacuugagaaccagcauacuaucgaucugaccgacagcgaaaugaauaaguuguucgagaaaacaaagaaacagcuacgggaaaacgcugaggauaugggcaauggaugcuuuaagauuuaccacaagugugacaacgccugcauaggcucaauccgaaaugggacuuaugaucaugacguguaccgcgacgaggcucugaacaauagauuccagauuaaaggagucgaacucaagagugguuacaaagauuggauccuguggauuuccuuugccaucagcugcuuccuucuguguguggcauugcucggcuuuauaaugugggccugccaaaaggggaacaucagguguaauauuugcaucuga

SEQ ID NO: 139360 - RNA, 1701 nt, Artificial Sequence; identical to SEQ ID NO: 130482
  derived and/or modified CDS sequence (opt3) from hemagglutinin__InfluenzaA__AHL90662

SEQ ID NO: 139361 - RNA, 1701 nt, Artificial Sequence
  derived and/or modified CDS sequence (opt3) from hemagglutinin__InfluenzaA__AHL90674
augaagaccaucauugcccugagcuacauacucugccuuguguucgcucagaaacugcccggcaacgacaauuccacagcaacuuuguguuuagggcaccaugccgucccuaacggaacgaucguuaagaccauuacaaaugaucaaaucgaggugacuaacgcgaccgaacugguacagucuucaaguacaggugagauuugcgacagcccacaccagauccuagauggcgaaaauuguacccucauagacgcucugcuuggggauccgcagugcgacggauuucaaaacaaaaagugggaucuguucguggagagauccaaagccuauucuaauuguuaccccuaugacgucccugauuacgcaucguugaggucacucguggccagcaguggcacucuggaauuuaacaaugaguccuucaacuggacagguguuacccagaaugggacgucuagcgcuugcauccggcgcuccaacaauucauuuuucagucgacugaacuggcucacucauuuaaaguuuaaguauccagcacugaaugugaccaugcccaacaacgagaaauucgacaaacuuuacauuuggggaguccaccauccuggcacagauaaugaccagaucuuuuuguaugcccaggcuagcggccguauuacugugucuaccaagagaucccaacagacaguaaucccaaacauagggucaaggccccggguucgcaauauuccuagcagaaucaguauuuacuggaccaucgugaagccaggagauauccugcuaauuaacucuacggguaaucucauagccccgaggggcuacuucaaaauccgguccggaaagagcucgauuaugcgcucugacgcgcccaucgggaaguguaacuccgaaugcauaacuccuaauggcucaauuccaaacgacaaacccuuucagaaugucaaccgaaucacauauggugcauguccuagauacgugaagcagaauacccugaaacuugccacugggaugaggaacgugccagagaagcaaacacggggaaucuucggcgcuauugccggcuuuaucgaaaaugggugggagggaauggucgaugguugguauggcuuccgucaccagaacagugaggggauuggacaggcagcugaccugaaaagcacccaagccgcgauagaucagaucaauggcaaguugaaccgccucauugguaaaacgaacgaaaaguuccaccagaucgagaaggaauuuuccgagguugaagggagaauccaggaccuggagaaauacguggaggauaccaagauugacuuauggucuuauaaugccgaacugcucguagcacuugagaaccaacauacaauagaucugacugacagcgaaaugaauaaauuguucgagaagaccaaaaagcagcuaagggaaaacgcugaggauaugggcaauggaugcuuuaagaucuaccacaaaugugacaacgugugcauuggcucaauccggaaugggacauaugaucaugacgucuaccgagacgaggcccugaacaaucgcuuccagauuaagggaguggaacucaaaagugguuacaaggauuggauccuguggauauccuuugcuaucagcugcuuccuucuguguguugccuugcucggcuuuauuaugugggcaugccagaaagggaacaucagauguaauauuugcaucuga

SEQ ID NO: 139362 - RNA, 1701 nt, Artificial Sequence
  derived and/or modified CDS sequence (opt3) from hemagglutinin__InfluenzaA__AHL90686
augaagaccaucauugcccugagcuacauacucugccuuguguucgcucagaaacugcccggcaacgacaauuccacagcaacuuuguguuuagggcaccaugccgucccuaacggaacgaucguuaagaccauuacaaaugaucaaaucgaggugacuaacgcgaccgaacugguacagucuucaaguacaggugagauuugcgacagcccacaccagauccuagauggcgaaaauuguacccucauagacgcucugcuuggggauccgcagugcgacggauuucaaaacaaaaagugggaucuguucguggagagauccaaagccuauucuaauuguuaccccuaugacgucccugauuacgcaucguugaggucacucguggccagcaguggcacucuggaauuuaacaaugaguccuucaacuggacagguguuacccagaaugggacgucuagcgcuugcauccggcgcuccaacaauucauuuuucagucgacugaacuggcucacucauuuaaaguuuaaguauccagcacugaaugugaccaugcccaacaacgagcaguucgacaaacuuuacauuuggggaguccaccauccuggcacagauaaugaccagaucuuuuuguaugcccaagcuagcggccguauuacugugucuaccaagagaucccagcagacaguaaucccaaacauagggucaaggccccggguucgcaauauuccuagcagaaucaguauuuacuggaccaucgugaaaccaggagauauccugcuaauuaacucuacggguaaucucauagccccgaggggcuacuucaagauccgguccgggaaaagcucgauuaugcgcucugacgcgcccaucggaaaguguaacuccgaaugcauaacuccuaauggcucaauuccaaacgacaagcccuuucagaaugucaaccgaaucacauauggugcauguccuagauacgugaaacaaaauacccugaagcuggccacugggaugaggaacgugccagagaaacagacacggggaaucuucggcgcuauugccggcuuuaucgaaaaugggugggagggaauggucgaugguugguauggcuuccgucaccagaacagugaggggcgcggacaagcagcugaccuuaagagcacccaggccgcgauugaucagauaaauggcaaauugaacagacucaucgguaagacgaacgaaaaauuccaccagauugagaaggaauuuuccgagguugaagggaggauccaagaccuggagaaguacguggaggauaccaaaaucgacuuauggucuuauaaugccgaacugcucguagcaauggagaaccagcauacaauugaucuuacugacagcgaaaugaauaagcuguucgagaaaaccaagaaacaguugcgggaaaacgcugaggauaugggcaauggaugcuuuaagauauaccacaagugugacaacgccugcaucggcucaauucgaaaugggacauaugaucaugacguguaccgcgacgaggcucuaaacaauagauuccagaucaaaggagucgaacugaagagugguuacaaagauuggauucucuggaucuccuuugccauaagcugcuuccugcuuuguguggcacuguugggcuuuaucaugugggccugccaaaaggggaacauuagguguaauaucugcauuuga

SEQ ID NO: 139363 - RNA, 1701 nt, Artificial Sequence; identical to SEQ ID NO: 130482
  derived and/or modified CDS sequence (opt3) from hemagglutinin__InfluenzaA__AHL90698

SEQ ID NO: 139364 - RNA, 1701 nt, Artificial Sequence; identical to SEQ ID NO: 130482
  derived and/or modified CDS sequence (opt3) from hemagglutinin__InfluenzaA__AHL90710

SEQ ID NO: 139365 - RNA, 1698 nt, Artificial Sequence; identical to SEQ ID NO: 134020
  derived and/or modified CDS sequence (opt3) from hemagglutinin__InfluenzaA__AHL90722

SEQ ID NO: 139366 - RNA, 1698 nt, Artificial Sequence
  derived and/or modified CDS sequence (opt3) from hemagglutinin__InfluenzaA__AHL90746
augaaggugaaacugcucguccuucugugcaccuucacagccacuuacgcugacacgaucuguauuggcuaucacgcaaacaauagcaccgauacaguugacacuguguuggagaagaacguaaccgugacacauuccgucaauuuacuggaaaacucucacaaugggaaacuaugccuccugaagggaauagcgccccuucagcuggguaacuguucaguggccggcuggaucuuggggaauccugagugcgaacuccugauuaguaaagagagcugguccuacaucguugaaaagccaaacccggagaauggaaccuguuaucccggccauuuugcugauuacgaggaacugagagagcaacucucuucggugagcucauucaagagguuugaaauuuucccuaaagagaguuccuggccaaaccacacugucacaggugugucugccagcugcucccauaauggggagucaaguuuuuaucggaacuuacuguggcuuaccggaaagaauggcuuguaccccaaccugagcaaaucuuaugcaaauaacaaggaaaaagagguacuuguucucuggggcgugcaccacccuccaaacaucgucgaccagaagacgcuguaccgcacugaaaaugccuacguguccguggucucaagccauuauagucgaaaguucacccccgagauagcuaaacguccuaagguuagagaucaggaagggaggaucaacuacuauuggacacuucuggagccaggagacacuauuaucuuugaggcaaaugguaacuugauugccccgcgguacgcuuucgcccucucucgcggcuuuggguccggaaucauaaauagcaacgcgcccaugggcaaaugugaugcaaagugccagaccccucaaggugccauuaauucgucucugccauuccagaacgugcaccccguaacaaucggggaauguccuaaauaugugagauccgcuaaguuaaggauggucaccggacugcggaauauuccaucaauccagagucgcggccucuuuggcgccaucgcaggguucauugagggagguuggacgggcaugguggacgggugguacggauaucaucaccagaacgaacaaggcagcgguuacgcugccgaucagaaauccacucagaaugcgauaaacgggaucacaaauaagguuaacucugugauugagaagaugaauacccaguuuacugccgucggcaaagaguucaacaagcuagaacgaagaauggagaaccugaauaaaaagguggacgauggauucaucgacauauggacauacaacgcagaauugcuaguacugcucgagaaugaaaggacccuggauuuucacgacagcaacguuaaaaaucuuuaugagaaggugaagucacaacugaaaaacaaugcuaaggaaauuggcaacgggugcuucgaguuuuaccauaaauguaaugacgagugcauggaaagugucaagaacggaacguaugauuaccccaaauauuccgaggaaagcaaguugaaucgggagaagaucgacggugugaaacucgagucuaugggcgucuaccagauccuggccauuuauucaaccguggcuaguagcuuaguucugcuagugucccucggggccaucucuuucuggaugugcucgaacggaagccugcagugucguauuugcauauga

SEQ ID NO: 139367 - RNA, 1698 nt, Artificial Sequence; identical to SEQ ID NO: 131179
  derived and/or modified CDS sequence (opt3) from hemagglutinin__InfluenzaA__AHL90758

SEQ ID NO: 139368 - RNA, 1698 nt, Artificial Sequence
  derived and/or modified CDS sequence (opt3) from hemagglutinin__InfluenzaA__AHL90770
augaaggugaaacugcucguccuucugugcaccuucacagccacuuacgcugacacgaucuguauuggcuaucacgcaaacaauagcaccgauacaguugacacuguguuggagaagaacguaaccgugacacauuccgucaauuuacuggaaaacucucacaaugggaaacuaugccuccugaagggaauagcgccccuucagcuggguaacuguucaguggccggcuggaucuuggggaauccugagugcgaacuccugauuaguaaagagagcugguccuacaucguugaaaagccaaacccggagaauggaaccuguuaucccggccauuuugcugauuacgaggaacugagagagcaacucucuucggugagcucauucgaaagguuugagauuuucccuaaggacaguuccuggccaaaccacacugucacaggugugucugccagcugcucccauaauggggagucaaguuuuuaucggaacuuacuguggcuuaccggcaaaaauggauuguaccccaaccugagcaagucuuaugcaaauaacaaagaaaaggagguucuaguacucuggggcgugcaccacccuccauccaucaacgaucagaaaacgcuguaccauacugaaaaugccuacgucucaguggugagcagucaccauucucgcaaguucacccccgagauagcuaagcgaccuaaaguccgugaccaggaagggagaaucaacuauuacuggacacuucuggagccaggagauacuauuaucuuugaggcaaaugguaacuugauugccccgagguaugcuuucgcccucucccggggcuuugggagcggaaucauaaauucgaacgcgcccauggacaagugugaugcaaaaugccagaccccucaaggcgccauuaauucuucccugccauuccagaacguucaccccgugacaaucggugaauguccuaaguacguacgcucagcuaaauuaagaauggugaccgggcugaggaauauuccaaguauccagagccggggacucuuuggcgccaucgcaggcuucauugaagggggauggacggguauggucgacggcugguauggguaccaccaucagaacgaacaaggauccggcuaugcugccgaucagaagucuacucagaaugcgauaaacgguaucacaaauaaagugaacagcguuauugagaagaugaauacccaguuuacugccguggggaaggaguucaacaaacuugagcgccgaauggagaaccugaauaagaaagucgacgauggcuucaucgacauauggacauacaacgcagaauugcuagugcugcucgagaaugaaagaacccuggacuuucacgauucaaacguaaagaaucuuuacgagaaaguuaagagucaacugaagaacaaugcuaaagaaauuggaaacggcugcuucgaguuuuaucauaaguguaaugacgagugcauggaauccgugaaaaacgggacguacgauuaucccaaguacagcgaggaaucuaaauugaauagggagaagaucgacggagucaagcucgagucaauggguguguaucagauccugaccauuuacaguacagucgccagcuccuuagugcugcuaguuucucucggcgcuaucucguucuggaugugcagcaacgggucccugcagugucggauuugcauauga

SEQ ID NO: 139369 - RNA, 1698 nt, Artificial Sequence; identical to SEQ ID NO: 131664
  derived and/or modified CDS sequence (opt3) from hemagglutinin__InfluenzaA__AHL90782

SEQ ID NO: 139370 - RNA, 1698 nt, Artificial Sequence
  derived and/or modified CDS sequence (opt3) from hemagglutinin__InfluenzaA__AHL90794
augaaggugaaacugcucguccuucugugcaccuucacagccacuuacgcugacacgaucuguauuggcuaucacgcaaacaauagcaccgauacaguugacacuguguuggagaagaacguaaccgugacacauuccgucaauuuacuggaaaacucucacaaugggaaacuaugccuccugaagggaauagcgccccuucagcuggguaacuguucaguggccggcuggaucuuggggaauccugagugcgaacuccugauuaguaaagagagcugguccuacaucguugaaaagccaaacccggagaauggaaccuguuaucccggccauuuugcugauuacgaggaacugagagagcaacucucuucggugagcucauucgaaagguuugagauuuucccuaaggagaguuccuggccaaaccacacugucacaggugugucugccagcugcucccauaauggggaaucaaguuuuuaucggaacuuacuguggcuuaccggcaaaaauggauuguaccccaaccugagcaagucuuaugcaaauaacaaagagaaggaagugcuaguucucuggggcgugcaccacccuccaaacaucggggaccagaauacgcuguaccauacugagaacgccuacgucuccguggugucaagccacuauagucgcaaauucacccccgaaauagcuaagcgaccuaagguccgugaucaggagggaagaaucaauuacuauuggacacuucuggagccaggugacacuauuaucuuugaagcaaacggcaauuugauugccccgagguacgcuuucgcccucucucggggguuuggauccggcaucauaaacagcaaugcgcccauggauaaaugugacgcaaagugccagaccccucaaggugccauuaacucgucucugccauuccagaauguucaucccgugacaaucggggaguguccuaaauauguacgcuccgcuaaguuaagaauggugaccggacugaggaacauuccaucaauccagagucggggccucuuuggcgccaucgcaggguucauugaaggagguuggacgggcauggucgaugggugguacggauaucaccaccagaaugagcaaggcagcgguuacgcugccgaccagaaauccacucagaacgcgauaaaugggaucacaaacaagguaaauucuguuauugaaaagaugaacacccaguuuacugccgugggcaaggaguucaacaaacuugagcgccgaauggaaaaucugaacaaaaaggucgaugacggauucaucgauauauggacauacaaugcagaguugcuagugcugcucgaaaacgagagaacccuggacuuucaugacagcaauguuaaaaaccuuuaugaaaagguaaaaucacaacugaagaauaacgcuaaggagauuggcaaugggugcuucgaguuuuaccacaaauguaacgaugaaugcauggagagugugaagaauggaacguaugacuaccccaaauauuccgaagagagcaaguugaacagggagaaaaucgauggugucaagcucgaaucuaugggcguguaccagauccuggccauuuauucaaccgucgcuaguagcuuagugcugcuaguuucccucggggccaucucuuucuggaugugcucgaauggaagccugcagugucggauuugcauauga

SEQ ID NO: 139371 - RNA, 1698 nt, Artificial Sequence
  derived and/or modified CDS sequence (opt3) from hemagglutinin__InfluenzaA__AHL90806
augaaggugaaacugcucguccuucugugcaccuucacagccacuuacgcugacacgaucuguauuggcuaucacgcaaacaauagcaccgauacaguugacacuguguuggagaagaacguaaccgugacacauuccgucaauuuacuggaaaacucucacaaugggaaacuaugccuccugaagggaauagcgccccuucagcuggguaacuguucaguggccggcuggaucuuggggaauccugagugcgaacuccugauuaguaaagagagcugguccuacaucguugaaaagccaaacccggagaauggaaccuguuaucccggccauuuugcugauuacgaggaacugagagagcaacucucuucggugagcucauucgaaagguuugagauuuucccuaaggagaguuccuggccaaaccacacugucacaggugugucugccagcugcucccauaauggggaaucaaguuuuuaucggaacuuacuguggcuuaccggcaaaaauggauuguaccccaaccugagcaagucuuaugcaaauaacaaagagaaggaaguucuaguacucuggggcgugcaccacccuccaaacaucgucgaccagaaaacgcuguaccgcacugagaaugccuacguguccguggucucaagccauuauagucgaaaguucacccccgaaauagcuaagcguccuaaaguuagagaucaggaggggaggaucaacuacuauuggacacuucuggagccaggagacacuauuaucuuugaagcaaaugguaacuugauugccccgcgguacgcuuucgcccucucucgcggcuuuggguccggaaucauaaauagcaacgcgcccauggauaagugugacgcaaaaugccagaccccucaaggcgccauuaauucgucucugccauuccagaacgugcaccccguaacaaucggugaguguccuaaguaugugagauccgcuaaauuaaggauggucaccgggcugcggaauauuccaucaauccagagucgcggacucuuuggcgccaucgcaggcuucauugaagggggauggacggguaugguggauggcugguacggguaucaucaccagaacgagcaaggaagcggcuacgcugccgaccagaaguccacucagaaugcgauaaacgguaucacaaauaaaguuaacucugugauugaaaagaugaauacccaguuuacugccgucgggaaggaguucaacaaacuugagcgaagaauggaaaaccugaauaagaaaguggaugacggcuucaucgauauauggacauacaacgcagaguugcuaguacugcucgaaaaugagaggacccuggacuuucacgacagcaacguuaagaaucuuuaugaaaaagugaagucacaacugaagaacaaugcuaaagagauuggaaacggcugcuucgaguuuuaccauaaguguaaugaugaaugcauggagagugucaaaaacgggacguaugacuaccccaaguauuccgaagagagcaaauugaaucgggagaagaucgauggagugaagcucgaaucuaugggugucuaccagauccuggccauuuauucaaccguggcuaguagcuuaguucugcuaaucucccucggcgccauuucuuucuggaugugcucgaacgggagccugcagugucguauaugcaucuga

SEQ ID NO: 139372 - RNA, 1698 nt, Artificial Sequence; identical to SEQ ID NO: 134020
  derived and/or modified CDS sequence (opt3) from hemagglutinin__InfluenzaA__AHL90818

SEQ ID NO: 139373 - RNA, 1698 nt, Artificial Sequence; identical to SEQ ID NO: 134020
  derived and/or modified CDS sequence (opt3) from hemagglutinin__InfluenzaA__AHL90830

SEQ ID NO: 139374 - RNA, 1698 nt, Artificial Sequence; identical to SEQ ID NO: 131179
  derived and/or modified CDS sequence (opt3) from hemagglutinin__InfluenzaA__AHL90842

SEQ ID NO: 139375 - RNA, 1698 nt, Artificial Sequence; identical to SEQ ID NO: 133561
  derived and/or modified CDS sequence (opt3) from hemagglutinin__InfluenzaA__AHL90854

SEQ ID NO: 139376 - RNA, 1698 nt, Artificial Sequence; identical to SEQ ID NO: 131179
  derived and/or modified CDS sequence (opt3) from hemagglutinin__InfluenzaA__AHL90866

SEQ ID NO: 139377 - RNA, 1698 nt, Artificial Sequence; identical to SEQ ID NO: 133561
  derived and/or modified CDS sequence (opt3) from hemagglutinin__InfluenzaA__AHL90878

SEQ ID NO: 139378 - RNA, 1698 nt, Artificial Sequence; identical to SEQ ID NO: 134020
  derived and/or modified CDS sequence (opt3) from hemagglutinin__InfluenzaA__AHL90890

SEQ ID NO: 139379 - RNA, 1698 nt, Artificial Sequence; identical to SEQ ID NO: 133561
  derived and/or modified CDS sequence (opt3) from hemagglutinin__InfluenzaA__AHL90902

SEQ ID NO: 139380 - RNA, 1698 nt, Artificial Sequence; identical to SEQ ID NO: 131179
  derived and/or modified CDS sequence (opt3) from hemagglutinin__InfluenzaA__AHL90914

SEQ ID NO: 139381 - RNA, 1698 nt, Artificial Sequence; identical to SEQ ID NO: 133561
  derived and/or modified CDS sequence (opt3) from hemagglutinin__InfluenzaA__AHL90938

SEQ ID NO: 139382 - RNA, 1698 nt, Artificial Sequence; identical to SEQ ID NO: 133561
  derived and/or modified CDS sequence (opt3) from hemagglutinin__InfluenzaA__AHL90950

SEQ ID NO: 139383 - RNA, 1698 nt, Artificial Sequence; identical to SEQ ID NO: 133561
  derived and/or modified CDS sequence (opt3) from hemagglutinin__InfluenzaA__AHL90962

SEQ ID NO: 139384 - RNA, 1698 nt, Artificial Sequence
  derived and/or modified CDS sequence (opt3) from hemagglutinin__InfluenzaA__AHL90974
augaaggugaaacugcucguccuucugugcaccuucacagccacuuacgcugacacgaucuguauuggcuaucacgcaaacaauagcaccgauacaguugacacuguguuggagaagaacguaaccgugacacauuccgucaauuuacuggaaaacucucacaaugggaaacuaugccuccugaagggaauagcgccccuucagcuggguaacuguucaguggccggcuggaucuuggggaauccugagugcgaacuccugauuaguaaagagagcugguccuacaucguugaaaagccaaacccggagaauggaaccuguuaucccggccauuuugcugauuacgaggaacugagagagcaacucucuucggugagcucauucgaaagguuugagauuuucccuaaggagaguuccuggccaaaccacacugucacaggugugucugccagcugcucccauaauggggaaucaaguuuuuaucggaacuuacuguggcuuaccggaaagaauggcuuguaccccaaccugagcaagucuuaugcaaauaacaaagagaaggaaguucuaguacucuggggcgugcaccacccuccauccaucucagaccagaaaacgcuguaccauacugagaacgccuacgucagcguggugaguucucacuauucccgcaaguucacccccgaagucgcuaagcgaccuaaaguucgugaucaggaggggagaauaaauuacuauuggacacuucuggagccaggagacacuaucauuuuugaagcaaacgguaauuugaucgccccgagguacgcuuucgcccucagccggggcuuugggucgggaauuaucaacucuaaugcgcccauggauaagugugacgcaaaaugccagaccccucaaggcgccauaaacuccucacugccauuccagaaugugcaucccguaacaauuggugaguguccuaaguaugugcgcagugcuaaauuaagaauggucaccgggcugaggaacaucccaagcauucagucccggggacucuuuggcgccaucgcaggcuucaucgaagggggauggacggguaugguggauggcugguacggguaucaccaccagaaugagcaaggaucuggcuacgcugccgaccagaaaagcacucagaacgcgauuaaugguauaacaaacaaaguuaauucagugaucgaaaagaugaacacccaguuuacugccgucgggaaggaguucaauaaacuugagcgccgaauggaaaaccugaacaagaaaguggaugacggcuucauugauaucuggacauacaaugcagaguugcuaguacugcucgaaaacgagagaacccuggacuuucaugacaguaauguuaagaaccuuuaugaaaaagugaagggacaacugaagaauaacgcuaaagagauaggcaaugggugcuucgaguuuuaccacaaguguaacgaugaaugcauggaguccgucaaaaauggaacguaugacuaccccaaguauagcgaagagucuaaauugaacagggagaagauugauggugugaagcucgaaucaaugggcgucuaccagauccuggccaucuauaguaccguggcuagcuccuuaguucugcuagugucucucggggccauuucguucuggaugugcagcaauggaucccugcagugucggaucugcauuuga

SEQ ID NO: 139385 - RNA, 1698 nt, Artificial Sequence
  derived and/or modified CDS sequence (opt3) from hemagglutinin__InfluenzaA__AHL90986
augaaggugaaacugcucguccuucugugcaccuucacagccacuuacgcugacacgaucuguauuggcuaucacgcaaacaauagcaccgauacaguugacacuguguuggagaagaacguaaccgugacacauuccgucaauuuacuggaaaacucucacaaugggaaacuaugccuccugaagggaauagcgccccuucagcuggguaacuguucaguggccggcuggaucuuggggaauccugagugcgaacuccugauuaguaaagagagcugguccuacaucguugaaaagccaaacccggagaauggaaccuguuaucccggccauuuugcugauuacgaggaacugagagagcaacucucuucggugagcucauucgaaagguuugagauuuucccuaaggagaguuccuggccaaaccacacugucacaggugugucugccagcugcucccauaauggggaaucaaguuuuuaucggaacuuacuguggcuuaccguaaagaauggauuguaccccaaccugagcaagucuuaugcaaauaacaaagagaaggaaguucuagugcucuggggcguccaccacccuccaaacaucguggaccagaaaacgcuguaccgcacugagaaugccuacguguccgucguuucaagccauuauagucgaaaguucacccccgaaauagcuaagcguccuaaagugagagaucaggagggcaggaucaacuacuauuggacacuucuggagccaggggacacuauuaucuuugaagcaaauggaaacuugauugccccgcgguacgcuuucgcccucucuaaggguuuuggcuccgggaucauaaauagcaacgcgcccauggauaaaugugacgcaaagugccagaccccucgcggagccauuaauucgucucugccauuccaaaacguacaccccgugacaaucggcgaguguccuaaauaugucagauccgcuaaguuaaggauggugaccggucugcggaauauuccaucaauccagagucgcgggcucuuuggagccaucgcaggcuucauugaaggcggguggacgggaaugguugaugguugguacggcuaucaucaccagaacgagcaggggagcggauacgcugccgaccaaaaauccacucagaaugcgauaaacggcaucacaaauaaggugaacucugucauugaaaagaugaauacccaguuuacugccguggguaaagaguucaacaaacuugagcgaagaauggaaaaccugaauaaaaagguagaugacggguucaucgauauauggacauacaacgcagaguugcuaguucugcucgaaaaugagaggacccuggacuuucacgacagcaacgugaaaaaucuuuaugaaaaggucaagucacagcugaaaaacaaugcuaaggagauuggcaacggaugcuucgaguuuuaccauaaauguaaugaugaaugcauggagagugugaagaacggcacguaugacuaccccaaauauuccgaagagagcaaguugaaucgggagaagaucgauggggucaaacucgaaucuaugggaguguaccaaauccuggccauuuauucaaccguugcuaguagcuuagugcugcuaguaucccucggugccaucucuuucuggaugugcucgaacggcagccugcagugucguauuugcauauga

SEQ ID NO: 139386 - RNA, 1698 nt, Artificial Sequence
  derived and/or modified CDS sequence (opt3) from hemagglutinin__InfluenzaA__AHL91010
augaaggugaaacugcucguccuucugugcaccuucacagccacuuacgcugacacgaucuguauuggcuaucacgcaaacaauagcaccgauacaguugacacuguguuggagaagaacguaaccgugacacauuccgucaauuuacuggaaaacucucacaaugggaaacuaugccuccugaagggaauagcgccccuucagcuggguaacuguucaguggccggcuggaucuuggggaauccugagugcgaacuccugauuaguaaagagagcugguccuacaucguugaaaagccaaacccggagaauggaaccuguuaucccggccauuuugcugauuacgaggaacugagagagcaacucucuucggugagcucauucgaaagguuugagauuuucccuaaggacaguuccuggccaaaccacacugucacaggugugucugccagcugcucccauaauggggagucaaguuuuuaucggaacuuacuguggcuuaccggcaaaaauggauuguaccccaaccugagcaagucuuaugcaaauaacaaagaaaaggagguucuaguacucuggggcgugcaccacccuccauccaucaacgaucagaaaacgcuguaccauacugaaaaugccuacgucucaguggugagcagucacuauucucgcaaguucacccccgagauagcuaagcgaccuaaaguccgugaccaggaagggagaaucaacuacuauuggacacuucuggagccaggagauacuauuaucuuugaggcaaaugguaacuugauugccccgagguacgcuuucgcccucucccggggcuuugggagcggaaucauaaauucgaacgcgcccauggacaagugugaugcaaaaugccagaccccucaaggcgccauuaauucuucccugccauuccagaacguucaucccgugacaaucggugaauguccuaaguauguacgcucagcuaaauuaagaauggugaccgggcugaggaauauuccaaguauccagagccggggacucuuuggcgccaucgcaggcuucauugaagggggauggacggguauggucgacggcugguacggguaucaccaccagaacgaacaaggauccggcuacgcugccgaucagaagucuacucagaaugcgauaaacgguaucacaaauaaagugaacagcguuauugagaagaugaauacccaguuuacugccguggggaaggaguucaacaaacuugagcgccgaauggagaaccugaauaagaaagucgacgauggcuucaucgacauauggacauacaacgcagaauugcuagugcugcucgagaaugaaagaacccuggacuuucaugauucaaacguaaagaaucuuuaugagaaaguuaagagucaacugaagaacaaugcuaaagaaauuggaaacggcugcuucgaguuuuaccacaaguguaaugacgagugcauggaauccgugaaaaacgggacguaugauuaccccaaguauagcgaggaaucuaaauugaauagggagaagaucgacggagucaagcucgagucaauggguguguaccagauccugaccauuuauaguacagucgccagcuccuuagugcugcuaguuucucucggcgcuaucucguucuggaugugcagcaacgggucccugcagugucggauuugcauauga

SEQ ID NO: 139387 - RNA, 1698 nt, Artificial Sequence
  derived and/or modified CDS sequence (opt3) from hemagglutinin__InfluenzaA__AHL91022
augaaggugaaacugcucguccuucugugcaccuucacagccacuuacgcugacacgaucuguauuggcuaucacgcaaacaauagcaccgauacaguugacacuguguuggagaagaacguaaccgugacacauuccgucaauuuacuggaaaacucucacaaugggaaacuaugccuccugaagggaauagcgccccuucagcuggguaacuguucaguggccggcuggaucuuggggaauccugagugcgaacuccugauuaguaaagagagcugguccuacaucguugaaaagccaaacccggagaauggaaccuguuaucccggccauuuugcugauuacgaggaacugagagagcaacucucuucggugagcucauucgaaagguuugagauuuucccuaaggacaguuccuggccaaaccacacugucacaggugugucugccagcugcucccauaauggggagaacucauuuuaucggaauuuacuguggcuuaccggcaaaaacggauuguaccccaaucugaguaagagcuaugcaaacaacaaagaaaaggaggugcuaguucucuggggcgugcaccacccuccaucuaucaaugaucagaaaacgcuguaccauacugaaaacgccuacgucuccguggugucaagccacuauagucgcaaguucacccccgagauagcuaagcgaccuaaaguccgugaccaggaagggagaaucaauuacuauuggacacuucuggagccaggagauacuauuaucuuugaggcaaacgguaauuugauugccccgagguacgcuuucgcccucucucggggcuuuggguccggaaucauaaacagcaaugcgcccauggacaagugugaugcaaaaugccagaccccucaaggcgccauuaacucgucucugccauuccagaauguucaucccgugacaaucggugaauguccuaaguauguacgcuccgcuaaauuaagaauggugaccgggcugaggaacauuccaucaauccagagucggggacucuuuggcgccaucgcaggcuucauugaagggggauggacggguauggucgacggcugguacggguaucaccaccagaaugaacaaggaagcggcuacgcugccgaucagaaguccacucagaacgcgauaaaugguaucacaaacaaaguaaauucuguuauugagaagaugaacacccaguuuacugccguggggaaggaguucaacaaacuugagcgccgaauggagaaucugaacaagaaagucgacgauggcuucaucgacauauggacauacaaugcagaauugcuagugcugcucgagaacgaaagaacccuggacuuucaugauagcaauguaaagaaccuuuaugagaaaguuaagucacaacugaagaauaacgcuaaagaaauuggaaauggcugcuucgaguuuuaccacaaguguaacgacgagugcauggaaagugugaaaaaugggacguaugauuaccccaaguauuccgaggaaagcaaauugaacagggagaagaucgacggagucaagcucgagucuauggguguguaccagauccugaccauuuauucaacagucgccaguagcuuagugcugcuaguuucccucggcgcuaucucuuucuggaugugcucgaaugggagccugcagugucggauuugcauauga

SEQ ID NO: 139388 - RNA, 1701 nt, Artificial Sequence; identical to SEQ ID NO: 130482
  derived and/or modified CDS sequence (opt3) from hemagglutinin__InfluenzaA__AHL91034

SEQ ID NO: 139389 - RNA, 1701 nt, Artificial Sequence; identical to SEQ ID NO: 133548
  derived and/or modified CDS sequence (opt3) from hemagglutinin__InfluenzaA__AHL91046

SEQ ID NO: 139390 - RNA, 1701 nt, Artificial Sequence; identical to SEQ ID NO: 139362
  derived and/or modified CDS sequence (opt3) from hemagglutinin__InfluenzaA__AHL91058

SEQ ID NO: 139391 - RNA, 1701 nt, Artificial Sequence
  derived and/or modified CDS sequence (opt3) from hemagglutinin__InfluenzaA__AHL91070
augaagaccaucauugcccugagcuacauacucugccuuguguucgcucagaaacugcccggcaacgacaauuccauggcaacauuguguuuagggcaccaugccgucccuaacggaacuaucguuaagacgauuaccaaugaucaaaucgaggugacaaacgcgacugaacugguacagucuucaaguaccggugagauuugcgacagcccacaccagauccuagauggcgaaaauuguacacucauagacgcucugcuuggggauccgcagugcgacggauuucaaaacaaaaagugggaucuguucguggagagauccaaagccuauucuaauuguuaccccuaugacgucccugauuacgcaucguugaggucacucguggccagcaguggcacccuggaauuuaacaaugaguccuucaacuggacugguguuacacagaaugggaccucuagcgcuugcaugcggcgcuccaacaauucauuuuucagucgacugaacuggcucacgcauuuaaaguuuaaguauccagcacugaaugugacuaugcccaacaacgagcaguucgacaaacuuuacaucuggggaguccaccauccuggcaccgauaaugaccagaucuuuuuguaugcccaagcuagcggccguauuacagugucuacuaagagaucccagcagaccguaauuccaaacaucgggucaaggccccggguucgcaauauaccuagcagaauuaguaucuacuggacaauugugaaaccaggagauauccugcuaaucaacucuaccgguaaucucauugccccgaggggcuacuucaagauacgguccgggaaaagcucgaucaugcgcucugacgcgcccauuggaaaguguaacuccgaaugcaucacgccuaauggcucaauaccaaacgacaagcccuuucagaaugucaaccgaauuacuuauggugcauguccuagauacgugaaacaaaauacacugaagcuggccaccgggaugaggaacgugccagagaaacagacucggggaaucuucggcgcuaucgccggcuuuauugaaaaugggugggagggaauggucgaugguugguauggcuuccgucaccagaacagugaggggcgcggacaagcagcugaccuuaagagcacacaggccgcgaucgaucagauuaauggcaaauugaacagacucauagguaagaccaacgaaaaauuccaccagaucgagaaggaauuuuccgagguugaagggaggauucaagaccuggagaaguacguggaggauacgaaaaucgacuuauggucuuauaaugccgaacugcucguagcacuugagaaccagcauaccaucgaucugacagacagcgaaaugaauaaguuguucgagaaaacuaagaaacagcuacgggaaaacgcugaggauaugggcaauggaugcuuuaagauuuaccacaagugugacaacgccugcauaggcucaauccgaaaugggaccuaugaucaugacguguaccgcgacgaggcucugaacaauagauuccagauuaaaggagucgaacucaagagugguuacaaagauuggauccuguggauuuccuuugccaucagcugcuuccuucuguguguggcauugcucggcuuuauaaugugggccugccaaaaggggaacaucagguguaauauuugcaucuga

SEQ ID NO: 139392 - RNA, 1701 nt, Artificial Sequence
  derived and/or modified CDS sequence (opt3) from hemagglutinin__InfluenzaA__AHL91082
augaagaccaucauugcccugagcuacauacucugccuuguguucgcucagaaacugcccggcaacgacaauuccacagcaacuuuguguuuagggcaccaugccgucccuaacggaacgaucguuaagaccauuacaaaugaucaaaucgaggugacuaacgcgaccgaacugguacagucuucaaguacaggugagauuugcgacagcccacaccagauccuagauggcgaaaauuguacccucauagacgcucugcuuggggauccgcagugcgacggauuucaaaacaaaaagugggaucuguucguggagagauccaaagccuauucuaauuguuaccccuaugacgucccugauuacgcaucguugaggucacucguggccagcaguggcacucuggaauuuaacaaugaguccuucaacuggacagguguuacccagaaugggacgucuagcgcuugcauccggcgcuccaacaauucauuuuucagucgacugaacuggcucacucauuuaaaguuuaaguauccagcacugaaugugaccaugcccaacaacgagcaguucgacaaacuuuacauuuggggaguccaccauccuggcacagauaaugaccagaucuuuuuguaugcccaagcuagcggccguauuacugugucuaccaagagaucccagcagacaguaaucccaaacauagggucaaggccccggguucgcaauauuccuagcagaaucaguauuuacuggaccaucgugaaaccaggagauauccugcuaauuaacucuacggguaaucucauagccccgaggggcuacuucaagauccgguccgggaaaagcucgauuaugcgcucugacgcgcccaucggaaaguguaacuccgaaugcauaacuccuaauggcucaauuccaaacgacaagcccuuucagaaugucaaccgaaucacauauggugcauguccuaucuacgugaaacaaaauacccugaagcuggccacugggaugagaaacgugccagagaaacagacaaggggaauuuucggcgcuaucgccggcuuuauugaaaaugggugggagggaauggucgaugguugguauggcuuccggcaccagaacagugaggggcguggacaagcagcugaccuuaagagcacccaggccgcgauagaucagaucaauggcaaauugaaccgccucauugguaagacgaacgaaaaauuccaccagaucgagaaggaauuuuccgagguugaagggagaauccaagaccuggagaaguacguggaggauaccaaaauugacuuauggucuuauaaugccgaacugcucguagcacuugagaaccagcauacaauagaucugacugacagcgaaaugaauaaguuguucgagaaaaccaagaaacagcuaagggaaaacgcugaggauaugggcaauggaugcuuuaagaucuaccacaagugugacaacgccugcauuggcucaauccggaaugggacauaugaucaugacguguaccgagacgaggcucugaacaaucgcuuccagauuaaaggagucgaacucaagagugguuacaaagauuggauccuguggauauccuuugccaucagcugcuuccuucuguguguggcauugcucggcuuuauuaugugggccugccaaaaggggaacaucagauguaauauuugcaucuga

SEQ ID NO: 139393 - RNA, 1701 nt, Artificial Sequence; identical to SEQ ID NO: 133467
  derived and/or modified CDS sequence (opt3) from hemagglutinin__InfluenzaA__AHL91094

SEQ ID NO: 139394 - RNA, 1701 nt, Artificial Sequence
  derived and/or modified CDS sequence (opt3) from hemagglutinin__InfluenzaA__AHL91106
augaagaccaucauugcccugagcuacauacucugccuuguguucgcucagaaacugcccggcaacgacaauuccacagcaacuuuguguuuagggcaccaugccgucccuaacggaacgaucguuaagaccauuacaaaugaucaaaucgaggugacuaacgcgaccgaacugguacagucuucaaguaaaggugagauuugcgacagcccacaccagauccuagauggcgaaaauuguacacucauagacgcucugcuuggggauccgcagugcgacggauuucaaaacaagaaaugggaucuguucguggagagauccaaggccuauucuaauuguuaccccuaugacgucccugauuacgcaucguugaggucacucguggccagcaguggcacccuggaauuuaacaaugaguccuucaacuggacugguguuacacagaaugggaccucuagcgcuugcauccggcgcuccaacaauucauuuuucagucgacugaacuggcucacgcauuuaaaguuuaaauauccagcacugaaugugacuaugcccaacaacgagcaguucgacaaacuuuacauuuggggaguccaccauccuggcaccgauaaugaccagaucuuuuuguaugcccaagcuagcggccguauuacagugucuacuaagagaucccagcagaccguaaucccaaacauagggucaaggccccggguucgcaauauuccuagcagaaucaguauuuacuggacaaucgugaagccaggagauauccugcuaauuaacucuaccgguaaucucauagccccgaggggcuacuucaaaauccgguccggaaagagcucgauuaugcgcucugacgcgcccaucgggaaguguaacuccgaaugcauaacgccuaauggcucaauuccaaacgacaaacccuuucagaaugucaaccgaaucacuuauggugcauguccuagauacgugaagcaaaauacacugaaacuugccaccgggaugaggaacgugccagagaagcagacucggggaaucuucggcgcuauugccggcuuuaucgaaaaugggugggagggaauggucgaugguugguauggcuuccgucaccagaacagugaggggcgcggacaagcagcugaccugaaaagcacacaggccgcgauugaucagauaaauggcaaguugaacagacucaucgguaaaaccaacgaaaaguuccaccagauugagaaggaauuuuccgagguugaagggaggauccaagaccuggagaaauacguggaggauacgaagaucgacuuauggucuuauaaugccgaacugcucguagcacuugagaaccagcauaccauugaucugacagacagcgaaaugaauaaauuguucgagaagacuaaaaagcagcuacgggaaaacgcugaggauaugggcaauggaugcuuuaagauauaccacaaaugugacaacgccugcaucggcucaauucgaaaugggaccuaugaucaugacguguaccgcgacgaggcucugaacaauagauuccagaucaagggagucgaacucaaaagugguuacaaggauuggauucuguggaucuccuuugccauaagcugcuuccuucuguguguggcauugcucggcuuuaucaugugggccugccaaaaagggaacauuagguguaauaucugcauuuga

SEQ ID NO: 139395 - RNA, 1701 nt, Artificial Sequence
  derived and/or modified CDS sequence (opt3) from hemagglutinin__InfluenzaA__AHL91118
augaagaccaucauugcccugagcuacauacucugccuuguguucgcucagaaacugcccggcaacgacaauuccacagcaacuuuguguuuagggcaccaugccgucccuaacggaacgaucguuaagaccauuacaaaugaucaaaucgaggugacuaacgcgaccgaacugguacagucuucaaguacaggugagauuugcgacagcccacaccagauccuagauggcgaaaauuguacccucauagacgcucugcuuggggauccgcagugcgacggauuucaaaacaaaaagugggaucuguucguggagagauccaaagccuauucuaauuguuaccccuaugacgucccugauuacgcaucguugaggucacucguggccagcaguggcacucuggaauuuaacaaugaguccuucaacuggacagguguuacccagaaugggacgucuagcgcuugcauccggcgcuccaacaauucauuuuucaguaagcugaacuggcucacucauuuaaaguuuaaauauccagcacugaaugugaccaugcccaacaacgagcaguucgacaaacuuuacauuuggggaguccaccauccuggcacagauaaugaccagaucuuuuuguaugcccaagcuagcggccgaauuacugugucuaccaaacguucccagcagacaguaaucccaaacauagggucaagacccaggguucggaauauuccuagccgcaucaguauuuacuggaccaucgugaagccaggagauauccugcuaauuaacucuacggguaaucucauagccccgagaggcuacuucaaaaucagguccggaaagagcucgauuaugcggucugacgcgcccaucgggaaguguaacuccgaaugcauaacuccuaauggcucaauuccaaacgacaaacccuuucagaaugucaaccgcaucacauauggugcauguccucgauacgugaagcaaaauacccugaaacuugccacugggaugagaaacgugccagagaagcagacaaggggaaucuucggcgcuauugccggcuuuaucgaaaaugggugggagggaauggucgaugguugguauggcuuccggcaccagaacagugaggggcguggacaagcagcugaccugaaaagcacccaggccgcgauugaucagauaaauggcaaguugaaccgccucaucgguaaaacgaacgaaaaguuccaccagauugagaaggaauuuuccgagguugaagggagaauccaagaccuggagaaauacguggaggauaccaagaucgacuuauggucuuauaaugccgaacugcucguaacacuugagaaccagcauacuauugaucugaccgacagcgaaaugaauaaauuguucgagaagacaaagaagcagcuaagggaaaacgcagaggauaugggcaauggaugcuuuaagauauaccacaaaugugacaacgcuugcaucggcucaauucggaaugggacuuaugaucaugacguguaccgagacgaggcccugaacaaucgcuuccagaucaagggagucgaacucaaaagugguuacaaggauuggauucuguggaucuccuuugcuauaagcugcuuccuucuguguguggccuugcucggcuuuaucaugugggcaugccaaaaagggaacauuagauguaauaucugcauuuga

SEQ ID NO: 139396 - RNA, 1701 nt, Artificial Sequence
  derived and/or modified CDS sequence (opt3) from hemagglutinin__InfluenzaA__AHL91130
augaagaccaucauugcccugagcuacauacucugccuuguguucgcucagaaacugcccggcaacgacaauuccacagcaacuuuguguuuagggcaccaugccgucccuaacggaacgaucguuaagaccauuacaaaugaucaaaucgaggugacuaacgcgaccgaacugguacagucuucaaguacaggugagauuugcgacagcccacaccagauccuagauggcgaaaauuguacccucauagacgcucugcuuggggauccgcagugcgacggauuucaaaacaaaaagugggaucuguucguggagagauccaaagccuauucuaauuguuaccccuaugacgucccugauuacgcaucguugaggucacucaucgccagcaguggcacucuggaauuuaacaaugaguccuucaacuggacaggugugacccagaaugggacgucuagcgcuugcauucggcgcuccaacaauucauuuuucagucgacugaacuggcucacucauuuaaaguuuaaguauccagcacugaauguuaccaugcccaacaacgagcaguucgacaaacuuuacaucuggggagugcaccauccuggcacagauaaugaccagaucuuuuuguaugcccaagcuagcggccguauuacugucucuaccaagagaucccagcagacagugauaccaaacauugggucaaggccccggguacgcaauaucccuagcagaauuaguaucuacuggaccaucguuaaaccaggagauauucugcuaauaaacucuacggguaaucucaucgccccgaggggcuacuucaagauucgguccgggaaaagcucgaucaugcgcucugacgcgcccauaggaaaguguaacuccgaaugcauuacuccuaauggcucaaucccaaacgacaagcccuuucagaaugugaaccgaaucacauauggugcauguccuagauacgucaaacaaaauacccugaagcuggccacugggaugaggaacgugccagagaaacagacacggggaauuuucggcgcuaucgccggcuuuauugaaaaugggugggagggaaugguggaugguugguauggcuuccgucaccagaacagugaggggcgcggacaagcagcugaccuuaagagcacccaggccgcgauagaucagaucaauggcaaauugaacagacucauugguaagacgaacgaaaaauuccaccagaucgagaaggaauuuuccgaggucgaagggaggauccaagaccuggagaaguacguugaggauaccaaaauugacuuauggucuuauaaugccgaacugcucguggcacuugagaaccagcauacaauagaucugacugacagcgaaaugaauaaguuguucgagaaaaccaagaaacagcuacgggaaaacgcugaggauaugggcaauggaugcuuuaagaucuaccacaagugugacaacgccugcauuggcucaauccgaaaugggacauaugaucauaacguauaccgcgacgaggcucugaauaacagauuccagauuaaaggaguggaacucaagagugguuacaaagacuggauccuguggauauccuuugccaucagcugcuuccuucugugugucgcauugcucggcuuuauuaugugggccugccaaaaggggaauaucagguguaacauuugcaucuga

SEQ ID NO: 139397 - RNA, 1701 nt, Artificial Sequence; identical to SEQ ID NO: 130482
  derived and/or modified CDS sequence (opt3) from hemagglutinin__InfluenzaA__AHL91142

SEQ ID NO: 139398 - RNA, 1701 nt, Artificial Sequence; identical to SEQ ID NO: 130482
  derived and/or modified CDS sequence (opt3) from hemagglutinin__InfluenzaA__AHL91154

SEQ ID NO: 139399 - RNA, 1701 nt, Artificial Sequence; identical to SEQ ID NO: 128678
  derived and/or modified CDS sequence (opt3) from hemagglutinin__InfluenzaA__AHL91166

SEQ ID NO: 139400 - RNA, 1701 nt, Artificial Sequence; identical to SEQ ID NO: 138515
  derived and/or modified CDS sequence (opt3) from hemagglutinin__InfluenzaA__AHL94984

SEQ ID NO: 139401 - RNA, 1701 nt, Artificial Sequence; identical to SEQ ID NO: 138515
  derived and/or modified CDS sequence (opt3) from hemagglutinin__InfluenzaA__AHL94996

SEQ ID NO: 139402 - RNA, 1701 nt, Artificial Sequence; identical to SEQ ID NO: 137883
  derived and/or modified CDS sequence (opt3) from hemagglutinin__InfluenzaA__AHL95008

SEQ ID NO: 139403 - RNA, 1701 nt, Artificial Sequence; identical to SEQ ID NO: 138045
  derived and/or modified CDS sequence (opt3) from hemagglutinin__InfluenzaA__AHL95020

SEQ ID NO: 139404 - RNA, 1701 nt, Artificial Sequence; identical to SEQ ID NO: 138042
  derived and/or modified CDS sequence (opt3) from hemagglutinin__InfluenzaA__AHL95032

SEQ ID NO: 139405 - RNA, 1701 nt, Artificial Sequence; identical to SEQ ID NO: 137916
  derived and/or modified CDS sequence (opt3) from hemagglutinin__InfluenzaA__AHL95044

SEQ ID NO: 139406 - RNA, 1701 nt, Artificial Sequence; identical to SEQ ID NO: 137906
  derived and/or modified CDS sequence (opt3) from hemagglutinin__InfluenzaA__AHL95056

SEQ ID NO: 139407 - RNA, 1701 nt, Artificial Sequence; identical to SEQ ID NO: 138045
  derived and/or modified CDS sequence (opt3) from hemagglutinin__InfluenzaA__AHL95068

SEQ ID NO: 139408 - RNA, 1701 nt, Artificial Sequence; identical to SEQ ID NO: 138593
  derived and/or modified CDS sequence (opt3) from hemagglutinin__InfluenzaA__AHL95080

SEQ ID NO: 139409 - RNA, 1701 nt, Artificial Sequence; identical to SEQ ID NO: 137916
  derived and/or modified CDS sequence (opt3) from hemagglutinin__InfluenzaA__AHL95092

SEQ ID NO: 139410 - RNA, 1701 nt, Artificial Sequence
  derived and/or modified CDS sequence (opt3) from hemagglutinin__InfluenzaA__AHL95104
augaagaccaucauugcccugagcuacauacucugccuuguguucgcucagaaacugcccggcaacgacaauuccacagcaacuuuguguuuagggcaccaugccgucccuaacggaacgaucguuaagaccauuacaaaugauagaaucgaggugacuaacgcgaccgaacugguacaaaauucuucaauuggugagaucugcgacaguccacaccagauacuagauggcgaaaacuguacacucaucgacgcucugcuuggggauccgcagugcgacggauuucagaauaaaaagugggaucuguucguggagaggagcaaagccuauuccaacuguuaccccuaugacgucccugauuacgcaucuuugcggucgcucguggccucaagcggcacccuggaauuuaauaacgagaguuucaauugggcugguguuacucaaaacgggacauccucugcaugcaugcgcggaagcaauuccucauuuuucagucgacugaacuggcucacccauuuaaauuuuaaguauccagcccugaacgugacgaugcccaacaaugagcaguucgacaaacuuuacauuuggggcguccaccauccuggcacugauaaggaccagaucuuuuuguaugcucagagcucugggcguauuaccguguccacaaagagaucacaacaggccguaaucccaaacauaggaagcaggccccggauucgcaauaucccuaguagaauuucuaucuacuggacuaucguuaaaccaggugauauucugcuaauaaacuccaccggcaaucucaucgcgccgaggggguacuucaagauucggagcggaaaaucgucuaucaugcgcuccgacgcacccauaggcaaguguaagucagaaugcauuacaccuaacgguaguaucccaaaugacaaacccuuucagaacgugaaucgaaucaccuauggggccuguccuagauacgucaagcagagcacgcugaaacuugcuacuggaaugaggaacgugccagagaagcaaacacggggcauuuucggcgccaucgcaggguuuauugaaaauggaugggaggguaugauggauggcugguauggguuccgucaccagaacuccgagggacgcggccaggcugccgaccugaaaucuacccaagcggccauagaucagaucaaugguaaguugaacagacucauugggaaaacuaaugaaaaguuccaccagaucgagaaggaauuuagcgagguggaaggcaggauccaggaccuggagaaauacgucgaggauacaaagauugacuuauggucauauaacgcagaacugcucguugcucuugagaaccaacauaccauagaucugacggacagugaaaugaauaaauuguucgagaagaccaaaaagcagcuacgggaaaacgccgaggauaugggaaauggcugcuuuaagaucuaccacaaaugugacaacgcuugcauuggguccauccgaaauggaacauaugaucaugacguguaccgcgacgaggcccugaacaauagauuccagauuaaggguguagaacucaaaagcggcuacaaggauuggauccuguggauaucuuuugcaaucucaugcuuccuucuguguguggccuugcucggguuuauuaugugggcuugccagaaaggaaacaucagguguaauauuugcaucuga

SEQ ID NO: 139411 - RNA, 1701 nt, Artificial Sequence
  derived and/or modified CDS sequence (opt3) from hemagglutinin__InfluenzaA__AHL95116
augaagaccaucauugcccugagcuacauacucugccuuguguucgcucaggagcugcccggcaacgacgauuccacagcaacuuuguguuuagggcacuaugccgucccuaauggaacgaucguuaaaaccauuacaaacgaccaaaucgaagugacuaaugcgaccgagcugguacagucuucaaguacaggugaaauuugcaacagcccacaucagauccuagauggcgagaauuguacccucauagacgcucugcuuggggauccgcagugcgacggauuucaaaacaagaaaugggaucuguucguggaaagauccaaggcccacucuaauuguuaccccuaugacgucccugauuacgcaucguugaggucacucguggccagcaguggcacucuggaguuuaacaaugaguccuucaacuggacagguguuacccagaaugggacgucuagcgcuugcauccggcgcuccaacaauucauuuuucagucgacugaacuggcucacucauuuaaauuuuaaauauccagcacugaacgugaccaugcccaacaaugaacaguucgacaagcuguacauuuggggaguccaccauccuggcacagauaaggaccagaucuuuuuguaugccaaagcuagcggccguauuacugugucuaccaagagaucccaacaggccguaaucccaaacauagggucaaggccccggguucgcaauauuccuagcagagugaguaucuacuggacaauugucaaaccaggagauauccugcuaaucaacucuaccgguaaucucauugcgccgaggggcuacuucaagauacgguccgggaaaagcucgaucaugcgcucugacgcacccauuggaaaguguaacuccgccugcaucacgccuaauggcucaauaccaaacgacaagcccuuucagaaugugaaccgaauuacuuauggugcuuguccuagauacgugaaacagaauacacugaaacuugccaccgggaugaggaacgucccagagaagcaaacucggggaaucuucggcgcaaucgcuggcuuuauugaaaaugggugggagggaaugguugaugguugguauggcuuccgucaccagaacagugaggggcgcggacaggccgcggaccuuaagagcacacaagccgcaaucgaucagauuaauggcaaauugaacagacucauagguaagaccaacgaaaaauuccaccagaucgagaaggaauuuuccgagguggaagggaggauucaggaccuggagaaguacguagaggauacgaaaaucgacuuauggucuuauaaugcugaacugcucguggcccuugagaaccaacauaccaucgaucugacagacagcgaaaugaauaaguuguucgagaaaacuaagaaacagcuacgggaaaacgcugaggauaugggcaauggaugcuuuaagauuuaccacaagugugacaacgccugcauaggcucaauccgaaaugggaccuaugaucaugacgucuaccgcgacgaggcacugaacaauagauuccagauuaaaggaguggaacucaagagugguuacaaagauuggauccuguggauuuccuuugccaucagcugcuuccuucuguguguugcuuugcucggcuuuauaaugugggcgugccagaaggggaacaucagguguaauauuugcaucuga

SEQ ID NO: 139412 - RNA, 1701 nt, Artificial Sequence; identical to SEQ ID NO: 137883
  derived and/or modified CDS sequence (opt3) from hemagglutinin__InfluenzaA__AHL95128

SEQ ID NO: 139413 - RNA, 1701 nt, Artificial Sequence; identical to SEQ ID NO: 137906
  derived and/or modified CDS sequence (opt3) from hemagglutinin__InfluenzaA__AHL95140

SEQ ID NO: 139414 - RNA, 1701 nt, Artificial Sequence; identical to SEQ ID NO: 137916
  derived and/or modified CDS sequence (opt3) from hemagglutinin__InfluenzaA__AHL95152

SEQ ID NO: 139415 - RNA, 1701 nt, Artificial Sequence; identical to SEQ ID NO: 137883
  derived and/or modified CDS sequence (opt3) from hemagglutinin__InfluenzaA__AHL95164

SEQ ID NO: 139416 - RNA, 1701 nt, Artificial Sequence; identical to SEQ ID NO: 137916
  derived and/or modified CDS sequence (opt3) from hemagglutinin__InfluenzaA__AHL95176

SEQ ID NO: 139417 - RNA, 1701 nt, Artificial Sequence; identical to SEQ ID NO: 137916
  derived and/or modified CDS sequence (opt3) from hemagglutinin__InfluenzaA__AHL95188

SEQ ID NO: 139418 - RNA, 1701 nt, Artificial Sequence; identical to SEQ ID NO: 138042
  derived and/or modified CDS sequence (opt3) from hemagglutinin__InfluenzaA__AHL95200

SEQ ID NO: 139419 - RNA, 1701 nt, Artificial Sequence; identical to SEQ ID NO: 137916
  derived and/or modified CDS sequence (opt3) from hemagglutinin__InfluenzaA__AHL95212

SEQ ID NO: 139420 - RNA, 1701 nt, Artificial Sequence; identical to SEQ ID NO: 137906
  derived and/or modified CDS sequence (opt3) from hemagglutinin__InfluenzaA__AHL95224

SEQ ID NO: 139421 - RNA, 1701 nt, Artificial Sequence; identical to SEQ ID NO: 137906
  derived and/or modified CDS sequence (opt3) from hemagglutinin__InfluenzaA__AHL95236

SEQ ID NO: 139422 - RNA, 1701 nt, Artificial Sequence; identical to SEQ ID NO: 137931
  derived and/or modified CDS sequence (opt3) from hemagglutinin__InfluenzaA__AHL95248

SEQ ID NO: 139423 - RNA, 1701 nt, Artificial Sequence
  derived and/or modified CDS sequence (opt3) from hemagglutinin__InfluenzaA__AHL95260
augaagaccaucauugcccugagcuacauacucugccuuguguucgcucagaaacugcccggcaacgacaauuccacagcaacuuuguguuuagggcaccaugccgucccuaacggaacgaucguuaagaccauuacaaaugauagaaucgaggugacuaacgcgaccgaacugguacaaaauucuucaauuagugagaucugcgacagcccacaccagauacuagauggugaaaacuguacacucaucgacgcucugcuuggcgauccgcagugcgacggguuucagaauaaaaagugggaucuguucguggagagguccaaagccuauucuaacuguuaccccuaugacgucccugauuacgcaucguugcggucacucguggccagcaguggaacccuggaauuuaauaacgaguccuucaauugggcuggcguuacucaaaacgguacaucuagcgcaugcauucgcggguccaauucaaguuucuuuagccgacugaacuggcucacccauuuaaauuuuaaguauccagcccugaacgugacgaugcccaacaaugagcaguucgacaaguuguacaucuggggaguccaccauccuggcacugauaaagaccagauuuuucuuuaugcucagucuuccggccguaucaccgugucaacaaagagaagccaacaggccguaauaccaaacauugggaguaggccccggauccgcaauauuccuucuagaaucuccaucuacuggacuauuguuaaaccaggagauauacugcuaaucaacagcaccgguaaucucauugcgccgaggggcuacuucaagauccggucggggaaaucuuccauaaugcgcucagacgcacccauuggaaaguguaagagugaaugcaucacaccuaacggcagcaucccaaaugacaaacccuuucagaacgugaaucgaauuaccuauggugccuguccuagauacgucaagcaguccacgcugaaacuugcuacugggaugaggaacgugccagagaagcaaacacggggaaucuucggcgccauugcaggcuuuauagaaaaugggugggagggaaugguggaugguugguauggcuuccgucaccagaacucugaggggcgcggacaggcugccgaccugaaaagcacccaagcggccaucgaucagauuaauggcaaguugaacagacucaucgguaaaacuaaugaaaaguuccaccagaucgagaaggaauuuucagaggucgaagggaggauucaggaccuggagaaauacguugaggauacaaagauagacuuauggaguuauaacgcagaacugcucguggcucuugagaaccaacauaccaucgaucugacggacuccgaaaugaauaaauuguucgagaagaccaaaaagcagcuacgggaaaacgccgaggauaugggcaauggaugcuuuaagauuuaccacaaaugugacaacgcuugcaucggcagcauucgaaaugggacauaugaucaugacguauaccgcgacgaggcccugaacaauagauuccagaucaagggaguggaacucaaaucugguuacaaggauuggauacuguggaucucauuugcaauuaguugcuuccuucugugugucgccuugcucggcuuuaucaugugggcuugccagaaagggaacauuagguguaauaucugcauauga

SEQ ID NO: 139424 - RNA, 1701 nt, Artificial Sequence; identical to SEQ ID NO: 137916
  derived and/or modified CDS sequence (opt3) from hemagglutinin__InfluenzaA__AHL95272

SEQ ID NO: 139425 - RNA, 1701 nt, Artificial Sequence; identical to SEQ ID NO: 138042
  derived and/or modified CDS sequence (opt3) from hemagglutinin__InfluenzaA__AHL95284

SEQ ID NO: 139426 - RNA, 1701 nt, Artificial Sequence
  derived and/or modified CDS sequence (opt3) from hemagglutinin__InfluenzaA__AHL95296
augaaggccauccuggugguccuccuuuacaccuucgcuacagcaaacgccgacacucugugcauuggcuaucacgcgaauaacagcacggauaccguugacacaguguuggagaagaauguaacugugacccauuccgucaacuuacuggaagauaagcacaaugggaaacuauguaagcucagaggaguggcuccccugcaucuugguaaaugcaacauagccggcuggauccuggggaauccugagugugaaucuuugucaacagcaaguagcugguccuacauuguugagaccucuucgucagacaacggaacuugcuauccaggcgauuuuaucaauuacgaagaacucagggagcagcugagcaguguguccucuuucgaacgguuugagauguucccgaagacaagcuccuggcccaaccacgacucaaauaagggugucaccgccgcuuguccucaugcaggggccaaaaguuuuuauaagaaccugauuuggcucgugaaaaagggaaauagcuacccaaaauuaucuaaguccuauaucaacgauaagggcaaagaaguacugguucuuuggggcauacaccaccccucaacgacugcugaccaacagagcuuguaccagaaugccgaugcguacguguucgucgggaccaguaaguauucuaaaaaguuuaaaccugagaucgcaauucgcccaaaggugcgagaccaggagggacguaugaacuacuauuggacacugaucgaacccggugauaaaauuacuuucgaggccaccggcaaccuaguggucccuagauacgcuuuugccauggaaaggaaugcaggguccggaaucauaauuagcgacacaccaguucaugauugcaacaccacgugucaaacuccggagggcgcuaucaauacaucgcuccccuuccagaacauucacccuaucaccaucgguaagugcccaaaguaugugaaaucuacuaagcugcggcuugccacagggcugcgcaauguacccuccauucagucaagaggauuguuuggcgcgauagccggcuucaucgaagggggauggaccgguaugguggacggcugguacggguaucaucaccagaacgagcaaggaaguggcuacgcagcugaccucaaaagcacgcagaaugccauugauaagaucaccaacaaagucaauuccgugauagagaagaugaacacacaguuuacugcuguugguaaggaguucaaucaccuggagaaaaggauugaaaacuuaaauaagaaaguggacgauggguuccuggacaucuggaccuacaacgccgagcuccuuguccuguuggaaaaugagcggacacuagauuaucaugacucuaacgugaagaaccuguacgagaaaguacgcaaucagcucaaggauaacgcaaaggaaaucggcaauggauguuuugaguucuaucacaaaugcgacaacacuuguauggaaagcguuaagaauggcaccuacgauuauccuaaauacucagaggaagccaagcugaaccgagagaaaauugacggggugaaacuugagaguacaagaaucuaucaaauucuggcuauauacuccaccgucgcgagcucuuuggugcucgucgugucacugggagcaaucaguuuuuggaugugcagcaaugguuccuuacagugcaggauuuguaucuga

SEQ ID NO: 139427 - RNA, 1701 nt, Artificial Sequence; identical to SEQ ID NO: 137883
  derived and/or modified CDS sequence (opt3) from hemagglutinin__InfluenzaA__AHL95307

SEQ ID NO: 139428 - RNA, 1701 nt, Artificial Sequence; identical to SEQ ID NO: 137906
  derived and/or modified CDS sequence (opt3) from hemagglutinin__InfluenzaA__AHL95319

SEQ ID NO: 139429 - RNA, 1701 nt, Artificial Sequence
  derived and/or modified CDS sequence (opt3) from hemagglutinin__InfluenzaA__AHL95331
augaagaccaucauugcccugagcuacauacucugccuuguguucgcucagaaacugcccggcgacgauaacuccacagcaacuuuguguuuagggcaccaugccgucccuaauggaacgaucguuaagaccauuacaaacgacagaaucgaggugacuaaugcgaccgaacugguacaaaacucuucaauuggugagaucugcgauaguccacaccagauacuagacggcgaaaauuguacacucaucgaugcucugcuuggggacccgcagugcgauggauuucagaacaaaaagugggaccuguucguggagaggagcaaagccuauuccaauuguuaccccuaugaugucccugacuacgcaucuuugcggucgcucguggccucaagcggcacccuggaauuuaacaaugagaguuucaacugggcugguguuacucaaaaugggacauccucugcaugcauucgcggaagcaacuccucauuuuucagucgacugaauuggcucacccauuuaaacuuuaaguauccagcccugaaugugacgaugcccaacaacgagcaguucgauaaguuguacaucuggggcguccaccauccuggcacugacaaagaucagauuuuucuuuaugcucagagcucugggcguaucaccguguccacaaagagaucacaacaggccguaauaccaaauauuggaagcaggccccggauccgcaacauuccuaguagaaucucuaucuacuggacuauuguuaaaccaggugacauacugcuaaucaauuccaccggcaaccucauugcgccgaggggguacuucaagauccggagcggaaaaucgucuauaaugcgcuccgacgcacccauuggcaaguguaagucagaaugcaucacaccuaaugguaguaucccaaacgauaaacccuuucagaaugugaaccgaauuaccuauggggccuguccuagauacgucaagcagagcacgcugaaacuugcuacuggaaugaggaaugugccagagaagcaaacacggggcaucuucggcgccauugcaggguuuauagaaaacggaugggaggguaugguggacggcugguauggguuccgucaccaaaauuccgagggacgcggccaggcugccgaucugaaaucuacccaggcggccaucgaccagauuaacgguaaguugaauagacucaucgggaaaacuaacgaaaaguuccaccagaucgagaaggaauuuagcgaggucgaaggcaggauucaggaucuggagaaauacguugaggacacaaagauagauuuauggucauauaaugcagaacugcucguggcucuugagaaccaacauaccaucgaccugacggauagugaaaugaacaaauuguucgagaagaccaaaaagcagcuacgggaaaaugccgaggacaugggaaacggcugcuuuaagauuuaccacaaaugugauaaugcuugcaucggguccauucgaaacggaacauaugaccaugacguauaccgcgaugaggcccugaauaacagauuccagaucaaggguguggaacucaaaagcggcuacaaggacuggauacuguggaucucuuuugcaauuucaugcuuccuucugugugucgccuugcucggguuuaucaugugggcuugccagaaaggaaauauuagguguaacaucugcauauga

SEQ ID NO: 139430 - RNA, 1701 nt, Artificial Sequence
  derived and/or modified CDS sequence (opt3) from hemagglutinin__InfluenzaA__AHL95343
augaagaccaucauugcccugagcuacauacucugccuuguguucgcucagaaacugcccggcaacgacaauuccacagcaacuuuguguuuagggcaccaugccgucccuaacggaacgaucguuaagaccauuacaaaugauagaaucgaggugacuaacgcgaccgaacugguacaaaauucuucaauuggugagaucugcgacaguccacaccagauacuagauggcgaaaacuguacacucaucgacgcucugcuuggggauccgcagugcgacggauuucagaauaaaaagugggaucuguucguggagaggagcaaagccuauuccaacuguuaccccuaugacgucccugauuacgcaucuuugcggucgcucguggccucaagcggcacccuggaauuuaauaacgagaguuucaauugggcugguguuacucaaaacgggacauccucugcaugcauucgcggaagcaauuccucauuuuucagucgacugaacuggcucacccauuuaaauuuuaaguauccagcccugaacgugacgaugcccaacaaugagcaguucgacaaguuguacaucuggggcguccaccauccuggcacugauaaagaccagauuuuucuuuaugcucagagcucugggcguaucaccguguccacaaagagaucacaacaggccguaauaccaaacauuggaagcaggccccggauccgcaauauuccuaguagaaucucuaucuacuggacuauuguuaaaccaggugauauacugcuaaucaacuccaccggcaaucucauugcgccgaggggguacuucaagauccggagcggaaaaucgucuauaaugcgcuccgacgcacccauuggcaaguguaagucagaaugcaucacaccuaacgguaguaucccaaaugacaaacccuuucagaacgugaaucgaauuaccuauggggccuguccuagauacgucaagcagagcacgcugaaacuugcuacuggaaugaggaacgugccagagaagcaaacacggggcaucuucggcgccauugcaggguuuauagaaaauggaugggaggguaugguggauggcugguauggguuccgucaccagaacuccgagggacgcggccaggcugccgaccugaaaucuacccaagcggccaucgaucagauuaaugguaaguugaacagacucaucgggaaaacuaaugaaaaguuccaccagaucgagaaggaauuuagcgaggucgaaggcaggauucaggaccuggagaaauacguugaggauacaaagauagacuuauggucauauaacgcagaacugcucguggcucuugagaaccaacauaccaucgaucugacggacagugaaaugaauaaauuguucgagaagaccaaaaagcagcuacgggaaaacgccgaggauaugggaaauggcugcuuuaagauuuaccacaaaugugacaacgcuugcaucggguccauucgaaauggaacauaugaucaugacguauaccgcgacgaggcccugaacaauagauuccagaucagggguguggaacucaagagcggcuacaaagauuggauacuguggaucucuuuugcaauuucaugcuuccuucugugugucgccuugcucggguuuaucaugugggcuugccagaagggaaacauucgguguaauaucugcauauga

SEQ ID NO: 139431 - RNA, 1701 nt, Artificial Sequence; identical to SEQ ID NO: 137906
  derived and/or modified CDS sequence (opt3) from hemagglutinin__InfluenzaA__AHL95432

SEQ ID NO: 139432 - RNA, 1701 nt, Artificial Sequence; identical to SEQ ID NO: 138042
  derived and/or modified CDS sequence (opt3) from hemagglutinin__InfluenzaA__AHL95444

SEQ ID NO: 139433 - RNA, 1701 nt, Artificial Sequence; identical to SEQ ID NO: 137906
  derived and/or modified CDS sequence (opt3) from hemagglutinin__InfluenzaA__AHL95457

SEQ ID NO: 139434 - RNA, 1701 nt, Artificial Sequence
  derived and/or modified CDS sequence (opt3) from hemagglutinin__InfluenzaA__AHL95470
augaagaccaucauugcccugagcuacauacucugccuuguguucgcucagaaacugcccggcaacgacaauuccacagcaacuuuguguuuagggcaccaugccgucccuaacggaacgaucguuaagaccauuacaaaugaucaaaucgaggugacuaacgcgaccgaacugguacagucuucaaguacaggugagauuugcaauagcccacaccagauccuagacggcgaaaacuguacccucauagaugcucugcuuggggacccgcagugcgauggauuucaaaauaaaaagugggaccuguucguggagagauccaaagccuauucuaacuguuaccccuaugaugucccugacuacgcaucguugaggucacucguggccagcaguggcacucuggaauuuaauaacgaguccuucaauuggacagguguuaagcagaacgggaccucuagcgcuugcauccggcgcuccaauucaaguuucuuuagccgacugaacuggcucacgcauuuaaauuuuaaguauccagcacugaacgugacuaugcccaacaaugagcaguucgauaaacuuuacauuuggggaguccaccauccuggcaccgacaaggaucagaucuuuuuguaugcccaaucuuccggccguauuacagugucaacuaaaagaagccagcaggcuguaaucccaaacauagggaguaggccccggauucgcaauaucccuucuagaauuuccaucuacuggaccaucguuaggccaggagacauucugcuaauaaacagcacagguaaucucaucgccccgcggggcuacuucaagauucgcucggggaaaucuuccaucaugcgaucagaugcgcccauaggaaaguguaacagugaaugcauuaccccuaauggcagcaucccaaacgacaagcccuuucagaaugugaacagaaucacguauggugcauguccuagguacgucaaacaauccacucugaagcuggccacagggaugcggaaugugccagagaaacagacccguggaauuuucggcgcuaucgccggcuuuauugaaaacgggugggagggaaugguggacgguugguauggcuuccgccaccaaaauucugaggggagaggacaggcagcugaucuuaagagcacucaggccgcgauagaccagaucaacggcaaauugaauaggcucauugguaagacaaacgaaaaauuccaccagaucgagaaggaauuuucagaggucgaagggcggauccaagaucuggagaaguacguugaggacaccaaaauugauuuauggaguuauaacgccgaacugcucguggcacuugagaaucagcauacgauagaccugaccgauuccgaaaugaacaaguuguucgagaaaacaaagaaacagcuacgagaaaaugcugaggacaugggcaacggaugcuuuaagaucuaccacaagugugauaaugccugcauuggcagcauccgcaacgggacuuauaaucaugacguauacagagaugaggcucugaacaauagguuccagauuaaaggaguggaacucaagucugguuacaaagacuggauccuguggauaucauuugccaucaguugcuuccuucugugugucgcauugcucggcuuuauuaugugggccugccaaaaggggaacauccgguguaauauuugcaucuga

SEQ ID NO: 139435 - RNA, 1701 nt, Artificial Sequence; identical to SEQ ID NO: 138042
  derived and/or modified CDS sequence (opt3) from hemagglutinin__InfluenzaA__AHL95482

SEQ ID NO: 139436 - RNA, 1701 nt, Artificial Sequence; identical to SEQ ID NO: 138042
  derived and/or modified CDS sequence (opt3) from hemagglutinin__InfluenzaA__AHL95494

SEQ ID NO: 139437 - RNA, 1701 nt, Artificial Sequence
  derived and/or modified CDS sequence (opt3) from hemagglutinin__InfluenzaA__AHL95506
augaagaccaucauugcccugagcuacauacucugccuuguguucgcucagaaacugcccggcaacgacaauuccacagcaacuuuguguuuagggcaccaugccgucccuaacggaacgaucguuagaaccauuacaaaugauaggaucgaggugacuaacgcgaccgaacugguacaaaauucuucaauuggugagaucugcgacaguccacaccagauacuagauggcgaaaacuguacacucaucgacgcucugcuuggggauccgcagugcgacggauuucagaauaagaaaugggaucuguucguggagcggagcaaggccuauuccaacuguuaccccuaugacgucccugauuacgcaucuuugcgcucgcucguggccucaagcggcacccuggaauuuaauaacgagaguuucaauugggcugguguuacucaaaacgggacauccucugcaugcauucgaggaagcaauuccucauuuuucagucgucugaacuggcucacccauuuaaauuuuaaauauccagcccugaacgugacgaugcccaacaaugagcaguucgacaaguuguacaucuggggcguccaccauccuggcacugauaaggaccagauuuuucuuuaugcucagagcucugggagaaucaccguguccacaaaaaggucacaacaggccguaauaccaaacauuggaagccggccccgcaucagaaauauuccuaguaggaucucuaucuacuggacuauuguuaagccaggugauauacugcuaaucaacuccaccggcaaucucauugcgccgcggggguacuucaaaauccgcagcggaaagucgucuauaaugcgauccgacgcacccauuggcaaauguaagucagaaugcaucacaccuaacgguaguaucccaaaugacaagcccuuucagaacgugaauagaauuaccuauggggccuguccuagguacgucaaacagagcacgcugaaacuugcuacuggaaugcggaacgugccagagaagcaaacacguggcaucuucggcgccauugcaggguuuauagaaaauggaugggaggguaugguggauggcugguauggguuccgccaccagaacuccgagggaagaggccaggcugccgaccugaagucuacccaagcggccaucgaucagauuaaugguaaauugaacaggcucaucgggaagacuaaugaaaaauuccaccagaucgagaaggaauuuagcgaggucgaaggccggauucaggaccuggagaaguacguugaggauacaaaaauagacuuauggucauauaacgcagaacugcucguggcucuugagaaccaacauaccaucgaucugacggacagugaaaugaauaaguuguucgagaaaaccaagaaacagcuacgagaaaacgccgaggauaugggaaauggcugcuuuaagauuuaccacaagugugacaacgcuugcaucggguccauucgcaauggaacauaugaucaugacguauacagagacgaggcccugaacaauagguuccagaucaaagguguggaacucaagagcggcuacaaagauuggauacuguggaucucuuuugcaauuucaugcuuccuucugugugucgccuugcucggguuuaucaugugggcuugccagaagggaaacauucgguguaauaucugcauauga

SEQ ID NO: 139438 - RNA, 1701 nt, Artificial Sequence
  derived and/or modified CDS sequence (opt3) from hemagglutinin__InfluenzaA__AHL95518
augaagaccaucauugcccugagcuacauacucugccuuguguucgcucagaaacugcccggcaacgacaauuccacagcaacuuuguguuuagggcaccaugccgucccuaacggaacgaucguuaagaccauuacaaaugauagaaucgaggugacuaacgcgaccgaacugguacaaaauucuucaauuggugagaucugcgacaguccacaccagauacuagauggcgaaaacuguacacucaucgacgcucugcuuggggauccgcagugcgacggauuucagaauaaaaagugggaucuguucguggagaggagcaaagccuauuccaacuguuaccccuaugacgucccugauuacgcaucuuugcggucgcucguggccucaagcggcacccuggaauuuaauaacgagaguuucaauugggcugguguuacucaaaacgggacauccucugcaugcauucgcggaagcaauuccucauuuuucagucgacugaacuggcucacccauuuaaauuuuaaguauccagcccugaacgugacgaugcccaacaaugagcaguucgacaaguuguacaucuggggcguccaccauccuggcacugauaaagaccagauuuuucuuuaugcucagagcucugggcguaucaccguguccacaaagagaucacaacaggccguaauaccaaacauuggaagcaggccccggauccgcaauguuccuaguagaauuucuaucuacuggacuaucgugaaaccaggugauauucugcuaauaaacuccaccggcaaucucaucgcgccgaggggguacuucaagauucggagcggaaaaucgucuaucaugcgcuccgacgcacccauaggcaaguguaagucagaaugcauuacaccuaacgguaguaucccaaaugacaaacccuuucagaacgucaaucgaaucaccuauggggccuguccuagauacgugaagcagagcacgcugaaacuugcuacuggaaugaggaacgugccagagaagcaaacacggggcauuuucggcgccaucgcaggguuuauugaaaauggaugggaggguaugauggauggcugguauggguuccgucaccagaacuccgagggacgcggccaggcugccgaccugaaaucuacccaagcggccauagaucagaucaaugguaaguugaacagacucauugggaaaacuaaugaaaaguuccaccagaucgagaaggaauuuagcgaggucgaaggcaggauccaggaccuggagaaauacguugaggauacaaagauugacuuauggucauauaacgcagaacugcucguggcucuugagaaccaacauaccauagaucugacggacagugaaaugaauaaauuguucgagaagaccaaaaagcagcuacgggaaaacgccgaggauaugggaaauggcugcuuuaagaucuaccacaaaugugacaacgcuugcauuggguccauccgaaauggaacauaugaucaugacguauaccgcgacgaggcccugaacaauagauuccagauuaaggguguggaacucaaaagcggcuacaaggauuggauccuguggauaucuuuugcaaucucaugcuuccuucugugugucgccuugcucggguuuauuaugugggcuugccagaaaggaaacaucagguguaauauuugcaucuga

SEQ ID NO: 139439 - RNA, 1701 nt, Artificial Sequence; identical to SEQ ID NO: 137916
  derived and/or modified CDS sequence (opt3) from hemagglutinin__InfluenzaA__AHL95530

SEQ ID NO: 139440 - RNA, 1701 nt, Artificial Sequence; identical to SEQ ID NO: 137916
  derived and/or modified CDS sequence (opt3) from hemagglutinin__InfluenzaA__AHL95542

SEQ ID NO: 139441 - RNA, 1701 nt, Artificial Sequence
  derived and/or modified CDS sequence (opt3) from hemagglutinin__InfluenzaA__AHL95554
augaagaccaucauugcccugagcuacauacucugccuuguguucgcucagaaacugcccggcaacgacaauuccauggcaacauuguguuuagggcaccaugccgucccuaacggaacuaucguuaagacgauuaccaaugauagaaucgaggugacaaacgcgacugaacugguacaaaauucuucaauuggugagaucugcgacaguccacaccagauacuagauggcgaaaacuguacccucaucgacgcucugcuuggggauccgcagugcgacggauuucagaauaaaaagugggaucuguucguggagaggagcaaagccuauuccaacuguuaccccuaugacgucccugauuacgcaucuuugcggucgcucguggccucaagcggcacacuggaauuuaauaacgagaguuucaauuggaccgguguuacucaaaacgggacauccucugcuugcauucgccgaagcaauuccucauuuuucagucgucugaacuggcucacccauuuaaauuuuaaguauccagcacugaacgugacgaugcccaacaaugagcaguucgacaaguuguacaucuggggaguccaccauccuggcacugauaaagaccagauuuuucuuuaugcccagagcucuggcagaaucaccguguccacaaagaggucacaacaggcuguaauaccaaacauugggagccggccccgcaucagaaauauuccuaguaggaucucuaucuacuggacuauuguuaaaccaggagauauacugcuaaucaacuccaccgguaaucucauugccccgcggggcuacuucaagauccgcagcgggaaaucgucuauaaugcgauccgacgcgcccauuggaaaguguaagucagaaugcaucacaccuaacggcaguaucccaaaugacaaacccuuucagaacgugaauagaauuaccuauggugcauguccuagguacgucaagcagagcacgcugaaacuugccacugggaugcggaacgugccagagaagcaaacacguggaaucuucggcgcuauugccggcuuuauagaaaaugggugggagggaaugguggaugguugguauggcuuccgccaccagaacuccgaggggagaggacaggcagcugaccugaaaucuacccaagccgcgaucgaucagauuaauggcaaguugaacaggcucaucgguaaaacuaaugaaaaguuccaccagaucgagaaggaauuuagcgaggucgaagggcggauucaggaccuggagaaauacguugaggauacaaagauagacuuauggucauauaacgccgaacugcucguggcacuugagaaccaacauaccaucgaucugacggacagugaaaugaauaaauuguucgagaagaccaaaaagcagcuacgagaaaacgcugaggauaugggcaauggaugcuuuaagauuuaccacaaaugugacaacgccugcaucggcuccauucgcaaugggacauaugaucauaacguauacagagacgaggcucugaauaacagguuccagaucaagggaguggaacucaaaagcgguuacaaggacuggauacuguggaucucuuuugccauuucaugcuuccuucugugugucgcauugcucggcuuuaucaugugggccugccagaaagggaauauucgguguaacaucugcauauga

SEQ ID NO: 139442 - RNA, 1701 nt, Artificial Sequence
  derived and/or modified CDS sequence (opt3) from hemagglutinin__InfluenzaA__AHL95566
augaagaccaucauugcccugagcuacauacucugccuuguguucgcucagaaacugcccggcaacgacaauuccacagcaacuuuguguuuagggcaccaugccgucccuaacggaacgaucguuaagaccauuacaaaugauagaaucgaggugacuaacgcgaccgaacugguacaaaauucuucaauuggugagaucugcgacaguccacaccagauacuagauggcgaaaacuguacacucaucgacgcucugcuuggggauccgcagugcgacggauuucagaauaaaaagugggaucuguucguggagaggagcaaagccuauuccaacuguuaccccuaugacgucccugauuacgcaucuuugcggucgcucguggccucaagcggcacccuggaauuuaauaacgagaguuucaauugggcugguguuacucaaaacgggacauccucugcaugcauucgcggaagcaauuccucauuuuucagucgacugaacuggcucacccauuuaaauuuuaaguauccagcccugaacgugacgaugcccaacaaugagcaguucgacaaguuguacaucuggggcguccaccauccuggcacugauaaagaccagauuuuucuuuaugcucguagcucugggagaaucaccguguccacaaagaggucacagcaagccguaauaccaaacauuggaagccggccccgcaucagaaauauuccuaguaggaucucuaucuacuggacuauuguuaaaccaggugauauacugcuaaucaacuccaccggcaaucucauugcgccgcggggguacuucaagauccgcagcggaaaaucgucuauaaugcgauccgacgcacccauuggcaaguguaagucagaaugcaucacaccuaacgguaguaucccaaaugacaaacccuuucagaacgugaauagaauuaccuauggggccuguccuagguacgucaagcagagcacgcugaaacuugcuacuggaaugcggaacgugccagagaagcagacacguggcaucuucggcgccauugcaggguuuauagaaaauggaugggaggguaugguggauggcugguauggguuccgccaccaaaacuccgagggaagaggccaggcugccgaccugaaaucuacccaggcggccaucgaucaaauuaaugguaaguugaacaggcucaucgggaaaacuaaugaaaaguuccaccagaucgagaaggaauuuagcgaggucgaaggccggauucaggaccuggagaaauacguugaggauacaaagauagacuuauggucauauaacgcagaacugcucguggcucuugagaaccagcauaccaucgaucugacggacagugaaaugaauaaauuguucgagaagaccaaaaagcaacuacgagaaaacgccgaggauaugggaaauggcugcuuuaagauuuaccacaaaugugacaacgcuugcaucggguccauucgcaauggaacauaugaucaugacguauacagagacgaggcccugaacaauagguuccagaucaaggguguggaacucaaaagcggcuacaaggauuggauacuguggaucucuuuugcaauuucaugcuuccuucugugugucgccuugcucggguuuaucaugugggcuugccagaaaggaaacauucgguguaauaucugcauauga

SEQ ID NO: 139443 - RNA, 1701 nt, Artificial Sequence
  derived and/or modified CDS sequence (opt3) from hemagglutinin__InfluenzaA__AHL95578
augaagaccaucauugcccugagcuacauacucugccuuguguucgcucagaaacugcccggcaacgacgauuccacagcaacuuuguguuuagggcaccaugccgucccuaauggaacgaucguuaagaccauuacaaacgacagaaucgaggugacuaaugcgaccgaacugguacaaaacucuucaauuggugagaucugcgauaguccacaccagauacuagacggcgaaaauuguacacucaucgaugcucugcuuggggacccgcagugcgauggauuucagaacaaaaagugggaccuguucguggagaggagcaaagccuauuccaauuguuaccccuaugaugucccugacuacgcaucuuugcggucgcucguggccucaagcggcacccuggaauuuaacaaugagaguuucaacugggcugguguuacucaaaaugggacauccucugcaugcauucgcggaagcaacuccucauuuuucagucgacugaauuggcucacccauuuaaacuuuaaguauccagcccugaaugugacgaugcccaacaacgagcaguucgauaaguuguacaucuggggcguccaccauccuggcacugacaaagaucagauuuuucuuuaugcucagagcucugggcguaucaccguguccacaaagagaucacaacaggccguaauaccaaauauuggaagcaggccccggauccgcaacauuccuaguagaaucucuaucuacuggacuauuguuaaaccaggugacauacugcuaaucaauuccaccggcaaccucauugcgccgaggggguacuucaagauccggagcggaaaaucgucuauaaugcgcuccgacgcacccauuggcaaguguaagucagaaugcaucacaccuaaugguaguaucccaaacgauaaacccuuucagaaugugaaccgaauuaccuauggggccuguccuagauacgucaagcagagcacgcugaaacuugcuacuggaaugaggaaugugccagagaagcaaacacggggcaucuucggcgccauugcaggguuuauagaaaacggaugggaggguaugauggacggcugguauggguuccgucaccaaaauuccgagggacgcggccaggcugccgaucugaaaucuacccaggcggccaucgaccagauuaacgguaaguugaauagacucaucgggaaaacuaacgaaaaguuccaccagaucgagaaggaauuuagcgagguggaaggcaggauucaggaucuggagaaauacgucgaggacacaaagauagauuuauggucauauaaugcagaacugcucguugcucuugagaaccaacauaccaucgaccugacggauagugaaaugaacaaauuguucgagaagaccaaaaagcagcuacgggaaaaugccgaggacaugggaaacggcugcuuuaagauuuaccacaaaugugauaaugcuugcaucggguccauucgaaacggaacauaugaccaugacguguaccgcgaugaggcccugaauaacagauuccagaucaaggguguagaacucaaaagcggcuacaaggacuggauacuguggaucucuuuugcaauuucaugcuuccuucuguguguggccuugcucggguuuaucaugugggcuugccagaaaggaaauauuagguguaacaucugcauauga

SEQ ID NO: 139444 - RNA, 1701 nt, Artificial Sequence
  derived and/or modified CDS sequence (opt3) from hemagglutinin__InfluenzaA__AHL95590
augaagaccaucauugcccugagcuacauacucugccuuguguucgcucagaaacugcccggcaacgacaauuccacagcaacuuuguguuuagggcaccaugccgucccuaacggaacgaucguuaagaccauuacaaaugauagaaucgaggugacuaacgcgaccgaacugguacaaaauucuucaauuggugagaucugcgacaguccacaccagauacuagauggcgaaaacuguacacucaucgacgcucugcuuggggauccgcagugcgacggauuucagaauaaaaagugggaucuguucguggagaggagcaaagccuauuccaacuguuaccccuaugacgucccugauuacgcaucuuugcggucgcucguggccucaagcggcacccuggaauuuaauaacgagaguuucaauuggacugguguuacacaaaacgggaccuccucuagcugcauucgccgauccaauucaaguuucuuuagccgucugaacuggcucacgcauuuaaauuuuaaguauccagcucugaacgugacuaugcccaacaaugagcaguucgacaaacuuuacaucuggggaguccaccauccuggcaccgauaaagaccagaucuuuuuguaugcacagucuuccggcagaauuacagugucaacuaagaggagccaacaggccguaauaccaaacauugggagucggccccgcaucagaaauauuccuucuaggaucuccaucuacuggaccauuguuaaaccaggagauauacugcuaaucaacagcacagguaaucucauugcuccgcggggcuacuucaagauccgcucggggaaaucuuccauaaugcgaucagacgcccccauuggaaaguguaagagugaaugcaucaccccuaacggcagcaucccaaaugacaaacccuuucagaacgugaauagaauuacguauggugcguguccuagguacgucaagcaguccacucugaaacuugcaacagggaugcggaacgugccagagaagcaaacccguggaaucuucggcgccauugcuggcuuuauagaaaaugggugggagggaaugguggaugguugguauggcuuccgccaccagaacucugaggggagaggacaggccgcagaccugaaaagcacucaagcugccaucgaucagauuaauggcaaguugaacaggcucaucgguaaaacaaaugaaaaguuccaccagaucgagaaggaauuuucagaggucgaagggcggauucaggaccuggagaaauacguugaggauaccaagauagacuuauggaguuauaacgcggaacugcucguggcccuugagaaccaacauacgaucgaucugaccgacuccgaaaugaauaaauuguucgagaagacaaagaagcagcuacgagaaaacgcagaggauaugggcaauggaugcuuuaagauuuaccacaaaugugacaacgcuugcaucggcagcauucgcaaugggacuuaugaucauaacguauacagagacgaggcccugaauaacagguuccagaucaagggaguggaacucaaaucugguuacaaggacuggauacuguggaucucauuugcuauuaguugcuuccuucugugugucgccuugcucggcuuuaucaugugggcaugccagaaagggaauauucgguguaacaucugcauauga

SEQ ID NO: 139445 - RNA, 1701 nt, Artificial Sequence; identical to SEQ ID NO: 137916
  derived and/or modified CDS sequence (opt3) from hemagglutinin__InfluenzaA__AHL95602

SEQ ID NO: 139446 - RNA, 1701 nt, Artificial Sequence; identical to SEQ ID NO: 137916
  derived and/or modified CDS sequence (opt3) from hemagglutinin__InfluenzaA__AHL95614

SEQ ID NO: 139447 - RNA, 1701 nt, Artificial Sequence
  derived and/or modified CDS sequence (opt3) from hemagglutinin__InfluenzaA__AHL95626
augaagaccaucauugcccugagcuacgugcucugccuugucuucgcucagaaacugcccggcaacgacaauuccacagcaacuuuguguuuagggcaccaugccguuccuaacggaacgauagugaagaccaucacaaaugauagaauugagguaacuaacgcgaccgaacuggugcaaaauucuucaaucggugagauuugcgacaguccacaccagauccuagauggcgaaaacuguacacucauagacgcucugcuuggggauccgcagugcgacggauuucagaauaaaaagugggaucuguucgucgagaggagcaaagccuauuccaacuguuaccccuaugacgugccugauuacgcaucuuugcggucgcucguugccucaagcggcacccuggaauuuaauaacgagaguuucaauugggcuggugugacucaaaacgggacauccucugcaugcauccgcggaagcaauuccucauuuuucagucgacugaacuggcucacccauuuaaauuuuaaguauccagcccugaacgucacgaugcccaacaaugagcaguucgacaaacuuuacauuuggggcgugcaccauccuggcacugauaaggaccagaucuuuuuguaugcucagagcucugggcguauuaccguauccacaaagagaucacaacaggccguuaucccaaacauaggaagcaggccccggauucgcaauaucccuaguagaauuucuaucuacuggacuaucgugaaaccaggugauauucugcuaauaaacuccaccggcaaucucaucgcgccgaggggguacuucaagauucggagcggaaaaucgucuaucaugcgcuccgacgcacccauaggcaaguguaagucagaaugcauuacaccuaacgguaguaucccaaaugacaaacccuuucagaacgucaaucgaaucaccuauggggccuguccuagauacgugaagcagagcacgcugaaacuugcuacuggaaugaggaacgugccagagaagcaaacacggggcauuuucggcgccaucgcaggguuuauugaaaauggaugggaggguauggucgauggcugguauggguuccgucaccagaacuccgagggacgcggccaggcugccgaccugaaaucuacccaagcggccauagaucagaucaaugguaaguugaacagacucauugggaaaacuaaugaaaaguuccaccagaucgagaaggaauuuagcgagguugaaggcaggauccaggaccuggagaaauacguggaggauacaaagauugacuuauggucauauaacgcagaacugcucguagcucuugagaaccaacauaccauagaucugacggacagugaaaugaauaaauuguucgagaagaccaaaaagcagcuacgggaaaacgccgaggauaugggaaauggcugcuuuaagaucuaccacaaaugugacaacgcuugcauuggguccauccgaaauggaacauaugaucaugacguguaccgcgacgaggcccugaacaauagauuccagauuaagggugucgaacucaaaagcggcuacaaggauuggauccuguggauaucuuuugcaaucucaugcuuccuucuguguguggccuugcucggguuuauuaugugggcuugccagaaaggaaacaucagguguaauauuugcaucuga

SEQ ID NO: 139448 - RNA, 1701 nt, Artificial Sequence; identical to SEQ ID NO: 137916
  derived and/or modified CDS sequence (opt3) from hemagglutinin__InfluenzaA__AHL95638

SEQ ID NO: 139449 - RNA, 1701 nt, Artificial Sequence; identical to SEQ ID NO: 137916
  derived and/or modified CDS sequence (opt3) from hemagglutinin__InfluenzaA__AHL95650

SEQ ID NO: 139450 - RNA, 1701 nt, Artificial Sequence
  derived and/or modified CDS sequence (opt3) from hemagglutinin__InfluenzaA__AHL95662
augaagaccaucauugcccugagcuacauacucugccuuguguucgcucagaaacugcccggcaacgacaauuccacagcaacuuuguguuuagggcaccaugccgucccuaacggaacgaucguuaagaccauuacaaaugauagaaucgaggugacuaacgcgaccgaacugguacaaaauucuucaauuggugagaucugcgacaguccacaccagauacuagauggcgaaaacuguacacucaucgacgcucugcuuggggauccgcagugcgacggauuucagaauaaaaagugggaucuguucguggagaggagcaaagccuauuccaacuguuaccccuaugacgucccugauuacgcaucuuugcggucgcucguggccucaagcggcacccuggaauuuaauaacgagaguuucaauugggcugguguuacucaaaacgggacauccucugcaugcauucgcggaagcaauuccucauuuuucagucgacugaacuggcucacccauuuaaauuuuaaguauccagcccugaacgugacgaugcccaacaaugagcaguucgacaaacuuuacaucuggggcguccaccauccuggcacugauaaagaccagaucuuuuuguaugcucagagcucugggcguauuaccguguccacaaagagaucacaacaggccguaauaccaaacauuggaagcaggccccggauccgcaauauuccuaguagaaucucuaucuacuggacuauuguuaaaccaggugauauacugcuaaucaacuccaccggcaaucucauugcgccgaggggguacuucaagauccggagcggaaaaucgucuauaaugcgcuccgacgcacccauuggcaaguguaagucagaaugcaucacaccuaacgguaguaucccaaaugacaaacccuuucagaacgugaaucgaauuaccuauggggccuguccuagauacgucaagcagagcacgcugaaacuugcuacuggaaugaggaacgugccagagaagcaaacacggggcaucuucggcgccauugcaggguuuauagaaaauggaugggaggguaugauggauggcugguauggguuccgucaccagaacuccgagggacgcggccaggcugccgaccugaaaucuacccaagcggccaucgaucagauuaaugguaaguugaacagacucaucgggaaaacuaaugaaaaguuccaccagaucgagaaggaauuuagcgagguggaaggcaggauucaggaccuggagaaauacgucgaggauacaaagauagacuuauggucauauaacgcagaacugcucguuacccuugagaaccaacauacgaucgaucugaccgacagugaaaugaauaaauuguucgagaagacaaagaagcagcuacgggaaaacgcugaggauaugggaaauggcugcuuuaagauuuaccacaaaugugacaacgccugcaucggguccauucgaaauggaacuuaugaucaugacguguaccgcgacgaggcucugaacaauagauuccagaucaaggguguagaacucaaaagcggcuacaaggauuggauacuguggaucucuuuugccauuucaugcuuccuucuguguguggcauugcucggguuuaucaugugggccugccagaaaggaaacauuagguguaauaucugcauauga

SEQ ID NO: 139451 - RNA, 1701 nt, Artificial Sequence; identical to SEQ ID NO: 138042
  derived and/or modified CDS sequence (opt3) from hemagglutinin__InfluenzaA__AHL95686

SEQ ID NO: 139452 - RNA, 1701 nt, Artificial Sequence; identical to SEQ ID NO: 138042
  derived and/or modified CDS sequence (opt3) from hemagglutinin__InfluenzaA__AHL95698

SEQ ID NO: 139453 - RNA, 1701 nt, Artificial Sequence; identical to SEQ ID NO: 137916
  derived and/or modified CDS sequence (opt3) from hemagglutinin__InfluenzaA__AHL95710

SEQ ID NO: 139454 - RNA, 1701 nt, Artificial Sequence; identical to SEQ ID NO: 139430
  derived and/or modified CDS sequence (opt3) from hemagglutinin__InfluenzaA__AHL95722

SEQ ID NO: 139455 - RNA, 1701 nt, Artificial Sequence; identical to SEQ ID NO: 137906
  derived and/or modified CDS sequence (opt3) from hemagglutinin__InfluenzaA__AHL95734

SEQ ID NO: 139456 - RNA, 1701 nt, Artificial Sequence; identical to SEQ ID NO: 137906
  derived and/or modified CDS sequence (opt3) from hemagglutinin__InfluenzaA__AHL95746

SEQ ID NO: 139457 - RNA, 1701 nt, Artificial Sequence; identical to SEQ ID NO: 138045
  derived and/or modified CDS sequence (opt3) from hemagglutinin__InfluenzaA__AHL95758

SEQ ID NO: 139458 - RNA, 1701 nt, Artificial Sequence; identical to SEQ ID NO: 137916
  derived and/or modified CDS sequence (opt3) from hemagglutinin__InfluenzaA__AHL95770

SEQ ID NO: 139459 - RNA, 1701 nt, Artificial Sequence
  derived and/or modified CDS sequence (opt3) from hemagglutinin__InfluenzaA__AHL95782
augaagaccaucauugcccugagcuacauacucugccuuguguucgcucagaaacugcccggcaacgacaauuccacagcaacuuuguguuuagggcaccaugccgucccuaacggaacgaucguuaagaccauuacaaaugauagaaucgaggugacuaacgcgaccgaacugguacaaaauucuucaauuggugagaucugcaacaguccacaccagauacuagacggcgaaaauuguacacucaucgaugcucugcuuggggacccgcagugcgauggauuucagaacaaaaagugggaccuguucguggagaggagcaaagccuauuccaauuguuaccccuaugaugucccugacuacgcaucuuugcggucgcucguggccucaagcggcacccuggaauuuaacaaugagaguuucaacuggacugguguuacacaaaaugggaccuccucugcuugcauucgccgaagcaacuccucauuuuucagucgucugaauuggcucacgcauuuaaacuuuaaguauccagcacugaacgugacuaugcccaauaacgagcaguucgauaaacuuuacaucuggggaguccaccauccuggcaccgacaaagaucagaucuuuuuguaugcccagagcucuggcagaauuacaguguccacuaagaggucacaacaggcuguaauaccaaauauugggagccggccccgcaucagaaacauuccuaguaggaucucuaucuacuggaccauuguuaaaccaggagacauacugcuaaucaauuccacagguaaccucauugccccgcggggcuacuucaagauccgcagcgggaaaucgucuauaaugcgauccgaugcgcccauuggaaaguguaagucagaaugcaucaccccuaauggcaguaucccaaacgacaaacccuuucagaaugugaacagaauuacguauggugcauguccuagguacgucaagcagagcacucugaaacuugccacagggaugcggaaugugccagagaagcaaacccguggaaucuucggcgcuauugccggcuuuauagaaaacgggugggagggaaugguggacgguugguauggcuuccgccaccaaaauuccgaggggagaggacaggcagcugaucugaaaucuacucaggccgcgaucgaccagauuaacggcaaguugaauaggcucaucgguaaaacaaacgaaaaguuccaccagaucgagaaggaauuuagcgaggucgaagggcggauucaggaucuggagaaauacguugaggacaccaagauagauuuauggucauauaacgccgaacugcucguggcacuugagaaucaacauacgaucgaccugaccgauagugaaaugaacaaauuguucgagaagacaaagaagcagcuacgagaaaaugcugaggacaugggcaacggaugcuuuaagauuuaccacaaaugugauaaugccugcaucggcuccauucgcaacgggacuuaugaccaugauguauacagagacgaggcucugaauaacagguuccagaucaagggaguggaacucaaaagcgguuacaaggacuggauacuguggaucucuuuugccauuucaugcuuccuucugugugucgcauugcucggcuuuaucaugugggccugccagaaagggaauauucgguguaacaucugcauauga

SEQ ID NO: 139460 - RNA, 1701 nt, Artificial Sequence
  derived and/or modified CDS sequence (opt3) from hemagglutinin__InfluenzaA__AHL95794
augaagaccaucauugcccugagcuacauacucugccuuguguucgcucagaaacugcccggcaacgacaauuccacagcaacuuuguguuuagggcaccaugccgucccuaacggaacgaucguuaagaccauuacaaaugauagaaucgaggugacuaacgcgaccgaacugguacaaaauucuucaauuggugagaucugcgacaguccacaccagauacuagauggcgaaaacuguacacucaucgacgcucugcuuggggauccgcagugcgacggauuucagaauaaaaagugggaucuguucguggagaggaacaaagccuauagcaauuguuaccccuaugacgucccugauuacgcauccuugcggucucucguggccucgucaggcacccuggaauuuaacaaugagagcuucaacugggcugguguuacucaaaaugggacaaguuccgcaugcauucgcggaucuaacagcuccuuuuucucacgacugaauuggcucacccauuuaaacuuuaaguauccagcccugaacgugacgaugcccaauaacgagcaguucgacaaguuguacaucuggggcguccaccauccuggcacugauaaagaccagauuuuucuuuaugcucagaguagcgggcguaucaccgugucuacaaagagaucccaacaggccguaauaccaaauauuggaucaaggccccggauccgcaacauuccuagcagaaucaguaucuacuggacuauuguuaaaccaggugauauacugcuaaucaauucuaccggcaaccucauugcgccgaggggguacuucaagauccgguccggaaaaagcucgauaaugcgcucugacgcacccauuggcaaguguaaguccgaaugcaucacaccuaaugguucaaucccaaacgacaaacccuuucagaaugugaaccgaauuaccuauggggccuguccuagauacgucaagcagaguacgcugaaacuugcuacuggaaugaggaaugugccagagaagcaaacacggggcaucuucggcgccauugcaggguuuauagaaaacggaugggaggguaugguggauggcugguauggguuccgucaccagaauagcgagggacgcggccaggcugccgaccugaaauccacccaagcggccaucgaucagauuaacgguaaguugaauagacucaucgggaaaacuaacgaaaaguuccaccagaucgagaaggaauuuucugaggucgaaggcaggauucaggaccuggagaaauacguugaggauacaaagauagacuuauggagcuauaacgcagaacugcucguggcucuugagaaucaacauaccaucgaucugacggacucagaaaugaacaaauuguucgagaagaccaaaaagcagcuacgggaaaaugccgaggauaugggaaacggcugcuuuaagauuuaccacaaaugugacaaugcuugcaucgggaguauucgaaacggaacauaugaucaugacguauaccgcgacgaggcccugaauaacagauuccagaucaaggguguggaacucaaauccggcuacaaggauuggauacuguggaucagcuuugcaauuucuugcuuccuucugugugucgccuugcucggguuuaucaugugggcuugccagaaaggaaauauuagguguaacaucugcauauga

SEQ ID NO: 139461 - RNA, 1701 nt, Artificial Sequence
  derived and/or modified CDS sequence (opt3) from hemagglutinin__InfluenzaA__AHL95806
augaagaccaucauugcccugagcuacauacucugccuuguguucgcucagaaacugcccggcaacgacaauuccacagcaacuuuguguuuagggcaccaugccgucccuaacggaacgaucguuaagaccauuacaaaugauagaaucgaggugacuaacgcgaccgaacugguacaaaauucuucaauuggugagaucugcgacaguccacaccagauacuagauggcgaaaacuguacacucaucgacgcucugcuuggggauccgcagugcgacggauuucagaauaaaaagugggaucuguucguggagaggagcaaagccuauuccaacuguuaccccuaugacgucccugauuacgcaucuuugcggucgcucguggccucaagcggcacccuggaauuuaauaacgagaguuucaauugggcugguguuacucaaaacgggacauccucugcaugcauucgcggaagcaauuccucauuuuucagucgacugaacuggcucacccauuuaaauuuuaaguauccagcccugaacgugacgaugcccaacaaugagcaguucgacaaguuguacaucuggggcguccaccauccuggcacugauaaagaccagauuuuucuuuaugcucagagcucugggcguaucaccguguccacaaagagaucacaacaggccguaauaccaaacauuggaagcaggccccggauccgcaauauuccuaguagaaucucuaucuacuggacuauuguuaaaccaggugauauacugcuaaucaacuccaccggcaaucucauugcgccgaggggguacuucaagauccggagcggaaaaucgucuauaaugcgcuccgacgcacccauuggcaaguguaagucagaaugcaucacaccuaacgguaguaucccaaaugacaaacccuuucagaacgugaaucgaauuaccuauggggccuguccuagauacgucaagcagagcacgcugaaacuugcuacuggaaugaggaacgugccagagaagcaaacacggggcaucuucggcgccauugcaggguuuauagaaaauggaugggaggguaugguggauggcugguauggguuccgucaccagaacuccgagggacgcggccaggcugccgaccugaaaucuacccaagcggccaucgaucagauuaaugguaaguugaacagacucaucgggaaaacuaaugaaaaguuccaccagaucgagaaggaauuuagcgaggucgaaggcaggauucaggaccuggagaaauacguugaggauacaaagauagacuuauggucauauaacgcagaacugcucguggcucuugagaaccaacauaccaucgaucugacggacagugaaaugaauaaauuguucgagaagaccaaaaagcagcuacgggaaaacgccgaggauaugggaaauggcugcuuuaagauuuaccacaaaugugacaacgcuugcaucggguccauucgaaauggaacauaugaucaugacguauaccgcgacgaggcccugaacaauagauuccagaucaaggguguggaacucaaaagcggcuacaaggauuggauacuguggaucucuuuugcaauuucaugcuuccuucugugugucgccuugcucgggaguaucaugugggcuugccagaaaggaaacauuagguguaauaucugcauauga

SEQ ID NO: 139462 - RNA, 1701 nt, Artificial Sequence; identical to SEQ ID NO: 138042
  derived and/or modified CDS sequence (opt3) from hemagglutinin__InfluenzaA__AHL95818

SEQ ID NO: 139463 - RNA, 1701 nt, Artificial Sequence; identical to SEQ ID NO: 137906
  derived and/or modified CDS sequence (opt3) from hemagglutinin__InfluenzaA__AHL95830

SEQ ID NO: 139464 - RNA, 1701 nt, Artificial Sequence; identical to SEQ ID NO: 138042
  derived and/or modified CDS sequence (opt3) from hemagglutinin__InfluenzaA__AHL95842

SEQ ID NO: 139465 - RNA, 1701 nt, Artificial Sequence; identical to SEQ ID NO: 137906
  derived and/or modified CDS sequence (opt3) from hemagglutinin__InfluenzaA__AHL95854

SEQ ID NO: 139466 - RNA, 1701 nt, Artificial Sequence; identical to SEQ ID NO: 137916
  derived and/or modified CDS sequence (opt3) from hemagglutinin__InfluenzaA__AHL95866

SEQ ID NO: 139467 - RNA, 1701 nt, Artificial Sequence
  derived and/or modified CDS sequence (opt3) from hemagglutinin__InfluenzaA__AHL95878
augaaggccauccuggugauuaugcucuacaccuucgcuacagcaaacgccgacacucuuugcauaggcuaucacgcgaauaacagcacggauaccgucgacacaguucuggagaaaaaugugacuguaacccauuccgugaacuuguuagaagauaagcacaaugggaaacuguguaagcuaagaggagucucuccccuccaucuggguaaaugcaacaucgcuggcuggauucuugggaauccugagugugaaucacugaguacagccagcuccuggucuuacaucguggagaccucgggaucagacaacggcacuugcuauccaggugauuuuauugacuacgaagaguugagggagcagcucagcaguguuuccucuuucgaacgguuugagaucuucccgaagacaagcuccuggcccaaucacgauucaaacaagggggugaccgcagccuguccucaugcuggagcaaaaggcuuuuauaagaaucugauauggcuggucaaaaagggcaacaguuacccaaaacucagcaucucuuauauuaaugacaaggggaaggaaguguuaguacuguggggaauccaccaccccuccacgacugccgaucaacagucacuuuaccagaacgcugacaccuacguuuucguggguacaagccgcuauaguaaaaaguuuaaaccugagauugccauccgaccaaagguccgugaucaggagggcagaaugaauuacuauuggacuuugguggaacccggggacaaaauaaccuucgaggcgacaggaaaccugguggucccuagguacgcauuugccauggaacggaacgcuggcucugguauuaucauuuccgauaccccaguucaugacugcaauacgacuugucaaacaccgaagggggccaucaacaccagccuacccuuccagaauauccacccuauuacuauaggaaaaugcccaaaguaugugaagucgacaaaacuccgccuggcaaccggccuuagaaacguacccucuauccaguccaggggccuguuuggggcuauugccggauucaucgaggguggcuggacggggaugguggacggaugguacggcuaucaucaccagaaugaacaagguucaggguacgcggccgauuugaagaguacccagaacgcaauagacaaaauuacaaauaaggucaacagcgugaucgagaaaaugaauacucaguuuaccgcuguuggcaaggaguucaaccaccucgaaaagcggaucgagaaucugaacaaaaagguggaugacggauucuuagauauuuggacauacaaugccgaacugcucguccuucuggagaacgaacgcacuuuggacuaucaugauuccaaugugaaaaaccuauacgagaagguacgaaaccagcugaaaaauaacgcuaaggagaucggcaauggguguuuugaguucuaucacaagugcgacaacaccuguauggaaucuguuaaaaauggaacauacgauuauccuaaguacagcgaagaggccaaacucaacagagaagagauugacggugugaagcuggagucaaccaggauauaucaaauccuugcaauuuacaguacugccgcuuccagccuggucuugguggucucucucggcgcgaucucauuuuggaugugcaguaaugggagccugcagugccggaucuguauuuga

SEQ ID NO: 139468 - RNA, 1701 nt, Artificial Sequence; identical to SEQ ID NO: 137916
  derived and/or modified CDS sequence (opt3) from hemagglutinin__InfluenzaA__AHL95889

SEQ ID NO: 139469 - RNA, 1701 nt, Artificial Sequence; identical to SEQ ID NO: 138042
  derived and/or modified CDS sequence (opt3) from hemagglutinin__InfluenzaA__AHL95901

SEQ ID NO: 139470 - RNA, 1701 nt, Artificial Sequence; identical to SEQ ID NO: 138042
  derived and/or modified CDS sequence (opt3) from hemagglutinin__InfluenzaA__AHL95913

SEQ ID NO: 139471 - RNA, 1701 nt, Artificial Sequence
  derived and/or modified CDS sequence (opt3) from hemagglutinin__InfluenzaA__AHL95937
augaagaccaucauugcccugagcuacauacucugccuuguguucgcucagaaacugcccggcaacgacaauuccacagcaacuuuguguuuagggcaccaugccgucccuaacggaacgaucguuaagaccauuacaaaugauagaaucgaggugacuaacgcgaccgaacugguacaaaauucuucaauuggugagaucugcgacaguccacaccagauacuagauggcgaaaacuguacacucaucgacgcucugcuuggggauccgcagugcgacggauuucagaauaaaaagugggaucuguucguggagaggagcaaagccuauuccaacuguuaccccuaugacgucccugauuacgcaucuuugcggucgcucguggccucaagcggcacccuggaauuuaauaacgagaguuucaauugggcugguguuacucaaaacgggacauccucugcaugcauucgcggaagcaauuccucauuuuucagucgacugaacuggcucacccauuuaaauuuuaaguauccagcccugaacgugacgaugcccaacaaugagcaguucgacaaacuuuacaucuggggcguccaccauccuggcacugauaaagaccagaucuuuuuguaugcucagagcucugggcguauuaccguguccacaaagagaucacaacaggccguaauaccaaacauuggaagcaggccccggauccgcaauauuccuaguagaaucucuaucuacuggacuauuguuaaaccaggugauauacugcuaaucaacuccaccggcaaucucauugcgccgaggggguacuucaagauccggagcggaaaaucgucuauaaugcgcuccgacgcacccauuggcaaguguaagucagaaugcaucacaccuaacgguaguaucccaaaugacaaacccuuucagaacgugaaucgaauuaccuauggggccuguccuagauacgucaagcagagcacgcugaaacuugcuacuggaaugaggaacgugccagagaagcaaacacggggcaucuucggcgccauugcaggguuuauagaaaauggaugggaggguaugguggauggcugguauggguuccgucaccagaacuccgagggacgcggccaggcugccgaccugaaaucuacccaagcggccaucgaucagauuaaugguaaguugaacagacucaucgggaaaacuaaugaaaaguuccaccagaucgagaaggaauuuagcgaggucgaaggcaggauucaggaccuggagaaauacguugaggauacaaagaccgacuuauggucauauaacgcagaacugcucguggcucuugagaaccaacauacgauagaucugaccgacagugaaaugaauaaauuguucgagaagacaaagaagcagcuacgggaaaacgccgaggauaugggaaauggcugcuuuaagaucuaccacaaaugugacaacgcuugcauuggguccauccgaaauggaacuuaugaucaugacguauaccgcgacgaggcccugaacaauagauuccagauuaaggguguggaacucaaaagcggcuacaaggauuggauccuguggauaucuuuugcaaucucaugcuuccuucugugugucgccuugcucggguuuauuaugugggcuugccagaaaggaaacaucagguguaauauuugcaucuga

SEQ ID NO: 139472 - RNA, 1701 nt, Artificial Sequence
  derived and/or modified CDS sequence (opt3) from hemagglutinin__InfluenzaA__AHL95949
augaagaccaucauugcccugagcuacauacucugccuuguguucgcucagaaacugcccggcaacgacaauuccacagcaacuuuguguuuagggcaccaugccgucccuaacggaacgaucguuaagaccauuacaaaugauagaaucgaggugacuaacgcgaccgaacugguacaaaauucuucaauuggugagaucugcgacaguccacaccagauacuagauggcgaaaacuguacacucaucgacgcucugcuuggggauccgcagugcgacggauuucagaauaaaaagugggaucuguucguggagaggagcaaagccuauuccaacuguuaccccuaugacgucccugauuacgcaucuuugcggucgcucguggccucaagcggcacccuggaauuuaauaacgagaguuucaauuggacugguguuacacaaaacgggaccuccucugcuugcauucgccgaagcaauaacuccuuuuucucacgucugaauuggcucacgcauaguaacuuuaaguauccagcauuaaacaugacuaugcccaauaacgagcaguucgacaagcuguacaucuggggagugcaccauccuggcaccgauaaagaccagauuuuucuuuaugcccagagcucuggcagaaucacagucuccacuaagaggucacaacaggcugugauaccaaauauugggagccggccccgcaucagaaacauuccuaguaggaucucuaucuacuggaccauuguaaaaccaggagauauauugcugaucaauuccacagguaaccuaauugccccgcggggcuacuucaagauccgcagcgggaaaucgucuauaaugcgauccgacgcgcccauuggaaaguguaagucagaaugcaucaccccuaauggcaguaucccaaacgacaaacccuuucagaauguuaacagaauuacguauggugcauguccuagguacgugaagcagagcacucucaaacuggccacagggaugcggaaugucccagagaagcaaacccguggaaucuucggcgcuauugccggcuuuauagaaaacgggugggagggaaugauggaugguugguauggcuuccgccaccaaaauuccgaggggagaggacaggcagcugaccuuaaaucuacucaggccgcgaucgaucagauuaacggcaagcugaauagguugaucgguaaaacaaacgaaaaguuccaccagaucgagaaggaauuuagcgagguggaagggcggauucaggaccucgagaaauacguggaggauaccaagauagaccuguggucauauaacgccgaauuacuggucgcacucgagaaucaacauacgaucgaucuuaccgacagugaaaugaacaaacuguucgagaagacuaaaaagcaguugcgagaaaaugcugaggauaugggcaacggaugcuuuaagauuuaccacaaaugugacaaugccugcaucggcuccauucgcaacgggacauaugaucaugacguuuacagagacgaggcucuaaauaacagguuccagaucaagggaguggaacugaaaagcgguuacaaggauuggauacucuggaucucuuuugccauuucaugcuuccugcuuuguguagcacuguugggcuuuaucaugugggccugccagaaagggaauauucgguguaacaucugcauauga

SEQ ID NO: 139473 - RNA, 1701 nt, Artificial Sequence; identical to SEQ ID NO: 137916
  derived and/or modified CDS sequence (opt3) from hemagglutinin__InfluenzaA__AHL95961

SEQ ID NO: 139474 - RNA, 1701 nt, Artificial Sequence; identical to SEQ ID NO: 137916
  derived and/or modified CDS sequence (opt3) from hemagglutinin__InfluenzaA__AHL95973

SEQ ID NO: 139475 - RNA, 1701 nt, Artificial Sequence; identical to SEQ ID NO: 137916
  derived and/or modified CDS sequence (opt3) from hemagglutinin__InfluenzaA__AHL95985

SEQ ID NO: 139476 - RNA, 1701 nt, Artificial Sequence
  derived and/or modified CDS sequence (opt3) from hemagglutinin__InfluenzaA__AHL95997
augaagaccaucauugcccugagcuacauacucugccuuguguucgcucagaaacugcccggcaacgacaauuccacagcaacuuuguguuuagggcaccaugccgucccuaacggaacgaucguuaagaccauuacaaaugauagaaucgaggugacuaacgcgaccgaacugguacaaaauucuucaauuggugagaucugcgacaguccacaccagauacuagauggcgaaaacuguacacucaucgacgcucugcuuggggauccgcagugcgacggauuucagaauaaaaagugggaucuguucguggagaggagcaaagccuauuccaacuguuaccccuaugacgucccugauuacgcaucuuugcggucgcucguggccucaagcggcacccuggaauuuaauaacgagaguuucaauugggcugguguuacucaaaacgggacauccucuagcugcauucgcggauccaagucaaguuucuuuagccgacugaauuggcucacccauuuaaacuuuaaguauccagcacugaaugugacgaugcccaacaacgagcaguucgacaaacuuuacaucuggggcguccaccauccuggcacugauaaggaccagauuuuucuuuaugcccagucuuccgggcguaucaccgugucaacaaaaagaagccaacaggcuguaauaccaaauauuggaaguaggccccggauccgcaacauuccuucuagaaucuccaucuacuggacuauuguuaagccaggugauauacugcuaaucaauagcaccggcaaccucauugccccgaggggguacuucaaaauccggucgggaaagucuuccauaaugcgcucagacgcgcccauuggcaaguguaaaagugaaugcaucacaccuaaugguagcaucccaaacgacaagcccuuucagaaugugaaccgaauuaccuauggggcauguccuagauacgucaaacaguccacgcugaaguuggccacuggaaugaggaaugugccagagaaacaaacacggggcaucuucggcgcuauugccggguuuauagaaaacggaugggaggguaugauggauggcugguauggguuccgucaccagaauagcgagggacgcggccaggcagcugaccugaagucuacccaagccgcgaucgaucagauuaacgguaaauugaauagacucaucgggaagacuaacgaaaaguuccaccagaucgagaaagaauuuucagagguggaaggcaggauucaggaccuggagaaguacgucgaggauacaaaaauagacuuauggaguuauaaugccgaacugcucguugcacuugagaaccaacauaccaucgaucugacggacuccgaaaugaacaaguuguucgagaaaaccaagaagcagcuacgggaaaaugcugaggauaugggaaacggcugcuuuaaaauuuaccacaagugugacaaugccugcaucgggagcauucgaaacggaacauaugaucaugacguguaccgcgacgaggcucugaauaacagauuccagaucaaagguguagaacucaagucuggcuacaaagauuggauacuguggaucucauuugccauuaguugcuuccuucuguguguggcauugcucggguuuaucaugugggccugccagaagggaaauauuagguguaacaucugcauauga

SEQ ID NO: 139477 - RNA, 1701 nt, Artificial Sequence
  derived and/or modified CDS sequence (opt3) from hemagglutinin__InfluenzaA__AHL96021
augaagaccaucauugcccugagcuacauacucugccuuguguucgcucagaaacugcccggcaacgacaauuccacagcaacuuuguguuuagggcaccaugccgucccuaacggaacgaucguuaagaccauuacaaaugauagaaucgaggugacuaacgcgaccgaacugguacaaaauucuucaauuggugagaucugcgacaguccacaccagauacuagauggcgaaaacuguacacucaucgacgcucugcuuggggauccgcagugcgacggauuucagaauaaaaagugggaucuguucguggagaggagcaaagccuauuccaacuguuaccccuaugacgucccugauuacgcaucuuugcggucgcucguggccucaagcggcacccuggaauuuaauaacgagaguuucaauugggcugguguuacucaaaacgggacauccucugcaugcauucgcggaagcaaguccucauuuuucagucgacugaauuggcucacccauuuaaacuuuaaguauccagcccugaaugugacgaugcccaacaacgagcaguucgacaaacuuuacaucuggggcguccaccauccuggcacugauaaggaccagauuuuucuuuaugcucagagcucugggcguaucaccguguccacaaaaagaucacaacaggccguaauaccaaauauuggaagcaggccccggauccgcaacauuccuaguagaaucucuaucuacuggacuauuguuaagccaggugauauacugcuaaucaauuccaccggcaaccucauugcgccgaggggguacuucaaaauccggagcggaaagucgucuauaaugcgcuccgacgcacccauuggcaaguguaaaucagaaugcaucacaccuaaugguaguaucccaaacgacaagcccuuucagaaugugaaccgaauuaccuauggggccuguccuagauacgucaaacagagcacgcugaaguuggcuacuggaaugaggaaugugccagagaaacaaacacggggcaucuucggcgccauugcaggguuuauagaaaacggaugggaggguaugauggauggcugguauggguuccgucaccaaaauuccgagggacgcggccaggcugccgaccugaagucuacccaggcggccaucgaucagauuaacgguaaauugaauagacucaucgggaagacuaacgaaaaguuccaccagaucgagaaagaauuuagcgagguggaaggcaggauucaggaccuggagaaguacgucgaggauacaaaaauagacuuauggucauauaaugcagaacugcucguugcucuugagaaccaacauaccaucgaucugacggacagugaaaugaacaaguuguucgagaaaaccaagaagcagcuacgggaaaaugccgaggauaugggaaacggcugcuuuaaaauuuaccacaagugugacaaugcuugcaucggguccauucgaaacggaacauaugaucaugacguguaccgcgacgaggcccugaauaacagauuccagaucaaagguguagaacucaagagcggcuacaaagauuggauacuguggaucucuuuugcaauuucaugcuuccuucuguguguggccuugcucggguuuaucaugugggcuugccagaagggaaauauuagguguaacaucugcauauga

SEQ ID NO: 139478 - RNA, 1701 nt, Artificial Sequence; identical to SEQ ID NO: 137916
  derived and/or modified CDS sequence (opt3) from hemagglutinin__InfluenzaA__AHL96033

SEQ ID NO: 139479 - RNA, 1701 nt, Artificial Sequence; identical to SEQ ID NO: 138171
  derived and/or modified CDS sequence (opt3) from hemagglutinin__InfluenzaA__AHL96045

SEQ ID NO: 139480 - RNA, 1701 nt, Artificial Sequence; identical to SEQ ID NO: 138042
  derived and/or modified CDS sequence (opt3) from hemagglutinin__InfluenzaA__AHL96056

SEQ ID NO: 139481 - RNA, 1701 nt, Artificial Sequence; identical to SEQ ID NO: 137906
  derived and/or modified CDS sequence (opt3) from hemagglutinin__InfluenzaA__AHL96068

SEQ ID NO: 139482 - RNA, 1701 nt, Artificial Sequence; identical to SEQ ID NO: 137916
  derived and/or modified CDS sequence (opt3) from hemagglutinin__InfluenzaA__AHL96080

SEQ ID NO: 139483 - RNA, 1701 nt, Artificial Sequence
  derived and/or modified CDS sequence (opt3) from hemagglutinin__InfluenzaA__AHL96092
augaagaccaucauugcccugagcuacauacucugccuuguguucgcucagaaacugcccggcaacgacaauuccacagcaacuuuguguuuagggcaccaugccgucccuaacggaacgaucguuaagaccauuacaaaugauagaaucgaggugacuaacgcgaccgaacugguacaaaauucuucaauuggugagaucugcgacaguccacaccagauacuagauggcgaaaacuguacacucaucgacgcucugcuuggggauccgcagugcgacggauuucagaauaaaaagugggaucuguucauugagaggagcaaagccuauuccaacuguuaccccuaugacgugccugauuacgcaucuuugcggucgcucgucgccucaagcggcacccuggaauuuaauaacgagaguuucaauugggcuggugugacucaaaacgggacauccucugcaugcauccgcggaagcaauuccucauuuuucagucgacugaacuggcucacccauuuaaauuuuaaguauccagcccugaacguuacgaugcccaacaaugagcaguucgacaaacuuuacauuuggggcgugcaccauccuggcacugauaaggaccagaucuuuuuguaugcucagagcucugggcguauaaccgucuccacaaagagaucacaacaggccgugauuccaaacaucggaagcaggccccggauucgcaauaucccuaguagaaucucuauuuacuggacuauaguaaaaccaggugauauccugcuaauuaacuccaccggcaaucucaucgcgccgaggggguacuucaagauacggagcggaaaaucgucuauuaugcgcuccgacgcacccaucggcaaguguaagucagaaugcaucacaccuaacgguaguauuccaaaugacaaacccuuucagaacguuaaucgaaucaccuauggggccuguccuagauacgugaagcagagcacgcugaaacuugcuacuggaaugaggaacgucccagagaagcaaacacggggcauuuucggcgccauagcaggguuuaucgaaaauggaugggaggguaugguggauggcugguauggguuccgucaccagaacuccgagggacgcggccaggcugccgaccugaaaucuacccaagcggccauugaucagaucaaugguaaguugaacagacucaucgggaaaacuaaugaaaaguuccaccagauugagaaggaauuuagcgagguggaaggcaggauacaggaccuggagaaauacgucgaggauacaaagaucgacuuauggucauauaacgcagaacugcucguugcucuugagaaccaacauaccauugaucugacggacagugaaaugaauaaauuguucgagaagaccaaaaagcagcuacgggaaaacgccgaggauaugggaaauggcugcuuuaagaucuaccacaaaugugacaacgcuugcauuggguccauccgaaauggaacauaugaucaugacguguaccgcgacgaggcccugaacaauagauuccagauaaaggguguagaacucaaaagcggcuacaaggauuggauccuguggauuucuuuugcaaucucaugcuuccuucuguguguggccuugcucggguuuauuaugugggcuugccagaaaggaaacaucagguguaauauaugcauuuga

SEQ ID NO: 139484 - RNA, 1701 nt, Artificial Sequence
  derived and/or modified CDS sequence (opt3) from hemagglutinin__InfluenzaA__AHL96104
augaagaccaucauugcccugagcuacauacucugccuuguguucgcucagaaacugcccggcaacgacaauuccacagcaacuuuguguuuagggcaccaugccgucccuaacggaacgaucguuaagaccauuacaaaugauagaaucgaggugacuaacgcgaccgaacugguacaaaauucuucaauuggugagaucugcgacaguccacaccagauacuagauggcgaaaacuguacacucaucgacgcucugcuuggggauccgcagugcgacggauuucagaauaaaaagugggaucuguucguggagaggagcaaagccuauuccaacuguuaccccuaugacgucccugauuacgcaucuuugcggucgcucguggccucaagcggcacccuggaauuuaauaacgagaguuucaauuggacugguguuacacaaaacgggaccuccucugcuugcauucgccgaagcaauuccucauuuuucagucgucugaacuggcucacgcauuuaaauuuuaaguauccagcacugaacgugacuaugcccaacaaugagcaguucgacaaguuguacaucuggggaguccaccauccuggcaccgauaaagaccagauuuuucuuuaugcccagagcucuggcagaaucacaguguccacuaagaggucacaacaggcuguaauaccaaacauugggagccggccccgcaucagaaauauuccuaguaggaucucuaucuacuggaccauuguuaaaccaggagauauacugcuaaucaacuccacagguaaucucauugccccgcggggcuacuucaagauccgcagcgggaaaucgucuauaaugcgauccgacgcgcccauuggaaaguguaagucagaaugcaucaccccuaacggcaguaucccaaaugacaaacccuuucagaacgugaauagaauuacguauggugcauguccuagguacgucaagcagagcacucugaaacuugccacagggaugcggaacgugccagagcgucaaacccgcggaaucuucggcgcuauugccggcuuuauagaaaaugggugggagggaaugguggaugguugguauggcuucagacaccagaacuccgaggggaggggacaggcagcugaccugaagucuacucaagccgcgaucgaucagauuaauggcaaauugaaccggcucaucgguaagacaaaugaaaaauuccaccagaucgagaaggaauuuagcgaggucgaagggcgcauucaggaccuggagaaguacguugaggauaccaaaauagacuuauggucauauaacgccgaacugcucguggcacuugagaaccaacauacgaucgaucugaccgacagugaaaugaauaaguuguucgagaaaacaaagaaacagcuacgagaaaacgcugaggauaugggcaauggaugcuuuaagauuuaccacaagugugacaacgccugcaucggcuccauuagaaaugggacuuaugaucauaacguauacagggacgaggcucugaauaaccgguuccagaucaaaggaguggaacucaagagcgguuacaaagacuggauacuguggaucucuuuugccauuucaugcuuccuucugugugucgcauugcucggcuuuaucaugugggccugccagaaggggaauauucgcuguaacaucugcauauga

SEQ ID NO: 139485 - RNA, 1701 nt, Artificial Sequence; identical to SEQ ID NO: 138530
  derived and/or modified CDS sequence (opt3) from hemagglutinin__InfluenzaA__AHL96116

SEQ ID NO: 139486 - RNA, 1701 nt, Artificial Sequence; identical to SEQ ID NO: 137906
  derived and/or modified CDS sequence (opt3) from hemagglutinin__InfluenzaA__AHL96128

SEQ ID NO: 139487 - RNA, 1701 nt, Artificial Sequence; identical to SEQ ID NO: 138042
  derived and/or modified CDS sequence (opt3) from hemagglutinin__InfluenzaA__AHL96152

SEQ ID NO: 139488 - RNA, 1701 nt, Artificial Sequence
  derived and/or modified CDS sequence (opt3) from hemagglutinin__InfluenzaA__AHL96164
augaagaccaucauugcccugagcuacauacucugccuuguguucgcucagaaacugcccggcaacgacaauuccacagcaacuuuguguuuagggcaccaugccgucccuaacggaacgaucguuaagaccauuacaaaugauagaaucgaggugacuaacgcgaccgaacugguacaaaauucuucaauuggugagaucugcgacaguccacaccagauacuagauggcgaaaacuguacacucaucgacgcucugcuuggggauccgcagugcgacggauuucagaauaaaaagugggaucuguucguggagaggagcaaagccuauuccaacuguuaccccuaugacgucccugauuacgcaucuuugcggucgcucguggccucaagcggcacccuggaauuuaauaacgagaguuucaauugggcugguguuacucaaaacgggacauccucugcaugcauucgcggaagcaauuccucauuuuucagucgacugaacuggcucacccauuuaaauuuuaaguauccagcccugaacgugacgaugcccaacaaugagcaguucgacaaguuguacaucuggggcguccaccauccuggcacugauaaagaccagauuuuucuuuaugcucagagcucugggcguaucaccguguccacaaagagaucacaacaggccguaauaccaaacauuggaagcaggccccggauccgcaauauuccuaguagaaucucuaucuacuggacuauuguuaaaccaggugauauacugcuaaucaacuccaccggcaaucucauugcgccgaggggguacuucaagauccggagcggaaaaucgucuauaaugcgcuccgacgcacccauuggcaaguguaagucagaaugcaucacaccuaacgguaguaucccaaaugacaaacccuuucagaacgugaaucgaauuaccuauggggccuguccuagauacgucaagcagagcacgcugaaacuugcuacuggaaugaggaacgugccagagaagcaaacacggggcaucuucggcgccauugcaggguuuauagaaaauggaugggaggguaugguggauggcugguauggguuccgucaccagaacuccgagggacgcggccaggcugccgaccugaaaucuacccaagcggccaucgaucagauuaaugguaaguugaacagacucaucgggaaaacuaaugaaaaguuccaccagaucgagaaggaauuuagcgaggucgaaggcaggauucaggaccuggagaaauacguugaggauacaaagauagacuuauggucauauaacgcagaacugcucguggcucuugagaaccaacauaccaucgaucugacggacagugaaaugaauaaauuguucgagaagaccaaaaagcagcuacgggaaaacgccgaggauaugggaaauggcugcuuuaagauuuaccacaaaugugacaacgcuugcaucggguccauucgaaauggaacauaugaucaugacguauaccgcgacgaggcccugaacaauagauuccagaucaaggguguggaacucaaaagcggcuacaagaacuggauacuguggaucucuuuugcaauuucaugcuuccuucugugugucgccuugcucggguuuaucaugugggcuugccagaaaggaaauauuagguguaacaucugcauauga

SEQ ID NO: 139489 - RNA, 1701 nt, Artificial Sequence; identical to SEQ ID NO: 138042
  derived and/or modified CDS sequence (opt3) from hemagglutinin__InfluenzaA__AHL96176

SEQ ID NO: 139490 - RNA, 1701 nt, Artificial Sequence; identical to SEQ ID NO: 138042
  derived and/or modified CDS sequence (opt3) from hemagglutinin__InfluenzaA__AHL96188

SEQ ID NO: 139491 - RNA, 1701 nt, Artificial Sequence
  derived and/or modified CDS sequence (opt3) from hemagglutinin__InfluenzaA__AHL96200
augaagaccaucauugcccugagcuacauacucugccuuguguucgcucagaaacugcccggcaacgacaauuccacagcaacuuuguguuuagggcaccaugccgucccuaacggaacgaucguuaagaccauuacaaaugauagaaucgaggugacuaacgcgaccgaacugguacaaaauucuucaauuggugagaucugcgacaguccacaccaggugcuagauggcgaaaacuguacacucauagacgcucugcuuggggauccgcagugcgacggauuucagaauaaaaagugggaucuguucgucgagaggagcaaagccuauuccaacuguuaccccuaugacgugccugauuacgcaucuuugcggucgcucguugccucaagcggcacccuggaauuuaauaacgagaguuucaauugggcuggugugacucaaaacgggacauccucugcaugcauccgcggaagcaauuccucauuuuucagucgacugaacuggcucacccauuuaaauuuuaaguauccagcccugaacgucacgaugcccaacaaugagcaguucgacaaacuuuacauuuggggcgugcaccauccuggcacugauaaggaccagaucuuuuuguaugcucagagcucugggcguauuaccguauccacaaagagaucacaacaggccguuaucccaaacauaggaagcaggccccggauucgcaauaucccuaguagaauuucuaucuacuggacuaucgugaaaccaggugauauucugcuaauaaacuccaccggcaaucucaucgcgccgaggggguacuucaagauucggagcggaaaaucgucuaucaugcgcuccgacgcacccauaggcaaguguaagucagaaugcauuacaccuaacgguaguaucccaaaugacaaacccuuucagaacgucaaucgaaucaccuauggggccuguccuagauacgugaagcagagcacgcugaaacuugcuacuggaaugaggaacgugccagagaagcaaacacggggcauuuucggcgccaucgcaggguuuauugaaaauggaugggaggguauggucgauggcugguauggguuccgucaccagaacuccgagggacgcggccaggcugccgaccugaaaucuacccaagcggccauagaucagaucaaugguaaguugaacagacucauugggaaaacuaaugaaaaguuccaccagaucgagaaggaauuuagcgagguugaaggcaggauccaggaccuggagaaauacguggaggauacaaagauugacuuauggucauauaacgcagaacugcucguagcucuugagaaccaacauaccauagaucugacggacagugaaaugaauaaauuguucgagaagaccaaaaagcagcuacgggaaaacgccgaggauaugggaaauggcugcuuuaagaucuaccacaaaugugacaacgcuugcauuggguccauccgaaauggaacauaugaucaugacguguaccgcgacgaggcccugaacaauagauuccagauuaagggugucgaacucaaaagcggcuacaaggauuggauccuguggauaucuuuugcaaucucaugcuuccuucuguguguggccuugcucggguuuauuaugugggcuugccagaaaggaaacaucagguguaauauuugcaucuga

SEQ ID NO: 139492 - RNA, 1701 nt, Artificial Sequence; identical to SEQ ID NO: 137906
  derived and/or modified CDS sequence (opt3) from hemagglutinin__InfluenzaA__AHL96212

SEQ ID NO: 139493 - RNA, 1701 nt, Artificial Sequence; identical to SEQ ID NO: 138515
  derived and/or modified CDS sequence (opt3) from hemagglutinin__InfluenzaA__AHL96224

SEQ ID NO: 139494 - RNA, 1701 nt, Artificial Sequence
  derived and/or modified CDS sequence (opt3) from hemagglutinin__InfluenzaA__AHL96236
augaagaccaucauugcccugagcuacauacucugccuuguguucgcucagaaacugcccggcaacgacaauuccacagcaacuuuguguuuagggcaccaugccgucccuaacggaacgaucguuaagaccauuacaaaugauagaaucgaggugacuaacgcgaccgaacugguacaaaauucuucaaugggugagauuugcgacaguccacaccagauccuagauggcgaaaacuguacacucauagacgcucugcuuggggauccgcagugcgacggauuucagaauaaaaagugggaucuguucguggagaggagcaaagccuauuccaacuguuaccccuaugacgucccugauuacgcaucuuugcggucgcucguggccucaagcggcacccuggaauuuaauaacgagaguuucaauuggacugguguuacacaaaacgggaccuccucugcuugcauccgccgaagcaauuccucauuuuucagucgucugaacuggcucacgcauuuaaauuuuaaguauccagcacugaacgugacuaugcccaacaaugagcaguucgacaaacuuuacauuuggggaguccaccauccuggcaccgauaaagaccagaucuuuuuguaugcccagagcucuggcagaauuacaguguccacuaagaggucacaacaggcuguaaucccaaacauagggagccggccccgcauuagaaauaucccuaguaggauuucuaucuacuggaccaucguuaaaccaggagauauucugcuaauaaacuccacagguaaucucaucgccccgcggggcuacuucaagauucgcagcgggaaaucgucuaucaugcgauccgacgcgcccauaggaaaguguaagucagaaugcauuaccccuaacggcaguaucccaaaugacaaacccuuucagaacgugaauagaaucacguauggugcauguccuagguacgucaagcagagcacucugaaacuugccacagggaugcggaacgugccagagaagcaaacccguggaauuuucggcgcuaucgccggcuuuauugaaaaugggugggagggaaugguggaugguugguauggcuuccgccaccagaacuccgaggggagaggacaggcagcugaccugaaaucuacucaagccgcgauagaucagaucaauggcaaguugaacaggcucauugguaaaacaaaugaaaaguuccaccagaucgagaaggaauuuagcgaggucgaagggcggauccaggaccuggagaaauacguugaggauaccaagauugacuuauggucauauaacgccgaacugcucguggcacuugagaaccaacauacgauagaucugaccgacagugaaaugaauaaauuguucgagaagacaaagaagcagcuacgagaaaacgcugaggauaugggcaauggaugcuuuaagaucuaccacaaaugugacaacgccugcauugaguccauccgcaauggcacuuaugaucaugacguauacagagacgaagcucugaacaauagguuccagauuaaggggguggagcucaaaagcggauacaagaacuggauccuguggauaucuuuugccaucucaugcuuccuucugugugucgcauugcucgguuuuauuaugugggccugccagaaaggcaauauccgguguaacauuugcaucuga

SEQ ID NO: 139495 - RNA, 1701 nt, Artificial Sequence
  derived and/or modified CDS sequence (opt3) from hemagglutinin__InfluenzaA__AHL96248
augaagaccaucauugcccugggcuacauacucugccuuguguucgcucagaaacugcccgggaacgacaauagcacagcaacuuuguguuuaggacaccaugccgucccuaacgguacgaucguuaagaccauuacaaaugauagaaucgaggugacuaacgcgaccgaacugguacaaaauuccucuauuggcgagaucugcgacucaccacaccagauacuagauggggaaaacuguacacucaucgacgcucugcuuggagauccgcagugcgacggcuuucagaauaaaaagugggaucuguucauugagaggaguaaagccuauagcaacuguuaccccuaugacgugccugauuacgcauccuugcggucucucgucgccucgucagguacccuggaauuuaauaacgagagcuucaauuggacuggggugacacaaaacggaaccaguuccgcuugcauccgccgaucuaauagcuccuuuuucucacgucugaacuggcucacgcauuuaaauuuuaaguauccagcacugaacguuacuaugcccaacaaugagcaguucgacaaacuuuacauuuggggcgugcaccauccuggcaccgauaaagaccagaucuuuuuguaugcccagaguagcgggagaauaacagucucuacuaagaggucccaacaggcugugauuccaaacaucggaucacggccccgcauuagaaauaucccuagcaggaucaguauuuacuggaccauaguaaaaccaggugauauccugcuaauuaacucuacaggcaaucucaucgccccgcggggguacuucaagauacgcuccggaaaaagcucgauuaugcgaucugacgcgcccaucggcaaguguaaguccgaaugcaucaccccuaacgguucaauuccaaaugacaaacccuuucagaacguuaauagaaucacguauggggcauguccuagguacgugaagcagaguacucugaaacuugccacaggaaugcggaacgucccagagaagcaaacccguggcauuuucggcgcuauagccggguuuaucgaaaauggaugggaggguaugguggauggcugguauggguuccgccaccagaacagcgagggaagaggccaggcagcugaccugaaauccacucaagccgcgauugaucagaucaaugguaaguugaacaggcucaucgggaaaacaaaugaaaaguuccaccagauugagaaggaauuuucugagguggaaggccggauacaggaccuggagaaauacgucgaggauaccaagaucgacuuauggagcuauaacgccgaacugcucguugcacuugagaaccaacauacgauugaucugaccgacucagaaaugaauaaauuguucgagaagacaaagaagcagcuacgagaaaacgcugaggauaugggaaauggcugcuuuaagaucuaccacaaaugugacaacgccugcauugggaguauccgcaauggaacuuaugaucaugacguguacagagacgaggcucugaacaauagguuccagauaaaggguguagaacucaaauccggcuacaaggauuggauccuguggauuagcuuugccaucucuugcuuccuucuguguguggcauugcucggguuuauuaugugggccugccagaaaggaaacauccgguguaauauaugcauuuga

SEQ ID NO: 139496 - RNA, 1701 nt, Artificial Sequence; identical to SEQ ID NO: 138042
  derived and/or modified CDS sequence (opt3) from hemagglutinin__InfluenzaA__AHL96260

SEQ ID NO: 139497 - RNA, 1701 nt, Artificial Sequence; identical to SEQ ID NO: 137906
  derived and/or modified CDS sequence (opt3) from hemagglutinin__InfluenzaA__AHL96274

SEQ ID NO: 139498 - RNA, 1701 nt, Artificial Sequence; identical to SEQ ID NO: 138042
  derived and/or modified CDS sequence (opt3) from hemagglutinin__InfluenzaA__AHL96304

SEQ ID NO: 139499 - RNA, 1701 nt, Artificial Sequence; identical to SEQ ID NO: 137883
  derived and/or modified CDS sequence (opt3) from hemagglutinin__InfluenzaA__AHL96318

SEQ ID NO: 139500 - RNA, 1701 nt, Artificial Sequence; identical to SEQ ID NO: 138042
  derived and/or modified CDS sequence (opt3) from hemagglutinin__InfluenzaA__AHL96330

SEQ ID NO: 139501 - RNA, 1701 nt, Artificial Sequence; identical to SEQ ID NO: 138045
  derived and/or modified CDS sequence (opt3) from hemagglutinin__InfluenzaA__AHL96342

SEQ ID NO: 139502 - RNA, 1701 nt, Artificial Sequence
  derived and/or modified CDS sequence (opt3) from hemagglutinin__InfluenzaA__AHL96354
augaagaccaucauugcccugagcuacauacucugccuuguguucgcucagaaacugcccggcaacgacaauuccacagcaacuuuguguuuagggcaccaugccgucccuaacggaacgaucguuaagaccauuacaaaugauagaaucgaggugacuaacgcgaccgaacugguacaaaauucuucaauuggugagaucugcgacaguccacaccagauacuagauggcgaaaacuguacacucaucgacgcucugcuuggggauccgcagugcgacggauuucagaauaaaaagugggaucuguucguggagaggagcaaagccuauuccaacuguuaccccuaugacgucccugauuacgcaucuuugcggucgcucguggccucaagcggcacccuggaauuuaauaacgagaguuucaauugggcugguguuacucaaaacgggacauccucugcaugcauucgcggaagcaauuccucauuuuucagucgacugaacuggcucacccauuuaaauuuuaaguauccagcccugaacgugacgaugcccaacaaugagcaguucgacaaguuguacaucuggggcguccaccauccuggcacugauaaagaccagauuuuucuuuaugcucagagcucugggcguaucaccguguccacaaagagaucacaacaggccguaauaccaaacauuggaagcaggccccggauccgcaauauuccuaguagaaucucuaucuacuggacuauuguuaaaccaggugauauacugcuaaucaacuccaccggcaaucucauugcgccgaggggguacuucaagauccggagcggaaaaucgucuauaaugcgcuccgacgcacccauuggcaaguguaagucagaaugcaucacaccuaacgguaguaucccaaaugacaaacccuuucagaacgugaaucgaauuaccuauggggccuguccuagauacgucaagcagagcacgcugaaacuugcuacuggaaugaggaacgugccagagaagcaaacacggggcaucuucggcgccauugcaggguuuauagaaaauggaugggaggguaugguggauggcugguauggguuccgucaccugaacuccgagggacgcggccaggcugccgacuugaaaucuacccaggcggccaucgaucaaauuaaugguaagcucaacagacugaucgggaaaacuaaugaaaaguuccaccagaucgagaaggaauuuagcgaggucgaaggcaggauucaggacuuagagaaauacguugaggauacaaagauagaccuguggucauauaacgcagaacuccuuguggcucuggagaaccagcauaccaucgauuugacggacagugaaaugaauaaacuauucgagaagaccaaaaagcaacugcgggaaaacgccgaggauaugggaaauggcugcuuuaagauuuaccacaaaugugacaacgcuugcaucggguccauucgaaauggaacauaugaucaugacguauaccgcgacgaggcccucaacaauagauuccagaucaaggguguggaacugaaaagcggcuacaaggauuggauacuuuggaucucuuuugcaauuucaugcuuccuguugugugucgcccuccugggguuuaucaugugggcuugccagaaaggaaacauuagguguaauaucugcauauga

SEQ ID NO: 139503 - RNA, 1701 nt, Artificial Sequence
  derived and/or modified CDS sequence (opt3) from hemagglutinin__InfluenzaA__AHL96366
augaagaccaucauugcccugagcuacauacucugccuuguguucgcucagaaacugcccgagaacgacaauuccacagcaacuuuguguuuaggccaccaugccgucccuaacgggacgaucguuaagaccauuacaaaugauagaaucgaagugacuaacgcgaccgagcugguacaaaauucuucaauuggagaaaucugcgacaguccacaccagauacuagauggugagaacuguacacucaucgacgcucugcuuggcgauccgcagugcgacggguuucagaauaaaaagugggaucuguucguggaaaggagcaaagccuauuccaacuguuaccccuaugacgucccugauuacgcaucuuugcggucgcucguggccucaagcggaacccuggaguuuaauaacgagaguuucaauugggcuggcguuacucaaaacgguacauccucugcaugcauucgcgggagcaauuccucauuuuucagucgacugaacuggcucacccauuuaaauuuuaaguauccagcccugaacgugacgaugcccaacaaugaacaguucgacaaguuguacaucuggggaguccaccauccuggcacugauaaagaccagauuuuucuuuaugcucagagcucuggccguaucaccguguccacaaagagaucacaacaggccguaauaccaaacauugggagcaggccccggauccgcaauauuccuaguagaaucucuaucuacuggacuauuguuaaaccaggagauauacugcuaaucaacuccaccgguaaucucauugcgccgaggggcuacuucaagauccggagcgggaaaucgucuauaaugcgcuccgacgcacccauuggaaaguguaagucagagugcaucacaccuaacggcaguaucccaaaugacaaacccuuucagaacgugaaucgaauuaccuauggugccuguccuagauacgucaagcagagcacgcugaaacuugcuacugggaugaggaacgugccagaaaagcaaacacggggaaucuucggcgccauugcaggcuuuauagagaaugggugggagggaaugguggaugguugguauggcuuccgucaccagaacuccgaagggcgcggacaggcugccgaccugaaaucuacccaagcggccaucgaucagauuaauggcaaguugaacagacucaucgguaaaacuaaugagaaguuccaccagaucgaaaaggaguuuagcgaagucgaggggaggauucaggaccuggagaaauacguugaagauacaaagauagacuuauggucauauaacgcagagcugcucguggcucuugaaaaccaacauaccaucgaucugacggacagugagaugaauaaauuguucgaaaagaccaaaaagcagcuacgggagaacgccgaggauaugggcaauggaugcuuuaagauuuaccacaaaugugacaacgcuugcaucggcuccauucgaaaugggacauaugaucaugacguauaccgcgacgaagcccugaacaauagauuccagaucaagggaguggagcucaaaagcgguuacaaggauuggauacuguggaucucuuuugcaauuucaugcuuccuucugugugucgccuugcucggcuuuaucaugugggcuugccagaaagggaacauuagguguaauaucugcauauga

SEQ ID NO: 139504 - RNA, 1701 nt, Artificial Sequence; identical to SEQ ID NO: 137916
  derived and/or modified CDS sequence (opt3) from hemagglutinin__InfluenzaA__AHL96378

SEQ ID NO: 139505 - RNA, 1701 nt, Artificial Sequence; identical to SEQ ID NO: 137906
  derived and/or modified CDS sequence (opt3) from hemagglutinin__InfluenzaA__AHL96390

SEQ ID NO: 139506 - RNA, 1701 nt, Artificial Sequence
  derived and/or modified CDS sequence (opt3) from hemagglutinin__InfluenzaA__AHL96402
augaagaccaucauugcccugagcuacauacucugccuuguguucgcucagaaaauccccggcaacgacaauuccacagcaacucuguguuuggggcaccaugccgucccuaacggaacgauuguuaagaccaucacaaaugauagaauugaggugacuaacgcgaccgaauuaguacaaaauucuucaaucggugagauaugcgacaguccacaccagauccuggauggcgaaaacuguacacuaauugacgcucuccugggggauccgcagugcgacggauuucagaauaaaaagugggaucuuuucguggagaggagcaaagccuauuccaacuguuaccccuaugacgucccugauuacgcaucucugcggucguugguggccucaagcggcacccucgaauuuaauaacgagaguuucaauuggacugguguuacacaaaacgggaccuccucugcuugcauccgcggaagcaauuccucauuuuucagucgacugaacuggcugacgcaucucaauuuuaaguauccagcauuaaacgugacuaugcccaacaaugagcaguucgacaagcuguacauuuggggcguccaccauccuggcaccgauaaagaccagaucuuucuuuaugcccagagcucugggcguauaacaguguccacuaagagaucacaacaggcuguaauuccaaacaucggaagcaggccccggauucgcaauaucccuaguagaaucucuauuuacuggaccauaguuaaaccaggugauaucuugcugauuaacuccacaggcaaucuaaucgccccgaggggguacuucaagauacggagcggaaaaucgucuauuaugcgcuccgacgcgcccaucggcaaguguaagucagaaugcaucaccccuaacgguaguauuccaaaugacaaacccuuucagaacgugaaucgaaucacguauggggcauguccuagauacgucaagcagagcacucucaaacuggccacaggaaugaggaacgugccagagaagcaaacccggggcauuuucggcgcuauagccggguuuaucgaaaauggaugggaggguaugguggauggcugguauggguuccgucaccagaacuccgagggacgcggccaggcagcugaccuuaaaucuacucaagccgcgauugaucagaucaaugguaagcugaacagauugaucgggaaaacaaauaagaaguuccaccagauugaaaaagaguuuagcgaagucgagggcaggauacaggaccucgaaaaguacguugaggauaccaaaaucgaccuguggucauauaacgccgaguuacugguggcacucgaaaaccaacauacgauugaucuuaccgacagugagaugaauaagcuguucgaaaagacaaagaagcaguugcgggagaacgcugaagauaugggaaauggcugcuuuaaaaucuaccacaagugugacaacgccugcauuggguccauccgaaauggaacuuaugaucaugacguauaccgcgacgaggcucuaaacaauagauuccagauaaaagguguggagcugaaaagcggcuacaaagauuggauccucuggauuucuuuugccaucucaugcuuccugcuuugugucgcacuguugggguuuauuaugugggccugccagaagggaaacaucagguguaauauaugcauuuga

SEQ ID NO: 139507 - RNA, 1701 nt, Artificial Sequence; identical to SEQ ID NO: 137916
  derived and/or modified CDS sequence (opt3) from hemagglutinin__InfluenzaA__AHL96414

SEQ ID NO: 139508 - RNA, 1701 nt, Artificial Sequence; identical to SEQ ID NO: 138042
  derived and/or modified CDS sequence (opt3) from hemagglutinin__InfluenzaA__AHL96426

SEQ ID NO: 139509 - RNA, 1701 nt, Artificial Sequence
  derived and/or modified CDS sequence (opt3) from hemagglutinin__InfluenzaA__AHL96438
augaagaccaucauugcccugagcuacauacucugccuuguguucgcucaggagcugcccggcaacgacgauuccacagcaacuuuguguuuagggcaccaugccgucccuaauggaacgaucguuaaaaccauuacaaacgaccaaaucgaagugacuaaugcgaccgagcugguacagucuucaaguacaggugaaauuugcaacagcccacaccagauccuagauggcgagaauuguacccucauagacgcucugcuuggggauccgcagugcgacggauuucaaaacaagaaaugggaucuguucguggaaagauccaaggcccauucuaauuguuaucccuacgacgucccugauuaugcaucguugaggucacucguggccagcaguggcacucuggaguuuaacaaugaguccuucaacuggacagguguuacccagaaugggacgucuagcgcuugcauccggcgcuccaacaauucauuuuucagucgacugaacuggcucacucacuuaaauuuuaaauacccagcacugaacgugaccaugcccaacaaugaacaguucgacaaacuuuauauuuggggaguccaucacccuggcacagauaaggaccagaucuuuuuguacgcccaagcuagcggccguauuacugugucuaccaagagaucccagcaggccguaaucccaaacauagggucaaggccccggguucgcaauauuccuagcagagugaguaucuauuggacaauugucaagccaggagauauccugcuaaucaacucuaccgguaaucucauugcgccgaggggcuacuucaaaauacgguccggaaagagcucgaucaugcgcucugacgcacccauugggaaauguuccucagccugcaucacgccuaacggcaguauaccaaaugacaagcccuuucagaacgugaaucgaauuacuuacggugcuuguccuagauaugugaagcaaaacacacugaaacuugccaccgggaugaggaaugucccagagaagcagacucggggaaucuucggcgcaaucgcuggcuuuauugaaaacgggugggagggaaugguugaugguugguacggcuuccgucaccagaauagcgaggggcgcggacaagccgcggaccugaaauccacacaggccgcaaucgaucagauuaacggcaaguugaauagacucauagguaaaaccaacgaaaaguuccaucagaucgagaaagaauuuucugagguggaagggaggauucaagaccuggagaaguauguagaggauacgaagaucgacuuauggagcuacaacgcugaacugcucguggcccuugagaaucagcacaccaucgaucugacagacucagaaaugaacaaauuguucgagaagacuaaaaagcagcuacgggaaaaugcugaggauaugggcaacggaugcuuuaaaauuuaucauaagugugacaaugccugcauaggcaguauccgaaacgggaccuacgaucacgacgucuaucgcgacgaggcacugaauaacagauuccagauuaagggaguggaacucaaauccgguuacaaggauuggauccuguggauuagcuuugccaucucuugcuuccuucuguguguugcuuugcucggcuuuauaaugugggcgugccaaaaagggaauaucagguguaacauuugcaucuga

SEQ ID NO: 139510 - RNA, 1701 nt, Artificial Sequence; identical to SEQ ID NO: 137916
  derived and/or modified CDS sequence (opt3) from hemagglutinin__InfluenzaA__AHL96450

SEQ ID NO: 139511 - RNA, 1701 nt, Artificial Sequence; identical to SEQ ID NO: 138042
  derived and/or modified CDS sequence (opt3) from hemagglutinin__InfluenzaA__AHL96462

SEQ ID NO: 139512 - RNA, 1701 nt, Artificial Sequence
  derived and/or modified CDS sequence (opt3) from hemagglutinin__InfluenzaA__AHL96474
augaaggccauccugguggucaugcucuacaccuucgcuacagcaaacgccgacacucuuugcauuggcuaucacgcgaauaacagcacggauaccguugacacagugcuggagaaaaauguaacugugacccauuccgucaacuuguuagaagauaagcacaaugggaaacuguguaagcuaagaggagugucuccccuccaucuggguaaaugcaacauagcuggcuggauccuugggaauccugagugugaaucacugaguacagccagcuccuggucuuacauuguugagaccucgggaucagacaacggcacuugcuauccaggugauuuuaucgacuacgaagaguugagggagcagcucagcaguguguccucuuucgaacgguuugagauuuucccgaagacaagcuccuggcccaaucacgauucaaacaagggggucaccgcagccuguccucaugcuggagcaaaaggcuuuuauaagaaucugaucuggcuggugaaaaagggcaacaguuacccaaaacucagcauaucuuauaucaaugacaaggggaaggaaguauuaguucugugggguauucaccaccccuccacgacugccgaucaacagucacuuuaccagaacgcugacaccuacguguucgucggaacaagccgcuauaguaaaaaguuuaaaccugagaucgccauucgaccaaaggugcgugaucaggagggcagaaugaauuacuauuggacuuugguggaacccggggacaaaaucaccuucgaggcgacaggaaaccuggucguuccuagguacgcauuugccauggaacggaacgcuggcucugguauaauuaucuccgauaccccagugcaugacugcaauacgacuugucaaacaccgaagggggccauuaacaccagccuacccuuccagaauauccacccuaucacuauuggaaaaugcccaaaguauguaaagucgacaaaacuccgccuggcaaccggccuuagaaacgugcccucuauacaguccaggggccuguuuggggcuaucgccggauucauugaggguggcuggacggggauggucgacggaugguacggcuaucaucaccagaaugaacaagguucaggguacgcggccgauuugaagaguacccagaacgcaaucgacaaaauaacaaauaaggugaacagcguuauugagaaaaugaauacucaguuuaccgcugugggcaaggaguucaaccaccucgaaaagcggaucgagaaucugaacaaaaaggucgaugacggauucuuagauaucuggacauacaaugccgaacugcucgugcuucuggagaacgaacgcacuuuggacuaucaugauuccaauguuaaaaaccuauacgagaagguacgaaaccagcugaaaaauaacgcuaaggagauuggcaauggguguuuugaguucuaucacaagugcgacaacaccuguauggaaucugugaaaaauggaacauacgauuauccuaaguacagcgaagaggccaaacucaacagagaagagaucgacggugucaagcuggagucaaccaggauuuaucaaauacuugcaaucuacaguacugccgcuuccagccugguguuggucgugucucucggcgcgauuucauuuuggaugugcaguaaugggagccugcagugccggaucuguaucuga

SEQ ID NO: 139513 - RNA, 1701 nt, Artificial Sequence
  derived and/or modified CDS sequence (opt3) from hemagglutinin__InfluenzaA__AHL96485
augaagaccaucauugcccugagcuacauacucugccuuguguucgcucagaaacugcccggcaacgacaauuccacagcaacuuuguguuuagggcaccaugccgucccuaacggaacgaucguuaagaccauuacaaaugauagaaucgaggugacuaacgcgaccgaacugguacaaaauucuucaauuggugagaucugcgacaguccacaccagauacuagauggcgaaaacuguacacucaucgacgcucugcuuggggauccgcagugcgacggauuucagaauaaaaagugggaucuguucguggagaggagcaaagccuauuccaacuguuaccccuaugacgucccugauuacgcaucuuugcggucgcucguggccucaagcggcacccuggaauuuaauaacgagaguuucaauuggacugguguuacacaaaacgggaccuccucugcuugcauucgccgaagcaauuccucauuuuucagucgucugaacuggcucacgcauuuaaauuuuaaguauccagcacugaacgugacuaugcccaacaaugagcaguucgacaaguuguacaucuggggaguccaccauccuggcaccgauaaagaccagauuuuucuuuaugcccagagcucuggcagaaucacaguguccacuaagaggucacaacaggcuguaauaccaaacauugggagccggccccgcaucagaaauauuccuaguaggaucucuaucuacuggaccauuguuaaaccaggagauauacugcuaaucaacuccacagguaaucucauugccccgcggggcuacuucaagauccgcagcgggaaaucgucuauaaugaaguccgacgcgcccauuggaaaguguaaaucagaaugcaucaccccuaacggcaguaucccaaaugacaagcccuuucagaacgugaaucgaauuacguauggugcauguccuagauacgucaaacagagcacucugaaacuugccacagggaugaggaacgugccagagaagcaaacccggggaaucuucggcgcuauugccggcuuuauagaaaaugggugggagggaaugguggaugguugguauggcuuccgucaccagaacuccgaggggcgcggacaggcagcugaccugaagucuacucaagccgcgaucgaucagauuaauggcaaauugaacagacucaucgguaagacaaaugaaaaguuccaccagaucgagaaagaauuuagcgaggucgaagggaggauucaggaccuggagaaguacguugaggauaccaaaauagacuuauggucauauaacgccgaacugcucguggcacuugagaaccaacauacgaucgaucugaccgacagugaaaugaauaaguuguucgagaaaacaaagaagcagcuacgggaaaacgcugaggauaugggcaauggaugcuuuaaaauuuaccacaagugugacaacgccugcaucggcuccauucgaaaugggacuuaugaucauaacguauaccgcgacgaggcucugaauaacagauuccagaucaaaggaguggaacucaagagcgguuacaaagacuggauacuguggaucucuuuugccauuucaugcuuccuucugugugucgcauugcucggcuuuaucaugugggccugccagaaggggaauauuagguguaacaucugcauauga

SEQ ID NO: 139514 - RNA, 1701 nt, Artificial Sequence; identical to SEQ ID NO: 138042
  derived and/or modified CDS sequence (opt3) from hemagglutinin__InfluenzaA__AHL96497

SEQ ID NO: 139515 - RNA, 1701 nt, Artificial Sequence; identical to SEQ ID NO: 137916
  derived and/or modified CDS sequence (opt3) from hemagglutinin__InfluenzaA__AHL96509

SEQ ID NO: 139516 - RNA, 1701 nt, Artificial Sequence; identical to SEQ ID NO: 137883
  derived and/or modified CDS sequence (opt3) from hemagglutinin__InfluenzaA__AHL96521

SEQ ID NO: 139517 - RNA, 1701 nt, Artificial Sequence; identical to SEQ ID NO: 138042
  derived and/or modified CDS sequence (opt3) from hemagglutinin__InfluenzaA__AHL96533

SEQ ID NO: 139518 - RNA, 1701 nt, Artificial Sequence; identical to SEQ ID NO: 137906
  derived and/or modified CDS sequence (opt3) from hemagglutinin__InfluenzaA__AHL96545

SEQ ID NO: 139519 - RNA, 1701 nt, Artificial Sequence
  derived and/or modified CDS sequence (opt3) from hemagglutinin__InfluenzaA__AHL96569
augaagaccaucauugcccugagcuacauacucugccuuguguucgcucagaaacugcccggcaacgacaauuccacagcaacuuuguguuuagggcaccaugccgucccuaacggaacgaucguuaagaccauuacaaaugauagaaucgaggugacuaacgcgaccgaacugguacaaaauucuucaauuggugagaucugcgacaguccacaccagauacuagauggcgaaaacuguacacucaucgacgcucugcuuggggauccgcagugcgacggauuucagaauaaaaagugggaucuguucguggagaggagcaaagccuauuccaacuguuaccccuaugacgucccugauuacgcaucuuugcggucgcucguggccucaagcggcacccuggaauuuaauaacgagaguuucaauuggacugguguuacacaaaacgggaccuccucugcuugcauucgccgaagcaauuccucauuuuucagucgucugaacuggcucacgcauuuaaauuuuaaguauccagcacugaacgugacuaugcccaacaaugagcaguucgacaaacuuuacaucuggggaguccaccauccuggcaccgauaaagaccagaucuuuuuguaugcccagagcucuggcagagugacaguauccacuaagaggucacaacaggcuguuauuccaaacauagggagccggccccgcauuagaaauaucccuaguaggauuucuaucuacuggaccaucgugaaaccaggagauauucugcuaauaaacuccacagguaaucucaucgccccgcggggcuacuucaagauucgcagcgggaaaucgucuaucaugcgauccgacgcgcccauaggaaaguguaagucagaaugcauuaccccuaacggcaguaucccaaaugacaaacccuuucagaacgucaauagaaucacguauggugcauguccuagguacgugaagcagagcacucugaaacuugccacagggaugcggaacgugccagagaagcaaacccguggaauuuucggcgcuaucgccggcuuuauugaaaaugggugggagggaauggucgaugguugguauggcuuccgccaccagaacuccgaggggagaggacaggcagcugaccugaaaucuacucaagccgcgauagaucagaucaauggcaaguugaacaggcucauugguaaaacaaaugaaaaguuccaccagaucgagaaggaauuuagcgagguugaagggcggauccaggaccuggagaaauacguggaggauaccaagauugacuuauggucauauaacgccgaacugcucguagcacuugagaaccaacauacgauagaucugaccgacagugaaaugaauaaauuguucgagaagacaaagaagcagcuacgagaaaacgcugaggauaugggcaauggaugcuuuaagaucuaccacaaaugugacaacgccugcauuggcuccauccgcaaugggacuuaugaucaugacguguacagagacgaggcucugaacaauagguuccagauuaagggagucgaacucaaaagcgguuacaaggauuggauccuguggauaucuuuugccaucucaugcuuccuucuguguguggcauugcucggcuuuauuaugugggccugccagaaagggaacauccgguguaauauuugcaucuga

SEQ ID NO: 139520 - RNA, 1701 nt, Artificial Sequence; identical to SEQ ID NO: 139512
  derived and/or modified CDS sequence (opt3) from hemagglutinin__InfluenzaA__AHL96581

SEQ ID NO: 139521 - RNA, 1701 nt, Artificial Sequence
  derived and/or modified CDS sequence (opt3) from hemagglutinin__InfluenzaA__AHL96592
augaagaccaucauugcccugggcuacauacucugccuuguguucgcucagaaaauccccgggaacgacaauagcacagcaacucuguguuugggacaccaugccgucccuaacgguacgauuguuaagaccaucacaaaugauagaauugaggugacuaacgcgaccgaauuaguacaaaauuccucuaucggcgagauaugcgacucaccacaccagauccuggauggggaaaacuguacacuaauugacgcucuccugggagauccgcagugcgacggcuuucagaauaaaaagugggaucuuuucaucgagaggaguaaagccuauagcaacuguuaccccuaugacgugccugauuacgcaucccugcggucuuuggucgccucgucagguacccucgaauuuaauaacgagagcuucaauuggacuggggugacacaaaacggaaccaguuccgcuugcauucgccgaucuaauagcuccuuuuucucacgucugaacuggcugacgcaucucaauuuuaaguauccagcauuaaacguuacuaugcccaacaaugagcaguucgacaagcuguacaucuggggcgugcaccauccuggcaccgauaaagaccagauauuucuuuaugcccagaguagcgggagaauuacagucucuacuaagaggucccaacaggcugugaucccaaacauuggaucacggccccgcaucagaaauaucccuagcaggauuaguauauacuggaccaucguaaaaccaggugauauuuugcugaucaacucuacaggcaaucuaauagccccgcggggguacuucaagauucgcuccggaaaaagcucgaucaugcgaucugacgcgcccaucggcaaguguaaguccgaaugcauuaccccuaacgguucaaucccaaaugacaaacccuuucagaacguuaauagaauuacguauggggcauguccuagguacgugaagcagaguacucucaaacuggccacaggaaugcggaacgucccagagaagcaaacccguggcauauucggcgcuaucgccggguuuauugaaaauggaugggaggguaugguggauggcugguauggguuccgccaccagaacagcgagggaagaggccaggcagcugaccuuaaauccacucaagccgcgaucgaucagaucaaugguaagcugaacagguugauugggaaaacaaaugaaaaguuccaccagauagagaaggaauuuucugagguggaaggccggauccaggaccucgagaaauacgucgaggauaccaagauugaccuguggagcuauaacgccgaauuacugguugcacucgagaaccaacauacgaucgaucuuaccgacucagaaaugaauaaacuguucgagaagacuaaaaagcaguugcgagaaaacgcugaggauaugggaaauggcugcuuuaagauuuaccacaaaugugacaacgccugcaucgggaguauacgcaauggaacauaugaucaugacguguacagagacgaggcucuaaacaauagguuccagaucaaggguguagaacugaaauccggcuacaaggauuggauucucuggaucagcuuugccauuucuugcuuccugcuuuguguggcacuguugggguuuaucaugugggccugccagaaaggaaacauacgguguaauauuugcaucuga

SEQ ID NO: 139522 - RNA, 1701 nt, Artificial Sequence; identical to SEQ ID NO: 138042
  derived and/or modified CDS sequence (opt3) from hemagglutinin__InfluenzaA__AHL96604

SEQ ID NO: 139523 - RNA, 1701 nt, Artificial Sequence; identical to SEQ ID NO: 138042
  derived and/or modified CDS sequence (opt3) from hemagglutinin__InfluenzaA__AHL96616

SEQ ID NO: 139524 - RNA, 1701 nt, Artificial Sequence
  derived and/or modified CDS sequence (opt3) from hemagglutinin__InfluenzaA__AHL96628
augaagaccaucauugcccugagcuacauacucugccuuguguucgcucagaaacugcccggcaacgacaauuccacagcaacuuuguguuuagggcaccaugccgucccuaacggaacgaucguuaagaccauuacaaaugauagaaucgaggugacuaacgcgaccgaacugguacaaaauucuucaauuggugagaucugcgacaguccacaccagauacuagauggcgaaaacuguacacucaucgacgcucugcuuggggauccgcagugcgacggauuucagaauaaaaagugggaucuguucguggagaggagcaaagccuauuccaacuguuaccccuaugacgucccugauuacgcaucuuugcggucgcucguggccucaagcggcacccuggaauuuaauaacgagaguuucaauuggacugguguuacacaaaacgggaccuccucugcuugcauucgccgaagcaauuccucauuuuucagucgucugaacuggcucacgcauuuaaauuuuaaguauccagcacugaacgugacuaugcccaacaaugagcaguucgacaaacuuuacaucuggggaguccaccauccuggcaccgauaaagaccagaucuuuuuguaugcccagagcucuggcagaauuacaguguccacuaagaggucacaacaggcuguaauaccaaacauugggagccggccccgcaucagaaauauuccuaguaggaucucuaucuacuggaccauuguuaaaccaggagauauacugcuaaucaacuccacagguaaucucauugccccgcggggcuacuucaagauccgcagcgggaaaucgucuauaaugcgauccgacgcgcccauuggaaaguguaagucagaaugcaucaccccuaacggcaguaucccaaaugacaaacccuuucagaacgugaauagaauuacguauggugcauguccuagguacgucaagcagagcacucugaaacuugccacagggaugcggaacgugccagagaagcaaacccguggaaucuucggcgcuauugccggcuuuauagaaaauggguggggagguaugguggauggcugguauggguuccgccaccagaacuccgagggaagaggccaggcagcugaccugaaaucuacucaagccgcgaucgaucagauuaaugguaaguugaacaggcucaucgggaaaacaaaugagaaguuccaccagaucgaaaaggaguuuagcgaagucgagggccggauucaggaccuggaaaaauacguugaggauaccaagauagacuuauggucauauaacgccgagcugcucguggcacuugaaaaccaacauacgaucgaucugaccgacagugagaugaauaaauuguucgaaaagacaaagaagcagcuacgagagaacgcugaagauaugggaaauggcugcuuuaagauuuaccacaaaugugacaacgccugcaucggguccauucgcaauggaacuuaugaucauaacguauacagagacgaggcucugaauaacagguuccagaucaaggguguggagcucaaaagcggcuacaaggacuggauacuguggaucucuuuugccauuucaugcuuccuucugugugucgcauugcucggguuuaucaugugggccugccagaaaggaaauauucgguguaacaucugcauauga

SEQ ID NO: 139525 - RNA, 1701 nt, Artificial Sequence; identical to SEQ ID NO: 139513
  derived and/or modified CDS sequence (opt3) from hemagglutinin__InfluenzaA__AHL96640

SEQ ID NO: 139526 - RNA, 1701 nt, Artificial Sequence
  derived and/or modified CDS sequence (opt3) from hemagglutinin__InfluenzaA__AHL96652
augaagaccaucauugcccugagcuacauacucugccuuguguucgcucagaaacugcccggcaacgacaauuccacagcaacuuuguguuuagggcaccaugccgucccuaacggaacgaucguuaagaccauuacaaaugauagaaucgaggugacuaacgcgaccgaacugguacaagacucuucaauuggugagaucugcgauaguccacaccagauacuagacggcgaaaauuguacacucaucgaugcucugcuuggggacccgcagugcgauggauuucagaacaaaaagugggaccuguucguggagaggagcaaagccuauuccaauuguuaccccuaugaugucccugacuacgcaucuuugcggucgcucguggccucaagcggcacccuggaauuuaacaaugagaguuucaacugggcugguguuacucaaaaugggacauccucugcaugcauucgcggaagcaacuccucauuuuucagucgacugaauuggcucacccauuuaaacuuuaaguauccagcccugaaugugacgaugcccaacaacgagcaguucgauaaguuguacaucuggggcguccaccauccuggcacugacaaagaucagauuuuucuuuaugcucagagcucugggcguaucaccguguccacaaagagaucacaacaggccguaauaccaaauauuggaagcaggccccggauccgcaacauuccuaguagaaucucuaucuacuggacuauuguuaaaccaggugacauacugcuaaucaauuccaccggcaaccucauugcgccgaggggguacuucaagauccggagcggaaaaucgucuauaaugcgcuccgacgcacccauuggcaaguguaagucagaaugcaucacaccuaaugguaguaucccaaacgauaaacccuuucagaaugugaaccgaauuaccuauggggccuguccuagauacgucaagcagagcacgcugaaacuugcuacuggaaugaggaaugugccagagaagcaaacacggggcaucuucggcgccauugcaggguuuauagaaaacggaugggaggguaugguggacggcugguauggguuccgucaccaaaauuccgagggacgcggccaggcugccgaucugaaaucuacccaggcggccaucgaccagauuaacgguaaguugaauagacucaucgggaaaacuaacgaaaaguuccaccagaucgagaaggaauuuagcgaggucgaaggcaggauucaggaucuggagaaauacguugaggacacaaagauagauuuauggucauauaaugcagaacugcucguggcucuugagaaccaacauaccaucgaccugacggauagugaaaugaacaaauuguucgagaagaccaaaaagcagcuacgggaaaaugccgaggacaugggaaacggcugcuuuaagauuuaccacaaaugugauaaugcuugcaucggguccauucgaaacggaacauaugaccaugacguauaccgcgaugaggcccugaauaacagauuccagaucaaggguguggaacucaaaagcggcuacaaggacuggauacuguggaucucuuuugcaauuucaugcuuccuucugugugucgccuugcucggguuuaucaugugggcuugccagaaaggaaauauuagguguaacaucugcauauga

SEQ ID NO: 139527 - RNA, 1701 nt, Artificial Sequence; identical to SEQ ID NO: 138515
  derived and/or modified CDS sequence (opt3) from hemagglutinin__InfluenzaA__AHL96664

SEQ ID NO: 139528 - RNA, 1701 nt, Artificial Sequence
  derived and/or modified CDS sequence (opt3) from hemagglutinin__InfluenzaA__AHL96676
augaagaccaucauugcccugagcuacauacucugccuuguguucgcucagaaacugcccggcaacgacaauuccacagcaacuuuguguuuagggcaccaugccgucccuaacggaacgaucguuaagaccauuacaaaugauagaaucgaggugacuaacgcgaccgaacugguacaaaauucuucaauuggugagaucugcgacaguccacaccagauacuagauggcgaaaacuguacacucaucgacgcucugcuuggggauccgcagugcgacggauuucagaauaaaaagugggaucuguucguggagaggagcaaagccuauuccaacuguuaccccuaugacgucccugauuacgcaucuuugcggucgcucguggccucaagcggcacccuggaauuuaauaacgagaguuucaauuggacugguguuacacaaaacgggaccuccucugcuugcauucgccgaagcaauuccucauuuuucagucgucugaacuggcucacgcauuuaaauuuuaaguauccagcacugaacgugacuaugcccaacaaugagcaguucgacaaacuuuacaucuggggaguccaccauccuggcaccgauaaagaccagaucuuuuuguaugcccagagcucuggcagaauuacaguguccacuaagaggucacaacaggcuguaauaccaaacauugggagccggccccgcaucagaaauauuccuaguaggaucucuaucuacuggaccauuguuaaaccaggagauauacugcuaaucaacuccacagguaaucucauugccccgcggggcuacuucaagauccgcagcgggaaaucgucuauaaugcgauccgacgcgcccauuggaaaguguaagucagaaugcaucaccccuaacggcaguaucccaauugacaaacccuuucagaaugugaacagaaucacguauggugcauguccuagguacgucaagcagagcacucugaaacuugccacagggaugcggaaugugccagagaagcaaacccguggaauuuucggcgcuauagccggcuuuaucgaaaacgggugggagggaaugguggaugguugguauggcuuccgccaccaaaauuccgaggggagaggacaggcagcugaccugaaaucuacucaggccgcgauugaucagaucaacggcaaguugaauaggcucaucgguaaaacaaacgaaaaguuccaccagauugagaaggaauuuagcgaggucgaagggcggauacaggaccuggagaaauacguugaggauaccaagaucgacuuauggucauauaaugccgaacugcucguggcacuugagaaccaacauacgauugaucugaccgacagugaaaugaacaaauuguucgagaagacaaagaagcagcuacgagaaaaugcugaggauaugggcaacggaugcuuuaagaucuaccacaaaugugacaaugccugcauuggcuccauccgcaacgggacuuaugaucaugacguauacagagacgaggcucugaauaacagguuccagauaaagggaguggaacucaaaagcgguuacaaggauuggauccuguggauuucuuuugccaucucaugcuuccuucugugugucgcauugcucggcuuuauuaugugggccugccagaaagggaauauccgguguaacauaugcauuuga

SEQ ID NO: 139529 - RNA, 1701 nt, Artificial Sequence; identical to SEQ ID NO: 138042
  derived and/or modified CDS sequence (opt3) from hemagglutinin__InfluenzaA__AHL96688

SEQ ID NO: 139530 - RNA, 1701 nt, Artificial Sequence; identical to SEQ ID NO: 138042
  derived and/or modified CDS sequence (opt3) from hemagglutinin__InfluenzaA__AHL96700

SEQ ID NO: 139531 - RNA, 1701 nt, Artificial Sequence; identical to SEQ ID NO: 138042
  derived and/or modified CDS sequence (opt3) from hemagglutinin__InfluenzaA__AHL96712

SEQ ID NO: 139532 - RNA, 1701 nt, Artificial Sequence; identical to SEQ ID NO: 137916
  derived and/or modified CDS sequence (opt3) from hemagglutinin__InfluenzaA__AHL96724

SEQ ID NO: 139533 - RNA, 1701 nt, Artificial Sequence; identical to SEQ ID NO: 137906
  derived and/or modified CDS sequence (opt3) from hemagglutinin__InfluenzaA__AHL96748

SEQ ID NO: 139534 - RNA, 1701 nt, Artificial Sequence; identical to SEQ ID NO: 137916
  derived and/or modified CDS sequence (opt3) from hemagglutinin__InfluenzaA__AHL96784

SEQ ID NO: 139535 - RNA, 1701 nt, Artificial Sequence
  derived and/or modified CDS sequence (opt3) from hemagglutinin__InfluenzaA__AHL96796
augaagaccaucauugcccugagcuacauacucugccuuguguucgcucagaaacugcccggcaacgacaauuccacagcaacuuuguguuuagggcaccaugccgucccuaacggaacgaucguuaagaccauuacaaaugauagaaucgaggugacuaacgcgaccgaacugguacaaaauucuucaauuggugagaucugcgacaguccacaccagauacuagauggcgaaaacuguacacucaucgacgcucugcuuggggauccgcagugcgacggauuucagaauaaaaagugggaucuguucauugagaggagcaaagccuauuccaacuguuaccccuaugacgugccugauuacgcaucuuugcggucgcucgucgccucaagcggcacccuggaauuuaauaacgagaguuucaauuggacuggugugacacaaaacgggaccuccucugcuugcauccgccgaagcaauuccucauuuuucagucgucugaacuggcucacgcauuuaaauuuuaaguauccagcacugaacguuacuaugcccaacaaugagcaguucgacaaacuuuacauuuggggagugcaccauccuggcaccgauaaagaccagaucuuuuuguaugcccagagcucuggcagaauaacagucuccacuaagaggucacaacaggcugugauuccaaacaucgggagccggccccgcauuagaaauaucccuaguaggaucucuauuuacuggaccauaguaaaaccaggagauauccugcuaauuaacuccacagguaaucucaucgccccgcggggcuacuucaagauacgcagcgggaaaucgucuauuaugcgauccgacgcgcccaucggaaaguguaagucagaaugcaucaccccuaacggcaguauuccaaaugacaaacccuuucagaacguuaauagaaucacguauggugcauguccuagguacgugaagcagagcacucugaaacuugccacagggaugcggaacgucccagagaagcaaacccguggaauuuucggcgcuauagccggcuuuaucgaaaaugggugggagggaaugguggaugguugguauggcuuccgccaccagaacuccgaggggagaggacaggcagcugaccugaaaucuacucaagccgcgauugaucagaucaauggcaaguugaacaggcucaucgguaaaacaaaugaaaaguuccaccagauugagaaggaauuuagcgagguggaagggcggauacaggaccuggagaaauacgucgaggauaccaagaucgacuuauggucauauaacgccgaacugcucguugcacuugagaaccaacauacgauugaucugaccgacagugaaaugaauaaauuguucgagaagacaaagaagcagcuacgagaaaacgcugaggauaugggcaauggaugcuuuaagaucuaccacaaaugugacaacgccugcauuggcuccauccgcaaugggacuuaugaucaugacguguacagagacgaggcucugaacaauagguuccagauaaagggaguagaacucaaaagcgguuacaaggauuggauccuguggauuucuuuugccaucucaugcuuccuucuguguguggcauugcucggcuuuauuaugugggccugccagaaagggaacauccgguguaauauaugcauuuga

SEQ ID NO: 139536 - RNA, 1701 nt, Artificial Sequence; identical to SEQ ID NO: 137906
  derived and/or modified CDS sequence (opt3) from hemagglutinin__InfluenzaA__AHL96808

SEQ ID NO: 139537 - RNA, 1701 nt, Artificial Sequence; identical to SEQ ID NO: 137906
  derived and/or modified CDS sequence (opt3) from hemagglutinin__InfluenzaA__AHL96820

SEQ ID NO: 139538 - RNA, 1701 nt, Artificial Sequence; identical to SEQ ID NO: 137916
  derived and/or modified CDS sequence (opt3) from hemagglutinin__InfluenzaA__AHL96832

SEQ ID NO: 139539 - RNA, 1701 nt, Artificial Sequence; identical to SEQ ID NO: 137916
  derived and/or modified CDS sequence (opt3) from hemagglutinin__InfluenzaA__AHL96844

SEQ ID NO: 139540 - RNA, 1701 nt, Artificial Sequence; identical to SEQ ID NO: 137916
  derived and/or modified CDS sequence (opt3) from hemagglutinin__InfluenzaA__AHL96856

SEQ ID NO: 139541 - RNA, 1701 nt, Artificial Sequence
  derived and/or modified CDS sequence (opt3) from hemagglutinin__InfluenzaA__AHL96868
augaagaccaucauugcccugagcuacauacucugccuuguguucgcucagaaacugcccggcaacgacaauuccacagcaacuuuguguuuagggcaccaugccgucccuaacggaacgaucguuaagaccauuacaaaugauagaaucgaggugacuaacgcgaccgaacugguacaaaauucuucaauuggugagaucugcgacaguccacaccagauacuagauggcgggaacuguacacucaucgacgcucugcuuggagauccgcagugcgacggcuuucagaauaaaaagugggaucuguucguggaaaggagcaaagccuauuccaacuguuaccccuaugacgucccugauuacgcaucuuugcggucgcucguggccucaagcgguacccuggaguuuaauaacgaaaguuucaauuggacugggguuacacaaaacggaaccuccucugcuugcauucgccgaagcaauuccucauuuuucagucgucugaacuggcucacgcauuuaaauuuuaaguauccagcacugaacgugacuaugcccaacaaugagcaguucgacaaacuuuacaucuggggcguccaccauccuggcaccgauaaagaccagaucuuuuuguaugcccagagcucugggagaauuacaguguccacuaagaggucacaacaggcuguaguuccaaacauaggaagccggccccgcauuagaaauaucccuaguaggauuucuaucuacuggaccaucgugaaaccaggugauauucugcuaauaaacuccacaggcaaucucaucgccccgcggggguacuucaagauucgcagcggaaaaucgucuaucaugcgauccgacgcgcccauaggcaaguguaagucagagugcauuaccccuaacgguaguaucccaaaugacaaacccuuucagaacgucaauagaaucacguauggggcauguccuagguacgugaagcagagcacucugaaacuugccacaggaaugcggaacgugccagaaaagcaaacccguggcauuuucggcgcuaucgccggguuuauugagaauggaugggaagguaugauggauggcugguauggguuccgccaccagaacuccgagggaagaggccaggcagcugaccugaaaucuacucaagccgcgauagaucagaucaaugguaaguugaacaggcucauugggaaaacaaaugagaaguuccaccagaucgaaaaggaguuuagcgaagucgagggccggauccaggaccuggaaaaauacguugaggauaccaagauugacuuauggucauauaacgccgagcugcucguggcacuugaaaaccaacauacgauagaucugaccgacagugagaugaauaaauuguucgaaaagacaaagaagcagcuacgagagaacgcugaagauaugggaaauggcugcuuuaagaucuaccacaaaugugacaacgccugcauuggguccauccgcaauggaacuuaugaucaugacguauacagagacgaggcucugaacaauagguuccagauuaaggguguggagcucaaaagcggcuacaaggauuggauccuguggauaucuuuugccaugucaugcuuccuucugugugucgcauugcucggguuuaucaugugggccugccagaaaggaaacauucgguguaauaucugcauuuga

SEQ ID NO: 139542 - RNA, 1701 nt, Artificial Sequence; identical to SEQ ID NO: 137906
  derived and/or modified CDS sequence (opt3) from hemagglutinin__InfluenzaA__AHL96880

SEQ ID NO: 139543 - RNA, 1701 nt, Artificial Sequence
  derived and/or modified CDS sequence (opt3) from hemagglutinin__InfluenzaA__AHL96892
augaagaccaucauugcccugagcuacauacucugccuuguguucgcucagaaacugcccggcaacgacaauuccacagcaacuuuguguuuagggcaccaugccgucccuaacggaacgaucguuaagaccauuacaaaugauagaaucgaggugacuaacgcgaccgaacugguacaaaauucuucaauuggugagaucugcgacaguccacaccagauacuagauggcgaaaacuguacacucaucgacgcucugcuuggggauccgcagugcgacggauuucagaauaaaaagugggaucuguucguggagaggagcaaagccuauuccaacuguuaccccuaugacgucccugauuacgcaucuuugcggucgcucguggccucaagcggcacccuggaauuuaauaacgagaguuucaauugggcugguguuacucaaaacgggacauccucugcaugcauucgcggaagcaauuccucauuuuucagucgacugaacuggcucacccauuuaaauuuuaaguauccagcccugaacgugacgaugcccaacaaugagcaguucgacaaguuguacaucuggggcguccaccauccuggcacugauaaagaccagauuuuucuuuaugcucagagcucugggcguaucaccguguccacaaagagaucacaacaggccguaauaccaaacauuggaagcaggccccggauccgcaauauuccuaguagaaucucuaucuacuggacuauuguuaaaccaggugauauacugcuaaucaacuccaccggcaaucucauugcgccgaggggguacuucaagauccggagcggaaaaucgucuauaaugcgcuccgacgcacccauuggcaaguguaagucagaaugcaucacaccuaacgguaguaucccaaaugacaaacccuuucagaacgugaaucgaauuaccuauggggccuguccuagauacgucaagcagagcacgcugaaacuugcuacuggaaugaggaacgugccagagaagcaaacacggggcaucuucggcgccauugcaggguuuauagaaaauggaugggaggguaugguggauggcugguauggguuccgucaccagaacuccgagggacgcggccaggcugccgaccugaaaucuacccaagcggccaucgaucagauuaaugguaaguugaacagacucaucgggaaaacuaaugaaaaguuccaccagaucgagaaggaauuuagcgaggucgaaggcaggguucaggaccuggagaaauacguggaggauacaaagauugacuuauggucauauaacgcagaacugcucguagcucuugagaaccaacauaccauagaucugacggacagugaaaugaauaaauuguucgagaagaccaaaaagcagcuacgggaaaacgccgaggauaugggaaauggcugcuuuaagaucuaccacaaaugugacaacgcuugcauuggguccauccgaaauggaacauaugaucaugacguguaccgcgacgaggcccugaacaauagauuccagauuaagggugucgaacucaaaagcggcuacaaggauuggauccuguggauaucuuuugcaaucucaugcuuccuucuguguguggccuugcucggguuuauuaugugggcuugccagaaaggaaacaucagguguaauauuugcaucuga

SEQ ID NO: 139544 - RNA, 1701 nt, Artificial Sequence
  derived and/or modified CDS sequence (opt3) from hemagglutinin__InfluenzaA__AHL96904
augaagaccaucauugcccugagcuacauacucugccuuguguucgcucagaaacugcccggcaacgacaauuccacagcaacuuuguguuuagggcaccaugccgucccuaacggaaugaucguuaagacgauuaccaaugauagaaucgaggugacaaacgcgacugaacugguacaaaauucuucaauuggugagaucugcgacaguccacaccagauacuagauggcgaaaacuguacccucaucgacgcucugcuuggggauccgcagugcgacggauuucagaauaaaaagugggaucuguucguggagaggagcaaagccuauuccaacuguuaccccuaugacgucccugauuacgcaucuuugcggucgcucguggccucaagcggcacacuggaauuuaauaacgagaguuucaauuggaccgguguuacucaaaacgggacauccucugcuugcauucgccgaagcaauuccucauuuuucagucgucugaacuggcucacccauuuaaauuuuaaguauccagcacugaacgugacgaugcccaacaaugagcaguucgacaaguuguacaucuggggaguccaccauccuggcacugauaaagaccagauuuuucuuuaugcccagagcucuggcagaaucaccguguccacaaagaggucacaacaggcuguaguuccaaacauagggagccggccccgcauuagaaauaucccuaguaggauuucuaucuacuggacuaucgugaaaccaggagauauucugcuaauaaacuccaccgguaaucucaucgccccgcggggcuacuucaagauucgcagcgggaaaucgucuaucaugcgauccgacgcgcccauaggaaaguguaagucagaaugcauuacaccuaacggcaguaucccaaaugacaaacccuuucagaacgucaauagaaucaccuauggugcauguccuagguacgugaagcagagcacgcugaaacuugccacugggaugcggaacgugccagagaagcaaacacguggaauuuucggcgcuaucgccggcuuuauugaaaaugggugggagggaauggucgaugguugguauggcuuccgccaccagaacuccgaggggagaggacaggcagcugaccugaaaucuacccaagccgcgauagaucagaucaauggcaaguugaacaggcucauugguaaaacuaaugaaaaguuccaccagaucgagaaggaauuuagcgagguugaagggcggauccaggaccuggagaaauacguggaggauacaaagauugacuuauggucauauaacgccgaacugcucguagcacuugagaaccaacauaccauagaucugacggacagugaaaugaauaaauuguucgagaagaccaaaaagcagcuacgagaaaacgcugaggauaugggcaauggaugcuuuaagaucuaccacaaaugugacaacgccugcauuggcuccauccgcaaugggacauaugaucaugacguguacagagacgaggcucugaacaauagguuccagauuaagggagucgaacucaaaagcgguuacaaggauuggauccuguggauaucuuuugccaugucaugcuuccuucuguguguggcauugcucggcaguaucaugugggccugccagaaagggaacauucgguguaauaucugcauuuga

SEQ ID NO: 139545 - RNA, 1701 nt, Artificial Sequence; identical to SEQ ID NO: 137906
  derived and/or modified CDS sequence (opt3) from hemagglutinin__InfluenzaA__AHL96916

SEQ ID NO: 139546 - RNA, 1701 nt, Artificial Sequence; identical to SEQ ID NO: 137906
  derived and/or modified CDS sequence (opt3) from hemagglutinin__InfluenzaA__AHL96928

SEQ ID NO: 139547 - RNA, 1701 nt, Artificial Sequence; identical to SEQ ID NO: 137906
  derived and/or modified CDS sequence (opt3) from hemagglutinin__InfluenzaA__AHL96940

SEQ ID NO: 139548 - RNA, 1701 nt, Artificial Sequence; identical to SEQ ID NO: 137916
  derived and/or modified CDS sequence (opt3) from hemagglutinin__InfluenzaA__AHL96952

SEQ ID NO: 139549 - RNA, 1701 nt, Artificial Sequence; identical to SEQ ID NO: 137916
  derived and/or modified CDS sequence (opt3) from hemagglutinin__InfluenzaA__AHL96964

SEQ ID NO: 139550 - RNA, 1701 nt, Artificial Sequence; identical to SEQ ID NO: 138074
  derived and/or modified CDS sequence (opt3) from hemagglutinin__InfluenzaA__AHL96976

SEQ ID NO: 139551 - RNA, 1701 nt, Artificial Sequence
  derived and/or modified CDS sequence (opt3) from hemagglutinin__InfluenzaA__AHL96988
augaagaccaucauugcccugagcuacauacucugccuuguguucgcucagaaacugcccggcaacgacaauuccacagcaacuuuguguuuagggcaccaugccgucccuaacggaacgaucguuaagaccauuacaaaugauagaaucgaggugacuaacgcgaccgaacugguacaaaauucuucaauuggugagaucugcgacaguccacaccagauacuagauggcgaaaacuguacacucaucgacgcucugcuuggggauccgcagugcgacggauuucagaauaaaaagugggaucuguucguggagaggagcaaagccuauuccaacuguuaccccuaugacgucccugauuacgcaucuuugcggucgcucguggccucaagcggcacccuggaauuuaauaacgagaguuucaauuggacugguguuacacaaaacgggaccuccucugcuugcauucgccgaagcaauuccucauuuuucagucgucugaacuggcucacgcauuuaaauuuuaaguauccagcacugaacgugacuaugcccaacaaugagcaguucgacaaguuguacaucuggggaguccaccauccuggcaccgauaaagaccagauuuuucuuuaugcccagagcucuggcagaaucacaguguccacuaagaggucacaacaggcuguaauaccaaacauugggagccggccccgcaucagaaauauuccuaguaggaucucuaucuacuggaccauuguucggccaggagauauacugcuaaucaacuccacagguaaucucauugccccgcgcggcuacuucaaaauccgaagcgggaagucgucuauaaugagauccgacgcgcccauuggaaaauguaagucagaaugcaucaccccuaacggcaguaucccaaaugacaagcccuuucagaacgugaauaggauuacguauggugcauguccucgguacgucaaacagagcacucugaaacuugccacagggaugcguaacgugccagagaagcaaacccgcggaaucuucggcgcuauugccggcuuuauagaaaaugggugggagggaaugguggaugguugguauggcuucagacaccagaacuccgaggggaggggacaggcagcugaccugaagucuacucaagccgcgaucgaucagauuaauggcaaauugaaccggcucaucgguaagacaaaugaaaaauuccaccagaucgagaaggaauuuagcgaggucgaagggcgcauucaggaccuggagaaguacguugaggauaccaaaauagacuuauggucauauaacgccgaacugcucguggcacuugagaaccaacauacgaucgaucugaccgacagugaaaugaauaaguuguucgagaaaacaaagaaacagcuacgagaaaacgcugaggauaugggcaauggaugcuuuaagauuuaccacaagugugacaacgccugcaucggcuccauuagaaaugggacuuaugaucauaacguauacagggacgaggcucugaauaaccgguuccagaucaaaggaguggaacucaagagcgguuacaaagacuggauacuguggaucucuuuugccauuucaugcuuccuucugugugucgcauugcucggcuuuaucaugugggccugccagaaggggaauauucgcuguaacaucugcauauga

SEQ ID NO: 139552 - RNA, 1701 nt, Artificial Sequence; identical to SEQ ID NO: 137916
  derived and/or modified CDS sequence (opt3) from hemagglutinin__InfluenzaA__AHL97000

SEQ ID NO: 139553 - RNA, 1701 nt, Artificial Sequence; identical to SEQ ID NO: 138042
  derived and/or modified CDS sequence (opt3) from hemagglutinin__InfluenzaA__AHL97012

SEQ ID NO: 139554 - RNA, 1701 nt, Artificial Sequence
  derived and/or modified CDS sequence (opt3) from hemagglutinin__InfluenzaA__AHL97024
augaagaccaucauugcccugagcuacauacucugccuuguguucgcucagaaacugcccggcaacgacaauuccacagcaacuuuguguuuagggcaccaugccgucccuaacggaacgaucguuaagaccauuaugaaugauagaaucgaggugacaaacgcgacugaacugguacaaaauucuucaauuggugagaucugcgacaguccacaccagauacuagauggcgaaaacuguacccucaucgacgcucugcuuggggauccgcagugcgacggauuucagaauaaaaagugggaucuguucguggagaggagcaaagccuauuccaacuguuaccccuaugacgucccugauuacgcaucuuugcggucgcucguggccucaagcggcacacuggaauuuaauaacgagaguuucaauugggcugguguuacccaaaacgggacuuccucugcaugcauucgcggaagcaauuccucauuuuucagucgacugaacuggcucacacauuuaaauuuuaaguauccagcccugaacgugaccaugcccaacaaugagcaguucgacaaguuguacaucuggggcguccaccauccuggcacggauaaagaccagauuuuucuuuaugcucagagcucugggcguaucacuguguccaccaagagaucacaacaggccguaauaccaaacauuggaagcaggccccggauccgcaauauuccuaguagaaucucuaucuacuggacaauuguuaaaccaggugauauacugcuaaucaacuccacuggcaaucucauugcgccgaggggguacuucaagauccggagcggaaaaucgucuauaaugcgcuccgacgcacccauuggcaaguguaagucagaaugcaucaccccuaacgguaguaucccaaaugacaaacccuuucagaacgugaaucgaauuacauauggggccuguccuagauacgucaagcagagcacccugaaacuugcuacgggaaugaggaacgugccagagaagcaaacucggggcaucuucggcgccauugcaggguuuauagaaaauggaugggaggguaugauggauggcugguauggguuccgucaccagaacuccgagggacgcggccaggcugccgaccugaaaucuacacaagcggccaucgaucagauuaaugguaaguugaacagacucaucgggaaaaccaaugaaaaguuccaccagaucgagaaggaauuuagcgagguggaaggcaggauucaggaccuggagaaauacgucgaggauacuaagauagacuuauggucauauaacgcagaacugcucguugcucuugagaaccaacauacaaucgaucugaccgacagugaaaugaauaaauuguucgagaagacgaaaaagcagcuacgggaaaacgccgaggauaugggaaauggcugcuuuaagauuuaccacaaaugugacaacgcuugcaucggguccauucgaaauggaaccuaugaucaugacguguaccgcgacgaggcccugaacaauagauuccagaucaaggguguagaacucaaaagcggcuacaaggauuggauacuguggaucucuuuugcaauuucaugcuuccuucuguguguggccuugcucggguuuaucaugugggcuugccagaaaggaaacauuagguguaauaucugcauauga

SEQ ID NO: 139555 - RNA, 1701 nt, Artificial Sequence
  derived and/or modified CDS sequence (opt3) from hemagglutinin__InfluenzaA__AHL97036
augaagaccaucauugcccugagcuacauacucugccuuguguucgcucagaaacugcccggcaacgacaauuccacagcaacuuuguguuuagggcaccaugccgucccuaacggaacgaucguuaagaccauuacaaaugauagaaucgaggugacuaacgcgaccgaacugguacaaaauucuucaauuggugagaucugcgacaguccacaccagauacuagauggcgaaaacuguacacucaucgacgcucugcuuggggauccgcagugcgacggauuucagaauaaaaagugggaucuguucguggagaggagcaaagccuauuccaacuguuaccccuaugacgucccugauuacgcaucuuugcggucgcucguggccucaagcggcacccuggaauuuaauaacgagaguuucaauuggacugguguuacacaaaacgggaccuccucugcuugcauucgccgaagcaauuccucauuuuucagucgucugaacuggcucacgcauuuaaauuuuaaguauccagcacugaacgugacuaugcccaacaaugagcaguucgacaaacuuuacaucuggggaguccaccauccuggcaccgauaaagaccagaucuuuuuguaugcccagagcucuggcagaauuacaguguccacuaagaggucacaacaggcuguaauaccaaacauugggagccggccccgcaucagaaauauuccuaguaggaucucuaucuacuggaccauuguuaaaccaggagauauacugcuaaucaacuccacagguaaucucauugccccgcggggcuacuucaagauccgcagcgggaaaucgucuauaaugcgauccgacgcgcccauuggaaaguguaagucagaaugcaucaccccuaacggcaguaucccaaaugacaaacccuuucagaacgugaauagaauuacguauggugcauguccuagguacgucaagcagagcacucugaaacuugccacagggaugcggaacgugccagagaagcaaacccguggaaucuucggcgcuauugccggcuuuauagaaaaugggugggagggaaugguggaugguugguauggcuuccgccaccagaacuccgaggggagaggacaggcagcugaccugaaaucuacucaagccgcgaucgaucagauuaauggcaaguugaacaggcucaucgguaaaacaaaugaaaaguuccaccagaucgagaaggaauuuagcgaggucgaagggcggauucaggaccuggagaaauacguugaggauaccaagauagacuuauggucauauaacgccgaacugcucguggcacuugagaaccaacauacgaucgaucugaccgacagugaaaugaauaaauuguucgagaagacaaagaagcagcuacgagaaaacgcugaggauaugggcaauggaugcuuuaagauuuaccacaaaugugacaacacuugcaucggcuccauucgcaaugggaccuaugaucaugacguauacagagacgaggcccugaacaauagguuccagaucaagggaguggaacucaaaagcgguuacaaggauuggauacuguggaucucuuuugcuauuucaugcuuccuucugugugucgccuugcucggcuuuaucaugugggcaugccagaaagggaacauucgguguaauaucugcauauga

SEQ ID NO: 139556 - RNA, 1701 nt, Artificial Sequence; identical to SEQ ID NO: 137931
  derived and/or modified CDS sequence (opt3) from hemagglutinin__InfluenzaA__AHL97048

SEQ ID NO: 139557 - RNA, 1701 nt, Artificial Sequence
  derived and/or modified CDS sequence (opt3) from hemagglutinin__InfluenzaA__AHL97060
augaagaccaucauugcccugagcuacauacucugccuuguguucgcucagaaaauccccggcaacgacaauuccacagcaacucuguguuuggggcaccaugccgucccuaacggaacgauuguuaagaccaucacaaaugauagaauugaggugacuaacgcgaccgaauuaguacaaaauucuucaaucggugagauaugcgacaguccacaccagauccuggauggcgaaaacuguacacuaauugacgcucuccugggggauccgcagugcgacggauuucagaauaaaaagugggaucuuuucguggagaggagcaaagccuauuccaacuguuaccccuaugacgucccugauuacgcaucucugcggucguugguggccucaagcggcacccucgaauuuaauaacgagaguuucaauuggacugguguuacacaaaacgggaccuccucugcuugcauccgccgaagcaauuccucauuuuucagucgucugaacuggcugacgcaucucaauuuuaaguauccagcauuaaacgugacuaugcccaacaaugagcaguucgacaagcuguacauuuggggaguccaccauccuggcaccgauaaagaccagaucuuucuuuaugcccagagcucuggcagaauaacaguguccacuaagaggucacaacaggcuguaauuccaaacaucgggagccggccccgcauuagaaauaucccuaguaggaucucuauuuacuggaccauaguuaaaccaggagauaucuugcugauuaacuccacagguaaucuaaucgccccgcggggcuacuucaagauacgcagcgggaaaucgucuauuaugcgauccgacgcgcccaucggaaaguguaagucagaaugcaucaccccuaacggcaguauuccaaaugacaaacccuuucagaacgugaauagaaucacguauggugcauguccuagguacgucaagcagagcacucucaaacuggccacagggaugcggaacgugccagagaagcaaacccguggaauuuucggcgcuauagccggcuuuaucgaaaaugggugggagggaaugguggaugguugguauggcuuccgccaccagaacuccgaggggagaggacaggcagcugaccuuaaaucuacucaagccgcgauugaucagaucaauggcaagcugaacagguugaucgguaaaacaaaugaaaaguuccaccagauugagaaggaauuuagcgaggucgaagggcggauacaggaccucgagaaauacguugaggauaccaagaucgaccuguggucauauaacgccgaauuacugguggcacucgagaaccaacauacgauugaucuuaccgacagugaaaugaauaaacuguucgagaagacuaaaaagcaguugcgagaaaacgcugaggauaugggcaauggaugcuuuaagaucuaccacaaaugugacaacgccugcauuggcuccauccgcaaugggacauaugagcaugauguauacagagacgaagcucuaaacaauagguuccagauaaagggaguggagcugaaaagcgguuacaaggacuggauccucuggauuucuuuugccaucucaugcuuccugcuuugugucgcacuguugggcuuuauuaugugggccugccagaaagggaacauccgguguaauauaugcauuuga

SEQ ID NO: 139558 - RNA, 1701 nt, Artificial Sequence; identical to SEQ ID NO: 138042
  derived and/or modified CDS sequence (opt3) from hemagglutinin__InfluenzaA__AHL97072

SEQ ID NO: 139559 - RNA, 1701 nt, Artificial Sequence; identical to SEQ ID NO: 138042
  derived and/or modified CDS sequence (opt3) from hemagglutinin__InfluenzaA__AHL97084

SEQ ID NO: 139560 - RNA, 1701 nt, Artificial Sequence; identical to SEQ ID NO: 137883
  derived and/or modified CDS sequence (opt3) from hemagglutinin__InfluenzaA__AHL97096

SEQ ID NO: 139561 - RNA, 1701 nt, Artificial Sequence; identical to SEQ ID NO: 138045
  derived and/or modified CDS sequence (opt3) from hemagglutinin__InfluenzaA__AHL97108

SEQ ID NO: 139562 - RNA, 1701 nt, Artificial Sequence
  derived and/or modified CDS sequence (opt3) from hemagglutinin__InfluenzaA__AHL97120
augaagaccaucauugcccugagcuacauacucugccuuguguucgcucagaaacugcccggcaacgacaauuccacagcaacuuuguguuuagggcaccaugccgucccuaacggaacgaucguuaagaccauuacaaaugauagaaucgaggugacuaacgcgaccgaacugguacaaaauucuucaauuggugagaucugcgacaguccacaccagauacuagauggcgaaaacuguacacucaucgacgcucugcuuggggauccgcagugcgacggauuucagaauaaaaagugggaucuguucguggagaggagcaaagccuauuccaacuguuaccccuaugacgucccugauuacgcaucuuugcggucgcucguggccucaagcggcacccuggaauuuaauaacgagaguuucaauugggcugguguuacucaaaacgggacauccucugcaugcauucgcggaagcaauuccucauuuuucagucgacugaacuggcucacccauuuaaauuuuaaguauccagcccugaacgugacgaugcccaacaaugagcaguucgacaaguuguacaucuggggcguccaccauccuggcacugauaaagaccagauuuuucuuuaugcucagagcucugggcguaucaccguguccacaaagagaucacaacaggccguaauaccaaacauuggaagcaggccccggauccgcaauauuccuaguagaaucucuaucuacuggacuauuguuaaaccaggugauauacugcuaaucaacuccaccggcaaucucauugcgccgaggggguacuucaagauccggagcggaaaaucgucuauaaugcgcuccgacgcacccauuggcaaguguaagucagaaugcaucacaccuaacgguaguaucccaaaugacaaacccuuucagaacgugaaucgagucaccuauggggccuguccuagauacgugaagcagagcacgcugaaacuugcuacuggaaugaggaacgugccagagaagcaaacacggggcauuuucggcgccaucgcaggguuuauugaaaauggaugggaggguauggucgauggcugguauggguuccgucaccagaacuccgagggacgcggccaggcugccgaccugaaaucuacccaagcggccauagaucagaucaaugguaaguugaacagacucauugggaaaacuaaugaaaaguuccaccagaucgagaaggaauuuagcgagguugaaggcaggauccaggaccuggagaaauacguggaggauacaaagauugacuuauggucauauaacgcagaacugcucguagcucuugagaaccaacauaccauagaucugacggacagugaaaugaauaaauuguucgagaagaccaaaaagcagcuacgggaaaacgccgaggauaugggaaauggcugcuuuaagaucuaccacaaaugugacaacgcuugcauuggguccaucauuaauggaacauaugaucaugacguguaccgagacgaggcccugaacaaucgcuuccagaucaagggugucgaacucaaaagcggcuacaaggauuggauacuguggaucucuuuugcaauuucaugcuuccuucuguguguggccuugcucggguuuaucaugugggcuugccagaaaggaaacauuagauguaauaucugcauauga

SEQ ID NO: 139563 - RNA, 1701 nt, Artificial Sequence
  derived and/or modified CDS sequence (opt3) from hemagglutinin__InfluenzaA__AHL97132
augaagaccaucauugcccugagcuacauacucugccuuguguucgcucagaaacugcccggcaacgacaauuccacagcaacuuuguguuuagggcaccaugccgucccuaacggaacgaucguuaagaccauuacaaaugaucaaaucgaggugacuaacgcgaccgaacugguacaaaauucuucaauuggugagaucugcgacaguccacaccagauacuagauggcgaaaacuguacacucaucgacgcucugcuuggggauccgcagugcgacggauuucagaauaaaaagugggaucuguucguggagagaagcaaagccuauuccaacuguuaccccuaugacgucccugauuacgcaucuuugaggucgcucguggccucaagcggcacccuggaauuuaauaacgagaguuucaauugggcugguguuacucagaacgggacauccucugcaugcauucggggaagcaauuccucauuuuucagucgccugaacuggcucacccauuuaaauuuuaaguauccagcccugaacgugacgaugcccaacaaugagcaguucgacaaguuguacaucuggggcguccaccauccuggcacugauaaagaccagauuuuucuuuaugcucaaagcucugggcgaaucaccguguccacaaagcguucacagcaggccguaauaccaaacauuggaagcagacccaggauccggaauauuccuagucgcaucucuaucuacuggacuauuguuaaaccaggugauauacugcuaaucaacuccaccggcaaucucauugcgccgagaggguacuucaagaucaggagcggaaaaucgucuauaaugcgguccgacgcacccauuggcaaguguaagucagaaugcaucacaccuaacgguaguaucccaaaugacaaacccuuucagaacgugaaucgcauuaccuauggggccuguccucgauacgucaagcaaagcacgcugaaacuugcuacuggaaugagaaacgugccaggcaagcagacaaggggcaucuucggggccauugcaggauuuauagagaaugguugggaaggcaugguggaugggugguauggauuccggcaccagaacuccgagggccguggucaagcugccgaccugaaaucuacccaggcggccaucgaucagauuaaugggaaguugaaccgccucaucggcaaaacuaaugagaaguuccaccagaucgaaaaggaguuuagcgaagucgagggaaggauucaagaccuggaaaaauacguugaggauacaaagauagacuuauggucauauaacgcagagcugcucguggcucuugaaaaccagcauaccaucgaucugacggacagugagaugaauaaauuguucgaaaagaccaaaaagcagcuaagagagaacgccgaagauaugggcaaugggugcuuuaagauuuaccacaaaugugacaacgcuugcaucggauccauucggaaugguacauaugaucaugacguauaccgagacgaggcccugaacaaucgcuuccagaucaagggcguggagcucaaaagcggguacaaggauuggauacuguggaucucuuuugcaauuucaugcuuccuucugugugucgccuugcucggauuuaucaugugggcuugccaaaaaggcaacauuagauguaauaucugcauauga

SEQ ID NO: 139564 - RNA, 1701 nt, Artificial Sequence; identical to SEQ ID NO: 138042
  derived and/or modified CDS sequence (opt3) from hemagglutinin__InfluenzaA__AHL97144

SEQ ID NO: 139565 - RNA, 1701 nt, Artificial Sequence; identical to SEQ ID NO: 138042
  derived and/or modified CDS sequence (opt3) from hemagglutinin__InfluenzaA__AHL97156

SEQ ID NO: 139566 - RNA, 1701 nt, Artificial Sequence; identical to SEQ ID NO: 138042
  derived and/or modified CDS sequence (opt3) from hemagglutinin__InfluenzaA__AHL97168

SEQ ID NO: 139567 - RNA, 1701 nt, Artificial Sequence; identical to SEQ ID NO: 137916
  derived and/or modified CDS sequence (opt3) from hemagglutinin__InfluenzaA__AHL97180

SEQ ID NO: 139568 - RNA, 1701 nt, Artificial Sequence; identical to SEQ ID NO: 138042
  derived and/or modified CDS sequence (opt3) from hemagglutinin__InfluenzaA__AHL97192

SEQ ID NO: 139569 - RNA, 1701 nt, Artificial Sequence; identical to SEQ ID NO: 138042
  derived and/or modified CDS sequence (opt3) from hemagglutinin__InfluenzaA__AHL97204

SEQ ID NO: 139570 - RNA, 1701 nt, Artificial Sequence; identical to SEQ ID NO: 138042
  derived and/or modified CDS sequence (opt3) from hemagglutinin__InfluenzaA__AHL97216

SEQ ID NO: 139571 - RNA, 1701 nt, Artificial Sequence
  derived and/or modified CDS sequence (opt3) from hemagglutinin__InfluenzaA__AHL97228
augaagaccaucauugcccugagcuacauacucugccuuguguucgcucagaaacugcccggcaacgacaauuccacagcaacuuuguguuuagggcaccaugccgucccuaacggaacgguugugaagaccaucacaaaugauagaauugagguaacuaacgcgaccgaacuggugcaaaauucuucaaucggugagauuugcgacaguccacaccagauccuagauggcgaaaacuguacacucauagacgcucugcuuggggauccgcagugcgacggauuucagaauaaaaagugggaucuguucgucgagaggagcaaagccuauuccaacuguuaccccuaugacgugccugauuacgcaucuuugcggucgcucguugccucaagcggcacccuggaauuuaauaacgagaguuucaauuggacuggugugacacaaaacgggaccuccucugcuugcauccgccgaagcaauaacuccuuuuucucacgucugaauuggcucacgcauuuaaacuuuaaguauccagcacugaacgucacuaugcccaauaacgagcaguucgacaaacuuuacauuuggggagugcaccauccuggcaccgauaaagaccagaucuuuuuguaugcccagaguagcggcagaauuacaguaucuacuaagaggucccaacaggcuguuaucccaaauauagggucacggccccgcauuagaaacaucccuagcaggauuaguaucuacuggaccaucgugaaaccaggagauauucugcuaauaaauucuacagguaaccucaucgccccgcggggcuacuucaagauucgcuccgggaaaagcucgaucaugcgaucugacgcgcccauaggaaaguguaaguccgaaugcauuaccccuaauggcucaaucccaaacgacaaacccuuucagaaugucaacagaaucacguauggugcauguccuagguacgugaagcagaguacucugaaacuugccacagggaugcggaaugugccagagaagcaaacccguggaauuuucggcgcuaucgccggcuuuauugaaaacgggugggagggaauggucgaugguugguauggcuuccgccaccagaauagcgaggggagaggacaggcagcugaccugaaauccacucaagccgcgauagaucagaucaacggcaaguugaauaggcucauugguaaaacaaacgaaaaguuccaccagaucgagaaggaauuuucugagguugaagggcggauccaggaccuggagaaauacguggaggauaccaagauugacuuauggagcuauaacgccgaacugcucguagcacuugagaaucaacauacgauagaucugaccgacucagaaaugaacaaauuguucgagaagacaaagaagcagcuacgagaaaaugcugaggauaugggcaacggaugcuuuaagaucuaccacaaaugugacaaugccugcauuggcaguauccgcaacgggacuuaugaucaugacguguacagagacgaggcucugaauaacagguuccagauuaagggagucgaacucaaauccgguuacaaggauuggauccuguggaucagcuuugccauaucuugcuuccuucugugugugguuuugcucggcuuuauuaugugggcaugccagaaagggaauauccgguguaacauuugcaucuga

SEQ ID NO: 139572 - RNA, 1701 nt, Artificial Sequence; identical to SEQ ID NO: 138042
  derived and/or modified CDS sequence (opt3) from hemagglutinin__InfluenzaA__AHL97240

SEQ ID NO: 139573 - RNA, 1701 nt, Artificial Sequence
  derived and/or modified CDS sequence (opt3) from hemagglutinin__InfluenzaA__AHL97252
augaagaccaucauugcccugagcuacauacucugccuuguguucgcucaggagcugcccggcaacgacgauuccacagcaacuuuguguuuagggcaccaugccgucccuaauggaacgaucguuaaaaccauuacaaacgaccaaaucgaagugacuaaugcgaccgagcugguacagucuucaaguacaggugaaauuugcaacagcccacaccagauccuagauggcgagaauuguacccucauagacgcucugcuuggggauccgcagugcgacggauuucaaaacaagaaaugggaucuguucguggaaagauccaaggcccauucuaauuguuaucccuacgacgucccugauuaugcaucguugaggucacucguggccagcaguggcacucuggaguuuaacaaugagaacuucaauuggacagguguuacccagaacgggacguccucugcuugcauccggcgcagcaauaacuccuuuuucucacgacugaauuggcucacucacuuaaacuuuaaauacccagcacugaacgugaccaugcccaauaacgaacaguucgacaaacuuuauauuuggggaguccaucacccuggcacagauaaggaccagaucuuuuuguacgcccaagcuaguggccguauuacugugagcaccaagagaucucagcaggccguaaucccaaauauaggguccaggccccggguucgcaacauuccuucaagagugagcaucuauuggacaauugucaagccaggagauauccugcuaaucaauaguaccgguaaccucauugcgccgaggggcuacuucaaaauacggucugggaaguccagcaucaugcgcucggacgcacccauuggaaaauguaauucugccugcaucacgccuaacggcuccauaccaaaugacaagcccuuucagaacgugaaucgaauuacuuacggugcuuguccuagauaugugaagcaaaacacacugaaacuugccaccgggaugaggaaugucccagagaagcagacucggggaaucuucggcgcaaucgcuggcuuuauugaaaacgggugggagggaaugguugaugguugguacggcuuccgucaccaaaauucagaggggcgcggacaggccgcggaccugaaaaguacacaggccgcaaucgaucagauuaacggcaaguugaacagacucauagguaaaaccaaugaaaaguuccaucagaucgagaaagaauuuagcgagguggaagggaggauucaagaccuggagaaguauguagaggauacgaagaucgacuuaugguccuacaacgcugaacugcucguggcccuugagaaucagcacaccaucgaucugacagacucugaaaugaacaaauuguucgagaagacuaaaaagcagcuacgggaaaaugcugaggauaugggcaacggaugcuuuaaaauuuaucauaagugugacaaugccugcauaggcagcauccgaaacgggaccuacgaucacgacgucuaucgcgacgaggcacugaauaacagauuccagauuaagggaguggaacucaaaucagguuacaaggauuggauccuguggauuaguuuugccaucuccugcuuccuucuguguguugcuuugcucggcuuuauaaugugggcgugccaaaaagggaauaucagguguaacauuugcaucuga

SEQ ID NO: 139574 - RNA, 1701 nt, Artificial Sequence; identical to SEQ ID NO: 137906
  derived and/or modified CDS sequence (opt3) from hemagglutinin__InfluenzaA__AHL97264

SEQ ID NO: 139575 - RNA, 1701 nt, Artificial Sequence; identical to SEQ ID NO: 138042
  derived and/or modified CDS sequence (opt3) from hemagglutinin__InfluenzaA__AHL97276

SEQ ID NO: 139576 - RNA, 1701 nt, Artificial Sequence
  derived and/or modified CDS sequence (opt3) from hemagglutinin__InfluenzaA__AHL97288
augaagaccaucauugcccugagcuacauacucugccuuguguucgcucagaaacugcccggcaacgacaauuccacagcaacuuuguguuuagggcaccaugccgucccuaacggaacgaucguuaagaccauuacaaaugauagaaucgaggugacuaacgcgaccgaacugguacaaaauucuucaauuggugagaucugcaacaguccacaccagauacuagacggcgaaaauuguacacucaucgaugcucugcuuggggacccgcagugcgauggauuucagaacaaaaagugggaccuguucguggagaggagcaaagccuauuccaauuguuaccccuaugaugucccugacuacgcaucuuugcggucgcucguggccucaagcggcacccuggaauuuaacaaugagaguuucaacuggacugguguuacacaaaaugggaccuccucugcuugcauucgccgaagcaacuccucauuuuucagucgucugaauuggcucacgcauuuaaacuuuaaguauccagcacugaacgugacuaugcccaauaacgagcaguucgauaaguuguacaucuggggaguccaccauccuggcaccgacaaagaucagauuuuucuuuaugcccagagcucuggcagaaucacaguguccacuaagaggucacaacaggcuguaauaccaaauauugggagccggccccgcaucagaaacauuccuaguaggaucucuaucuacuggaccauuguuaaaccaggagacauacugcuaaucaauuccacagguaaccucauugccccgcggggcuacuucaagauccgcagcgggaaaucgucuauaaugcgauccgaugcgcccauuggaaaguguaagucagaaugcaucaccccuaauggcaguaucccaaacgacaaacccuuucagaaugugaacagaauuacguauggugcauguccuagguacgucaagcagagcacucugaaacuugccacagggaugcggaaugugccagagaagcaaacccguggaaucuucggcgcuauugccggcuuuauagaaaacgggugggagggaaugguggacgguugguauggcuuccgccaccaaaauuccgaggggagaggacaggcagcugaucugaaaucuacucaggccgcgaucgaccagauuaacggcaaguugaauaggcucaucgguaaaacaaacgaaaaguuccaccagaucgagaaggaauuuagcgaggucgaagggcggauucaggaucuggagaaauacguugaggacaccaagauagauuuauggucauauaacgccgaacugcucguggcacuugagaaucaacauacgaucgaccugaccgauagugaaaugaacaaauuguucgagaagauuaaaaagcagcuacgagaaaaugcugaggacaugggcaacggaugcuuuaagaucuaccacaaaugugauaaugccugcauuggcuccauccgcaacgggacauaugaccauaauguauacagagaugaggcucugaacaauagguuccagauaaagggaguggaacucaaaagcgguuacaaggacuggauccuguggauuucuuuugccaucucaugcuuccuucugugugucgcauugcucggcuuuauuaugugggccugccagaaagggaacauccgguguaauauaugcauuuga

SEQ ID NO: 139577 - RNA, 1701 nt, Artificial Sequence; identical to SEQ ID NO: 137916
  derived and/or modified CDS sequence (opt3) from hemagglutinin__InfluenzaA__AHL97300

SEQ ID NO: 139578 - RNA, 1701 nt, Artificial Sequence; identical to SEQ ID NO: 138042
  derived and/or modified CDS sequence (opt3) from hemagglutinin__InfluenzaA__AHL97312

SEQ ID NO: 139579 - RNA, 1701 nt, Artificial Sequence; identical to SEQ ID NO: 138042
  derived and/or modified CDS sequence (opt3) from hemagglutinin__InfluenzaA__AHL97336

SEQ ID NO: 139580 - RNA, 1701 nt, Artificial Sequence; identical to SEQ ID NO: 138042
  derived and/or modified CDS sequence (opt3) from hemagglutinin__InfluenzaA__AHL97348

SEQ ID NO: 139581 - RNA, 1701 nt, Artificial Sequence
  derived and/or modified CDS sequence (opt3) from hemagglutinin__InfluenzaA__AHL97372
augaagaccaucauugcccugagcuacauacucugccuuguguucgcucagaaacugcccggcaacgacaauuccacagcaacuuuguguuuagggcaccaugccgucccuaacggaacgaucguuaagaccauuacaaaugauagaaucgaggugacuaacgcgaccgaacugguacaaaauucuucaauuggugagaucugcgacaguccacaccagauacuagauggcgaaaacuguacacucaucgacgcucugcuuggggauccgcagugcgacggauuucagaauaaaaagugggaucuguucguggagaggagcaacgccuauuccaauuguuaccccuaugacgucccugauuacgcaucuuugcggucgcucguggccucaagcggcacccuggaauuuaacaaugagaguuucaacugggcugguguuacucaaaaugggacauccucugcaugcauucgcggaagcaacuccucauuuuucagucgacugaauuggcucacccauuuaaacuuuaaauauccagcccugaacgugacgaugcccaauaacgagcaguucgacaaguuguacaucuggggcguccaccauccuggcacugauaaggaccagauuuuucuuuaugcucagagcucugggcguaucaccguguccacaaaaagaucacaacaggccguaauaccaaauauuggaagcaggccccggauccgcaacauuccuaguagaaucucuaucuacuggacuauuguuaagccaggugauauacugcuaaucaauuccaccggcaaccucauugcgccgaggggguacuucaaaauccggagcggaaagucgucuauaaugcgcuccgacgcacccauuggcaaauguaagucagaaugcaucacaccuaaugguaguaucccaaacgacaagcccuuucagaaugugaaccgaauuaccuauggggccuguccuagauacgucaaacagagcacgcugaaacuugcuacuggaaugaggaaugugccagagaagcaaacacggggcaucuucggcgccauugcaggguuuauagaaaacggaugggaggguaugguggauggcugguauggguuccgucaccaaaauuccgagggacgcggccaggcugccgaccugaagucuacccaggcggccaucgaucagauuaacgguaaauugaauagacucaucgggaagacuaacgaaaaauuccaccagaucgagaaggaauuuagcgaggucgaaggcaggauucaggaccuggagaaguacguugaggauacaaaaauagacuuauggucauauaacgcagaacugcucguggcucuugagaaucaacauaccaucgaucugacggacagugaaaugaacaaguuguucgagaaaaccaagaaacagcuacgggaaaaugccgaggauaugggaaacggcugcuuuaagauuuaccacaagugugacaaugcuugcaucggguccauucgaaacggaacauaugaucaugacguauaccgcgacgaggcccugaauaacagauuccagaucaaagguguggaacucaagagcggcuacaaagauuggauacuguggaucucuuuugcaauuucaugcuuccuucugugugucgccuugcucggguuuaucaugugggcuugccagaagggaaauauuagguguaacaucugcauauga

SEQ ID NO: 139582 - RNA, 1701 nt, Artificial Sequence; identical to SEQ ID NO: 138042
  derived and/or modified CDS sequence (opt3) from hemagglutinin__InfluenzaA__AHL97384

SEQ ID NO: 139583 - RNA, 1701 nt, Artificial Sequence; identical to SEQ ID NO: 137906
  derived and/or modified CDS sequence (opt3) from hemagglutinin__InfluenzaA__AHL97396

SEQ ID NO: 139584 - RNA, 1701 nt, Artificial Sequence; identical to SEQ ID NO: 137883
  derived and/or modified CDS sequence (opt3) from hemagglutinin__InfluenzaA__AHL97408

SEQ ID NO: 139585 - RNA, 1701 nt, Artificial Sequence; identical to SEQ ID NO: 139554
  derived and/or modified CDS sequence (opt3) from hemagglutinin__InfluenzaA__AHL97420

SEQ ID NO: 139586 - RNA, 1701 nt, Artificial Sequence
  derived and/or modified CDS sequence (opt3) from hemagglutinin__InfluenzaA__AHL97444
augaagaccaucauugcccugagcuacauacucugccuuguguucgcucagaaacugcccggcaacgacaauuccacagcaacuuuguguuuagggcaccaugccgucccuaacggaacgaucguuaagaccauuacaaaugauagaaucgaggugacuaacgcgaccgaacugguacaaaauucuucaauuggugagaucugcgacaguccacaccagauacuagauggcgaaaacuguacacucaucgacgcucugcuuggggauccgcagugcgacggauuucagaauaaaaagugggaucuguucguggagaggagcaaagccuauuccaacuguuaccccuaugacgucccugauuacgcaucuuugcggucgcucguggccucaagcggcacccuggaauuuaauaacgagaguuucaauugggcugguguuacucaaaacgggacauccucugcaugcauucgcggaagcaauuccucauuuuucagucgacugaacuggcucacccauuuaaauuuuaaguauccagcccugaacgugacgaugcccaacaaugagcaguucgacaaacuuuacaucuggggcguccaccauccuggcacugauaaagaccagaucuuuuuguaugcucagagcucugggcguauuaccguguccacaaagagaucacaacaggccguaauaccaaacauuggaagcaggccccggauccgcaauauuccuaguagaaucucuaucuacuggacuauuguuaaaccaggugauauacugcuaaucaacuccaccggcaaucucauugcgccgaggggguacuucaagauccggagcggaaaaucgucuauaaugcgcuccgacgcacccauuggcaaguguaagucagaaugcaucacaccuaacgguaguaucccaaaugacaaacccuuucagaacgugaaucgaauuaccuaugggacguguccuagauacgucaagcagagcacucugaaacuugccacaggaaugaggaacgugccagagaagcaaacccggggcaucuucggcgcuauugccggguuuauagaaaauggaugggaggguaugguggauggcugguauggguuccgucaccagaacuccgagggacgcggccaggcagcugaccugaaaucuacucaagccgcgaucgaucagauuaaugguaaguugaacagacucaucgggaaaacaaaugaaaaguuccaccagaucgagaaggaauuuagcgaggucgaaggcaggauucaggaccuggagaaauacguugaggauaccaagauagacuuauggucauauaacgccgaacugcucguggcacuugagaaccaacauacgaucgaucugaccgacagugaaaugaauaaauuguucgagaagacaaagaagcagcuacgggaaaacgcugaggauaugggaaauggcugcuuuaagauuuaccacaaaugugacaacgccugcaucggguccauucgaaauggaacuuaugaucaugacguauaccgcgacgaggcucugaacaauagauuccagaucaaggguguggaacucaaaagcggcuacaaggauuggauacuguggaucucuuuugccauuucaugcuuccuucugugugucgcauugcucggguuuaucaugugggccugccagaaaggaaacauuagguguaauaucugcauauga

SEQ ID NO: 139587 - RNA, 1701 nt, Artificial Sequence; identical to SEQ ID NO: 137916
  derived and/or modified CDS sequence (opt3) from hemagglutinin__InfluenzaA__AHL97456

SEQ ID NO: 139588 - RNA, 1701 nt, Artificial Sequence
  derived and/or modified CDS sequence (opt3) from hemagglutinin__InfluenzaA__AHL97468
augaagaccaucauugcccugagcuacauacucugccuuguguucgcucagaaacugcccggcaacgacaauuccacagcaacuuuguguuuagggcaccaugccgucccuaacggaacgaucguuaagaccauuacaaaugauagaaucgaggugacuaacgcgaccgaacugguacaaaauucuucaauuggugagaucugcgacaguccacaccagauacuagauggcgaaaacuguacacucaucgacgcucugcuuggggauccgcagugcgacggauuucagaauaaaaagugggaucuguucguggagaggagcaaagccuauuccaacuguuaccccuaugacgucccugauuacgcaucuuugcggucgcucguggccucaagcggcacccuggaauuuaauaacgagaguuucaauuggacugguguuacacaaaacgggaccuccucugcuugcauucgccgaagcaauuccucauuuuucagucgucugaacuggcucacgcauuuaaauuuuaaguauccagcacugaacgugacuaugcccaacaaugagcaguucgacaaacuuuacaucuggggaguccaccauccuggcaccgauaaagaccagaucuuuuuguaugcccagagcucuggcagaauuacaguguccacuaagaggucacaacaggcuguaauaccaaacauugggagccggccccgcaucagaaauauuccuaguaggaucucuaucuacuggaccauuguuaaaccaggagauauacugcuaaucaacuccacagguaaucucauugccccgcggggcuacuucaagauccgcagcgggaaaucgucuauaaugcgauccgacgcgcccauuggaaaguguaagucagaaugcaucaccccuaacggcaguaucccaaaugacaaacccuuucagaacgugaauagaauuacguauggugcauguccuagguacgucaagcagagcacucugaaacuugccacagggaugcggaacgugccagagaagcaaacccguggaaucuucggcgcuauugccggcuuuauagaaaaugggugggagggaaugauggaugguugguauggcuuccgccaccagaacuccgaggggagaggacaggcagcugaccugaaaucuacucaagccgcgaucgaucagauuaauggcaaguugaacaggcucaucgguaaaacaaaugaaaaguuccaccagaucgagaaggaauuuagcgagguggaagggcggauucaggaccuggagaaauacgucgaggauaccaagauagacuuauggucauauaacgccgaacugcucguugcacuugagaaccaacauacgaucgaucugaccgacagugaaaugaauaaauuguucgagaagacaaagaagcagcuacgagaaaacgcugaggauaugggcaauggaugcuuuaagauuuaccacaaaugugacaacgccugcaucggcuccauucgcaaugggacuuaugaucauaacguguacagagacgaggcucugaauaacagguuccagaucaagggaguagaacucaaaagcgguuacaaggacuggauacuguggaucucuuuugccauuucaugcuuccuucuguguguggcauugcucggcuuuaucaugugggccugccagaaagggaauauucgguguaacaucugcauauga

SEQ ID NO: 139589 - RNA, 1701 nt, Artificial Sequence; identical to SEQ ID NO: 138042
  derived and/or modified CDS sequence (opt3) from hemagglutinin__InfluenzaA__AHL97480

SEQ ID NO: 139590 - RNA, 1701 nt, Artificial Sequence; identical to SEQ ID NO: 138042
  derived and/or modified CDS sequence (opt3) from hemagglutinin__InfluenzaA__AHL97493

SEQ ID NO: 139591 - RNA, 1701 nt, Artificial Sequence; identical to SEQ ID NO: 139554
  derived and/or modified CDS sequence (opt3) from hemagglutinin__InfluenzaA__AHL97505

SEQ ID NO: 139592 - RNA, 1701 nt, Artificial Sequence
  derived and/or modified CDS sequence (opt3) from hemagglutinin__InfluenzaA__AHL97517
augaagaccaucauugcccugagcuacauacucugccuuguguucgcucagaaacugcccggcaacgacaauuccacagcaacuuuguguuuagggcaccaugccgucccuaacggaacgaucguuaagaccauuacaaaugauagaaucgaggugacuaacgcgaccgaacugguacaaaauucuucaauuggugagaucugcgacaguccacaccagauacuagauggcgaaaacuguacacucaucgacgcucugcuuggggauccgcagugcgacggauuucagaauaaaaagugggaucuguucguggagaggagcaaagccuauuccaacuguuaccccuaugacgucccugauuacgcaucuuugcggucgcucguggccucaagcggcacccuggaauuuaauaacgagaguuucaauuggacugguguuacacaaaacgggaccuccucugcuugcauucgccgaagcaauuccucauuuuucagucgucugaacuggcucacgcauuuaaauuuuaaguauccagcacugaacgugacuaugcccaacaaugagcaguucgacaaguuguacaucuggggaguccaccauccuggcaccgauaaagaccagauuuuucuuuaugcccagagcucuggcagaaucacaguguccacucaaaggucacagcaggcuguaauaccaaacauugggagccggccccgcaucagaaauauuccuaguaggaucucuaucuacuggaccauuguuaagccaggagauauacugcuaaucaacuccacagguaaucucauugccccgcggggcuacuucaaaauccgcagcgggaagucgucuauaaugcgauccgacgcgcccauuggaaaauguaagucagaaugcaucaccccuaacggcaguaucccaaaugacaagcccuuucagaacgugaauagaauuacguauggugcauguccuagguacgucaaacaaagcacucugaaacuugccacagggaugcggaacgugccagagaagcagacccguggaaucuucggcgcuauugccggcuuuauagaaaaugggugggagggaaugguggaugguugguauggcuuccgccaccagaacuccgaggggagaggacaagcagcugaccugaagucuacucaggccgcgaucgaucagauuaauggcaaauugaacaggcucaucgguaagacaaaugaaaaauuccaccagaucgagaaggaauuuagcgaggucgaagggcggauucaagaccuggagaaguacguugaggauaccaaaauagacuuauggucauauaacgccgaacugcucguggcacuugagaaccagcauacgaucgaucugaccgacagugaaaugaauaaguuguucgagaaaacaaagaaacagcuacgagaaaacgcugaggauaugggcaauggaugcuuuaagauuuaccacaagugugacaacgccugcaucggcuccauucgcaaugggacuuaugaucauaacguauacagagacgaggcucugaauaacagguuccagaucaaaggaguggaacucaagagcgguuacaaagacuggauacuguggaucucuuuugccauuucaugcuuccuucugugugucgcauugcucggcuuuaucaugugggccugccaaaaggggaauauucgguguaacaucugcauauga

SEQ ID NO: 139593 - RNA, 1701 nt, Artificial Sequence; identical to SEQ ID NO: 137931
  derived and/or modified CDS sequence (opt3) from hemagglutinin__InfluenzaA__AHL97529

SEQ ID NO: 139594 - RNA, 1701 nt, Artificial Sequence; identical to SEQ ID NO: 137916
  derived and/or modified CDS sequence (opt3) from hemagglutinin__InfluenzaA__AHL97541

SEQ ID NO: 139595 - RNA, 1701 nt, Artificial Sequence; identical to SEQ ID NO: 138042
  derived and/or modified CDS sequence (opt3) from hemagglutinin__InfluenzaA__AHL97553

SEQ ID NO: 139596 - RNA, 1701 nt, Artificial Sequence; identical to SEQ ID NO: 137883
  derived and/or modified CDS sequence (opt3) from hemagglutinin__InfluenzaA__AHL97565

SEQ ID NO: 139597 - RNA, 1701 nt, Artificial Sequence
  derived and/or modified CDS sequence (opt3) from hemagglutinin__InfluenzaA__AHL97577
augaagaccaucauugcccugagcuacauacucugccuuguguucgcucagaaaauccccggcaacgacaauuccacagcaacucuguguuuggggcaccaugccgucccuaacggaacgauuguuaagaccaucacaaaugauagaauugaggugacuaacgcgaccgaauuaguacaaaauucuucaaucggugagauaugcgacaguccacaccagauccuggauggcgaaaacuguacacuaauugacgcucuccugggggauccgcagugcgacggauuucagaauaaaaagugggaucuuuucguggagaggagcaaagccuauuccaacuguuaccccuaugacgucccugauuacgcaucucugcggucguugguggccucaagcggcacccucgaauuuaauaacgagaguuucaauuggacugguguuacacaaaacgggaccuccucugcuugcauccgcggaagcaauuccucauuuuucagucgacugaacuggcugacgcaucucaauuuuaaguauccagcauuaaacgugacuaugcccaacaaugagcaguucgacaagcuguacauuuggggcguccaccauccuggcaccgauaaagaccagaucuuucuuuaugcccagagcucugggcguauaacaguguccacuaagagaucacaacaggcuguaauuccaaacaucggaagcaggccccggauucgcaauaucccuaguagaaucucuauuuacuggaccauaguuaaaccaggugauaucuugcugauuaacuccacaggcaaucuaaucgccccgaggggguacuucaagauacggagcggaaaaucgucuauuaugcgcuccgacgcgcccaucggcaaguguaagucagaaugcaucaccccuaacgguaguauuccaaaugacaaacccuuucagaacgugaaucgaaucacguauggggcauguccuagauacgucaagcagagcacucucaaacuggccacaggaaugaggaacgugccagagaagcaaacccggggcauuuucggcgcuauagccggguuuaucgaaaauggaugggaggguaugguggauggcugguauggguuccgucaccagaacuccgagggacgcggccaggcagcugaccuuaaaucuacucaagccgcgauugaucagaucaaugguaagcugaacagauugaucgggaaaacaaaugaaaaguuccaccagauugagaaggaauuuagcgaggucgaaggcaggauacaggaccucgagaaauacguugaggauaccaagaucgaccuguggucauauaacgccgaauuacugguggcacucgagaaccaacauacgauugaucuuaccgacagugaaaugaauaaacuguucgagcggacaaagaaacaguugcgagaaaacgcugaggauaugggaaauggcugcuuuaagaucuaccacaagugugacaacgccugcauuggguccauccgcaauggaacuuaugaucaugacguauacagagacgaggcucuaaacaauagguuccagauaaaagguguggaacugaagcccggcuacaaagauuggauccucuggauuagcuuugccaucucuugcuuccugcuuugugucgcacuguugggguuuauuaugugggccugccagaagggaaacauccgguguaauauaugcauuuga

SEQ ID NO: 139598 - RNA, 1701 nt, Artificial Sequence; identical to SEQ ID NO: 138071
  derived and/or modified CDS sequence (opt3) from hemagglutinin__InfluenzaA__AHL97589

SEQ ID NO: 139599 - RNA, 1701 nt, Artificial Sequence; identical to SEQ ID NO: 138042
  derived and/or modified CDS sequence (opt3) from hemagglutinin__InfluenzaA__AHL97601

SEQ ID NO: 139600 - RNA, 1701 nt, Artificial Sequence; identical to SEQ ID NO: 137906
  derived and/or modified CDS sequence (opt3) from hemagglutinin__InfluenzaA__AHL97613

SEQ ID NO: 139601 - RNA, 1701 nt, Artificial Sequence; identical to SEQ ID NO: 139588
  derived and/or modified CDS sequence (opt3) from hemagglutinin__InfluenzaA__AHL97625

SEQ ID NO: 139602 - RNA, 1701 nt, Artificial Sequence; identical to SEQ ID NO: 137916
  derived and/or modified CDS sequence (opt3) from hemagglutinin__InfluenzaA__AHL97637

SEQ ID NO: 139603 - RNA, 1701 nt, Artificial Sequence
  derived and/or modified CDS sequence (opt3) from hemagglutinin__InfluenzaA__AHL97661
augaagaccaucauugcccugggcuacauacucugccuuguguucgcucagaaacugcccgggaacgacaauagcacagcaacuuuguguuuaggacaccaugccgucccuaacgguacgaucguuaagaccauuacaaaugauagaaucgaggugacuaacgcgaccgaacugguacaaaauuccucuauuggcgagaucugcgacucaccacaccagauacuagauggggaaaacuguacacucaucgacgcucugcuuggagauccgcagugcgacggcuuucagaauaaaaagugggaucuguucguggagaggaguaaagccuauagcaacuguuaccccuaugacgucccugauuacgcauccuugcggucucucguggccucgucagguacccuggaauuuaauaacgagagcuucaauuggacugggguuacacaaaacggaaccaguuccgcuugcauucgccgaucuaauagcuccuuuuucucacgucugaacuggcucacgcauuuaaauuuuaaguauccagcacugaacgugacuaugcccaacaaugagcaguucgacaaacuuuacaucuggggcguccaccauccuggcaccgauaaagaccagaucuuuuuguaugcccagaguagcgggagaauuacagugucuacuaagaggucccaacaggcuguaauaccaaacauuggaucacggccccgcaucagaaauauuccuagcaggaucaguaucuacuggaccauuguuaaaccaggugauauacugcuaaucaacucuacaggcaaucucauugccccgcggggguacuucaagauccgcuccggaaaaagcucgauaaugcgaucugacgcgcccauuggcaaguguaaguccgaaugcaucaccccuaacgguucaaucccaaaugacaaacccuuucagaacgugaauagaauuacguauggggcauguccuagguacgucaagcagaguacucugaaacuugccacaggaaugcggaacgugccagagaagcaaacccguggcaucuucggcgcuauugccggguuuauagaaaauggaugggaggguaugguggauggcugguauggguuccgccaccagaacagcgagggaagaggccaggcagcugaccugaaauccacucaagccgcgaucgaucagauuaaugguaaguugaacaggcucaucgggaaaacaaaugaaaaguuccaccagaucgagaaggaauuuucugaggucgaaggccggauucaggaccuggagaaauacguugaggauaccaagauagacuuauggagcuauaacgccgaacugcucguggcacuugagaaccaacauacgaucgaucugaccgacucagaaaugaauaaauuguucgagaagacaaagaagcagcuacgagaaaacgcugaggauaugggaaauggcugcuuuaagauuuaccacaaaugugacaacgccugcaucgggaguauucgcaauggaacuuaugaucauaacguauacagagacgaggcucugaauaacagguuccagaucaaggguguggaacucaaauccggcuacaaggacuggauacuguggaucagcuuugccauuucuugcuuccuucugugugucgcauugcucggguuuaucaugugggccugccagaaaggaaauauucgguguaacaucugcauauga

SEQ ID NO: 139604 - RNA, 1701 nt, Artificial Sequence
  derived and/or modified CDS sequence (opt3) from hemagglutinin__InfluenzaA__AHL97673
augaagaccacaaucgcccugagcuacauucucugccuuguguucgcucaggagcugcccggcaacgacgauuccacugcaacguuguguuuagggcaccaugccgucccuaauggaaccauaguuaaaacaaucacuaacgaccaaauugaagugaccaaugcgacagagcugguacagucuucaaguaccggugaaaucugcaacagcccacaccagauucuagauggcgagaauuguacucucaucgacgcucugcuuggggauccgcagugcgacggauuucaaaacaagaaaugggaucuguucguggaaagauccaaggcccauucuaauuguuaucccuacgacgucccugauuaugcaucguugaggucacucguggccagcaguggcacacuggaguuuaacaaugaguccuucaacuggaccgguguuacgcagaaugggacuucuagcgcuugcauacggcgcuccaacaauucauuuuucagucgacugaacuggcucacccacuuaaauuuuaaauacccagcacugaacgugacaaugcccaacaaugaacaguucgacaaguuguauaucuggggaguccaucacccuggcacugauaaggaccagauuuuucuuuacgcccaagcuagcggccguaucaccgugucuacaaaaagaucccagcaggccguaauuccaaacaucgggucaaggccccggguucgcaauauaccuagcagagugaguauuuauuggaccaucgucaagccaggagauauucugcuaaucaacucuacggguaaucucaucgcgccgaggggcuacuucaaaauucgguccggaaagagcucgauaaugcgcucugacgcacccaucgggaaauguaacuccgccugcauuacuccuaauggcucaaucccaaacgacaagcccuuucagaaugugaaccgaauaacauacggugcuuguccuagauaugugaagcaaaauacccugaaacuugccacugggaugaggaacgucccagagaagcagacacggggaauuuucggcgcaaucgcuggcuuuaucgaaaaugggugggagggaaugguugaugguugguacggcuuccgucaccagaacagugaggggcgcggacaagccgcggaccugaaaagcacccaggccgcaauugaucagaucaauggcaaguugaacagacucauugguaaaacgaacgaaaaguuccaucagauagagaaagaauuuuccgagguggaagggaggauccaagaccuggagaaguauguagaggauaccaagauugacuuauggucuuacaaugcugaacugcucguggcccuugagaaccagcacacaaucgaucugacugacagcgaaaugaauaaauuguucgagaagaccaaaaagcagcuacgggaaaacgcugaggauaugggcaauggaugcuuuaaaaucuaucauaagugugacaacgccugcauuggcucaauacgaaaugggacauacgaucacgacgucuaucgcgacgaggcacugaacaauagauuccagaucaagggaguggaacucaaaagugguuacaaggauuggauucuguggaucuccuuugccauuagcugcuuccuucuguguguugcuuugcucggcuuuaucaugugggcgugccaaaaagggaacauaagguguaauaucugcauuuga

SEQ ID NO: 139605 - RNA, 1701 nt, Artificial Sequence; identical to SEQ ID NO: 138042
  derived and/or modified CDS sequence (opt3) from hemagglutinin__InfluenzaA__AHL97685

SEQ ID NO: 139606 - RNA, 1701 nt, Artificial Sequence
  derived and/or modified CDS sequence (opt3) from hemagglutinin__InfluenzaA__AHL97697
augaagaccaucauugcccugagcuacauacucugccuuguguucgcucagaaacugcccggcaacgacaauuccacagcaacuuuguguuuagggcaccaugccgucccuaacggaacgaucguuaagaccauuacaaaugauagaaucgaggugacuaacgcgaccgaacugguacaaaauucuucaauuggugagaucugcgacaguccacaccagauacuagauggcgaaaacuguacacucaucgacgcucugcuuggggauccgcagugcgacggauuucagaauaaaaagugggaucuguucguggagaggggcaaagccuauagcaacuguuaccccuaugacgucccugauuacgcauccuugcggucucucguggccucgucagguacccuggaauuuaauaacgagagcuucaauugggcugggguuacucaaaacggaacaaguuccgcaugcauucgcggcucuaauagcuccuuuuucucacgacugaacuggcucacccauuuaaauuuuaaguauccagcccugaacgugacgaugcccaacaaugagcaguucgacaaguuguacaucuggggcguccaccauccugggacugauaaagaccagauuuuucuuuaugcucagaguagcggacguaucaccgugucuacaaagagaucccaacaggccguaauaccaaacauugguucaaggccccggauccgcaauauuccuagcagaaucaguaucuacuggacuauuguuaaaccaggcgauauacugcuaaucaacucuaccgggaaucucauugcgccgaggggauacuucaagauccgguccggcaaaagcucgauaaugcgcucugacgcacccauugguaaguguaaguccgaaugcaucacaccuaacgggucaaucccaaaugacaaacccuuucagaacgugaaucgaauuaccuauggagccuguccuagauacgucaagcagaguacgcugaaacuugcuacuggcaugaggaacgugccagagaagcaaacacggggcaucuucggggccauugcaggauuuauagaaaaugguugggagggcaugguggaugggugguauggauuccgucaccagaacagcgagggccgcggucaggcugccgaccugaaauccacccaagcggccaucgaucagauuaaugggaaguugaacagacucaucggcaaaacuaaugaaaaguuccaccagaucgagaaggaauuuucugaggucgaaggaaggauucaggaccuggagaaauacguugaggauacaaagauagacuuauggagcuauaacgcagaacugcucguggcucuugagaaccaacauaccaucgaucugacggacucagaaaugaauaaauuguucgagaagaccaaaaagcagcuacgggaaaacgccgaggauaugggcaaugggugcuuuaagauuuaccacaaaugugacaacgcuugcaucggaaguauucgaaaugguacauaugaucaugacguauaccgcgacgaggcccugaacaauagauuccagaucaagggcguggaacucaaauccggguacaaggauuggauacuguggaucagcuuugcaauuucuugcuuccuucugugugucgccuugcucggauuuaucaugugggcuugccagaaaggcaacauuagguguaauaucugcauauga

SEQ ID NO: 139607 - RNA, 1701 nt, Artificial Sequence; identical to SEQ ID NO: 137916
  derived and/or modified CDS sequence (opt3) from hemagglutinin__InfluenzaA__AHL97709

SEQ ID NO: 139608 - RNA, 1701 nt, Artificial Sequence; identical to SEQ ID NO: 138042
  derived and/or modified CDS sequence (opt3) from hemagglutinin__InfluenzaA__AHL97721

SEQ ID NO: 139609 - RNA, 1701 nt, Artificial Sequence; identical to SEQ ID NO: 137916
  derived and/or modified CDS sequence (opt3) from hemagglutinin__InfluenzaA__AHL97733

SEQ ID NO: 139610 - RNA, 1701 nt, Artificial Sequence; identical to SEQ ID NO: 137906
  derived and/or modified CDS sequence (opt3) from hemagglutinin__InfluenzaA__AHL97745

SEQ ID NO: 139611 - RNA, 1701 nt, Artificial Sequence; identical to SEQ ID NO: 138042
  derived and/or modified CDS sequence (opt3) from hemagglutinin__InfluenzaA__AHL97757

SEQ ID NO: 139612 - RNA, 1701 nt, Artificial Sequence; identical to SEQ ID NO: 138042
  derived and/or modified CDS sequence (opt3) from hemagglutinin__InfluenzaA__AHL97769

SEQ ID NO: 139613 - RNA, 1701 nt, Artificial Sequence
  derived and/or modified CDS sequence (opt3) from hemagglutinin__InfluenzaA__AHL97781
augaagaccaucauugcccugagcuacauacucugccuuguguucgcucaggagcugcccggcaacgacgauuccacagcaacuuuguguuuagggcaccaugccgucccuaauggaacgaucguuaaaaccauuacaaacgaccaaaucgaagugacuaaugcgaccgagcugguacagucuucaaguacaggugaaauuugcaacagcccacaccagauccuagauggcgagaauuguacccucauagacgcucugcuuggggauccgcagugcgacggauuucaaaacaagaaaugggaucuguucguggaaagauccaaggcccauucuaauuguuaucccuacgacgucccugauuaugcaucguugaggucacucguggccagcaguggcacucuggaguuuaacaaugaguccuucaacuggacagguguuacccagaaugggacgucuagcgcuugcauccggcgcuccaacaauucauuuuucagucgacugaacuggcucacucacuuaaauuuuaaauacccagcacugaacgugaccaugcccaacaaugaacaguucgacaagcuguauauuuggggaguccaucacccuggcacagauaaggaccagaucuuuuuguacgcccaagcuagcggccguauuacugugucuaccaaaagaucccagcaggccguaaucccaaacauagggucaaggccccggguucgcaauauuccuagcagagugaguaucuauuggacaauugucaagccaggagauauccugcuaaucaacucuaccgguaaucucauugcgccgaggggcuacuucaaaauacgguccgggaacagcucgaucaugcgcucugacgcacccauuggaaaguguaauuccacgugcaucacuccuaacggcucaauaccaaaugacaaacccuuucagaacgugaaucgaauuacauacggugccuguccuagauaugugaagcaaaacacccugaaacuugcuacugggaugaggaaugucccagagaagcagacacggggaaucuucggcgccaucgcaggcuuuauugaaaacgggugggagggaaugguugaugguugguacggcuuccgucaccagaauagugaggggcgcggacaagcugccgaccuuaagagcacccaggcggccaucgaucagauuaacggcaaauugaacagacucauagguaagacgaaugaaaaauuccaucagaucgagaaggaauuuuccgagguggaagggaggauucaagaccuggagaaauauguagaggauaccaagaucgacuuauggucuuacaacgcagaacugcucguggcucuugagaaucagcacacaaucgaucugacugacagcgaaaugaacaaguuguucgagaaaaccaagaaacagcuacgggaaaaugccgaggauaugggcaacggaugcuuuaagauuuaucauaaaugugacaaugcuugcauaggcucaauccgaaacgggacauacgaucacgacgucuaucgcgacgaggcccugaauaacagauuccagauuaagggaguggaacucaagagugguuacaaagauuggauccuguggauuuccuuugcaaucagcugcuuccuucuguguguugccuugcucggcuuuauaaugugggcuugccaaaaggggaauaucagguguaacauuugcaucuga

SEQ ID NO: 139614 - RNA, 1701 nt, Artificial Sequence; identical to SEQ ID NO: 138042
  derived and/or modified CDS sequence (opt3) from hemagglutinin__InfluenzaA__AHL97793

SEQ ID NO: 139615 - RNA, 1701 nt, Artificial Sequence
  derived and/or modified CDS sequence (opt3) from hemagglutinin__InfluenzaA__AHL97805
augaagaccaucauugcccugagcuacauacucugccuuguguucgcucagaaacugcccggcaacgacaauuccacagcaacuuuguguuuagggcaccaugccgucccuaacggaacgaucguuaagaccauuacaaaugauagaaucgaggugacuaacgcgaccgaacugguacaaaauucuucaauuggugagaucugcgacaguccacaccagauacuagauggcgaaaacuguacacucaucgacgcucugcuuggggauccgcagugcgacggauuucagaauaaaaagugggaucuguucguggagaggagcaaagccuauuccaacuguuaccccuaugacgucccugauuacgcaucuuugcggucgcucguggccucaagcggcacccuggaauuuaauaacgagaguuucaauugggcugguguuacucaaaacgggacauccucugcaugcauucgcggaagcaauuccucauuuuucagucgacugaacuggcucacccauuuaaauuuuaaguauccagcccugaacgugacgaugcccaacaaugagcaguucgacaaguuguacaucuggggcguccaccauccuggcacugauaaagaccagauuuuucuuuaugcucagagcucugggcguaucaccguguccacaaagagaucacaacaggccguaauaccaaacauuggaagcaggccccggauccgcaauauuccuaguagaaucucuaucuacuggacuauuguuaaaccaggugauauacugcuaaucaacuccaccggcaaucucauugcgccgaggggguacuucaagauccggagcggaaaaucgucuauaaugcgcuccgacgcacccauuggcaaguguaagucagaaugcaucacaccuaacgguaguaucccaaaugacaaacccuuucagaacgugaaucgaauuaccuauggggccuguccuagauacgucaagcagagcacgcugaaacuugcuacuggaaugaggaacgugccagagaagcaaacacggggcaucuucggcgccauugcaggguuuauagaaaauggaugggaggguaugguggauggcugguauggguuccgucaccagaacuacgagggacgcggccaggcugccgaccugaaauccacccaagcggccaucgaucagauuaaugguaaguugaacagacucaucgggaaaacuaaugaaaaguuccaccagaucgagaaggaauuuucugaggucgaaggcaggauucaggaccuggagaaauauguugaggauacaaagauagacuuauggagcuacaacgcagaacugcucguggcucuugagaaccaacauaccaucgaucugacggacucagaaaugaauaaauuguucgagaagaccaaaaagcagcuacgggaaaacgccgaggauaugggaaauggcugcuuuaagauuuaucacaaaugugacaacgcuugcaucgggaguauucgaaauggaacauacgaucaugacguauaccgcgacgaggcccugaacaauagauuccagaucaaggguguggaacucaaauccggcuauaaggauuggauacuguggaucagcuuugcaauuucuugcuuccuucugugugucgccuugcucggguuuaucaugugggcuugccagaaaggaaacauuagguguaauaucugcauauga

SEQ ID NO: 139616 - RNA, 1701 nt, Artificial Sequence; identical to SEQ ID NO: 137916
  derived and/or modified CDS sequence (opt3) from hemagglutinin__InfluenzaA__AHL97817

SEQ ID NO: 139617 - RNA, 1701 nt, Artificial Sequence; identical to SEQ ID NO: 139606
  derived and/or modified CDS sequence (opt3) from hemagglutinin__InfluenzaA__AHL97829

SEQ ID NO: 139618 - RNA, 1701 nt, Artificial Sequence; identical to SEQ ID NO: 138042
  derived and/or modified CDS sequence (opt3) from hemagglutinin__InfluenzaA__AHL97841

SEQ ID NO: 139619 - RNA, 1701 nt, Artificial Sequence; identical to SEQ ID NO: 138042
  derived and/or modified CDS sequence (opt3) from hemagglutinin__InfluenzaA__AHL97853

SEQ ID NO: 139620 - RNA, 1701 nt, Artificial Sequence; identical to SEQ ID NO: 138042
  derived and/or modified CDS sequence (opt3) from hemagglutinin__InfluenzaA__AHL97865

SEQ ID NO: 139621 - RNA, 1701 nt, Artificial Sequence; identical to SEQ ID NO: 138042
  derived and/or modified CDS sequence (opt3) from hemagglutinin__InfluenzaA__AHL97877

SEQ ID NO: 139622 - RNA, 1701 nt, Artificial Sequence; identical to SEQ ID NO: 137916
  derived and/or modified CDS sequence (opt3) from hemagglutinin__InfluenzaA__AHL97889

SEQ ID NO: 139623 - RNA, 1701 nt, Artificial Sequence; identical to SEQ ID NO: 137916
  derived and/or modified CDS sequence (opt3) from hemagglutinin__InfluenzaA__AHL97901

SEQ ID NO: 139624 - RNA, 1701 nt, Artificial Sequence; identical to SEQ ID NO: 137906
  derived and/or modified CDS sequence (opt3) from hemagglutinin__InfluenzaA__AHL97913

SEQ ID NO: 139625 - RNA, 1701 nt, Artificial Sequence
  derived and/or modified CDS sequence (opt3) from hemagglutinin__InfluenzaA__AHL97925
augaagaccaucauugcccugagcuacauacucugccuuguguucgcucagaaacugcccggcaacgacaauuccacagcaacuuuguguuuagggcaccaugccgucccuaacggaacgaucguuaagaccauuacaaaugauagaaucgaggugacuaacgcgaccgaacugguacaaaauucuucaauuggugagaucugcgacaguccacaccagauacuagauggcgaaaacuguacacucaucgacgcucugcuuggggauccgcagugcgacggauuucagaauaaaaagugggaucuguucguggagaggagcaaagccuauuccaacuguuaccccuaugacgucccugauuacgcaucuuugcggucgcucguggccucaagcggcacccuggaauuuaauaacgagaguuucaauuggacugguguuacacaaaacgggaccuccucugcuugcauucgccgaagcaauaacuccuuuuucucacgucugaauuggcucacgcauaguaacuuuaaguauccagcauuaaacgugacuaugcccaauaacgagcaguucgacaagcuguacaucuggggaguccaccauccuggcaccgauaaagaccagauuuuucuuuaugcccagagcucuggcagaaucacaguguccacuaagaggucacaacaggcuguaauaccaaauauugggagccggccccgcaucagaaacauuccuaguaggaucucuaucuacuggaccauuguuaaaccaggagauauauugcugaucaauuccacagguaaccuaauugccccgcggggcuacuucaagauccgcagcgggaaaucgucuauaaugcgauccgacgcgcccauuggaaaguguaagucagaaugcaucaccccuaauggcaguaucccaaacgacaaacccuuucagaaugugaacagaauuacguauggugcauguccuagguacgucaagcagagcacucucaaacuggccacagggaugcggaaugugccagagaagcaaacccguggaaucuucggcgcuauugccggcuuuauagaaaacgggugggagggaaugauggaugguugguauggcuuccgccaccaaaauuccgaggggagaggacaggcagcugaccuuaaaucuacucaggccgcgaucgaucagauuaacggcaagcugaauagguugaucgguaaaacaaacgaaaaguuccaccagaucgagaaggaauuuagcgagguggaagggcggauucaggaccucgagaaauacgucgaggauaccaagauagaccuguggucauauaacgccgaauuacugguugcacucgagaaucaacauacgaucgaucuuaccgacagugaaaugaacaaacuguucgagaagacuaaaaaguugcuacgagaaaaugcugaggauaugggcaacggaugcuuuaagauuuaccacaaaugugacaaugccugcaucggcuccauucgcaacgggacauaugaucaugacguguacagagacgaggcucugaauaacagguuccagaucaagggaguagaacucaaaagcgguuacaaggauuggauacuguggaucucuuuugccauuucaugcuuccuucuguguguggcauugcucggcuuuaucaugugggccugccagaaagggaauauucgguguaacaucugcauauga

SEQ ID NO: 139626 - RNA, 1701 nt, Artificial Sequence; identical to SEQ ID NO: 137906
  derived and/or modified CDS sequence (opt3) from hemagglutinin__InfluenzaA__AHL97937

SEQ ID NO: 139627 - RNA, 1701 nt, Artificial Sequence; identical to SEQ ID NO: 139586
  derived and/or modified CDS sequence (opt3) from hemagglutinin__InfluenzaA__AHL97949

SEQ ID NO: 139628 - RNA, 1701 nt, Artificial Sequence; identical to SEQ ID NO: 137916
  derived and/or modified CDS sequence (opt3) from hemagglutinin__InfluenzaA__AHL97961

SEQ ID NO: 139629 - RNA, 1701 nt, Artificial Sequence; identical to SEQ ID NO: 137916
  derived and/or modified CDS sequence (opt3) from hemagglutinin__InfluenzaA__AHL97973

SEQ ID NO: 139630 - RNA, 1701 nt, Artificial Sequence; identical to SEQ ID NO: 137916
  derived and/or modified CDS sequence (opt3) from hemagglutinin__InfluenzaA__AHL97985

SEQ ID NO: 139631 - RNA, 1701 nt, Artificial Sequence
  derived and/or modified CDS sequence (opt3) from hemagglutinin__InfluenzaA__AHL97997
augaagaccaucauugcccugagcuacauacucugccuuguguucgcucagaaacugcccggcaacgacaauuccacagcaacuuuguguuuagggcaccaugccgucccuaacggaacgaucguuaagaccauuacaaaugauagaaucgaggugacuaacgcgaccgaacugguacaaaauucuucaauuggugagaucugcgacaguccacaccagauacuagauggcgaaaacuguacacucaucgacgcucugcuuggggauccgcagugcgacggauuucagaauaaaaagugggaucuguucguggagaggagcaaagccuauuccaacuguuaccccuaugacgucccugauuacgcaucuuugcggucgcucguggccucaagcggcacccuggaauuuaauaacgagaguuucaauuggacugguguuacacaaaacgggaccuccucugcuugcauucgccgaagcaauuccucauuuuucagucgucugaacuggcucacgcauuuaaauuuuaaguauccagcacugaacgugacuaugcccaacaaugagcaguucgacaaacuuuacaucuggggaguccaccauccuggcaccgauaaagaccagaucuuuuuguaugcccagagcucuggcagaauuacaguguccacuaagaggucacaacaggcuguaauaccaaacauugggagccggccccgcaucagaaauauuccuaguaggaucucuaucuacuggaccauuguuaaaccaggagauauacugcuaaucaacuccacagguaaucucauugccccgcggggcuacuucaagauccgcagcgggaaaucgucuauaaugcgauccgacgcgcccauuggaaaguguaagucagaaugcaucaccccuaacggcaguaucccaaaugacaaacccuuucagaacgugaauagaauuacguauggugcauguccuagguacgucaagcagagcacucugaaacuugccacagggaugcggaacgugccagagaagcaaacccguggaaucuucggcgcuauugccggcuuuauagaaaaugggugggagggaaugguggaugguugguauggcuuccgccaccagaacuccgaggggagaggacaggcagcugaccugaaaucuacucaagccgcgaucgaucagauuaauggcaaguugaacaggcucaucgguaaaacaaaugaaaaguuccaccagaucgagaaggaauuuagcgaggucgaagggcggauucaggaccuggagaaauacguugaggauaccaagauagacuuauggucauauaacgccgaacugcucguggcacuugagaaccaacauacgaucgaucugaccgacagugaaaugaauaaauuguucgagaagacaaagaagcagcuacgagaaaacgcugaggauaugggcaauggaugcuuuaagauuuaccacaaaugugacaacgccugcaucggcuccauucgcaaugggacuuaugaucaugacguauacagagacgaggcucugaacaauagguuccagauccggggaguggaacucaagagcgguuacaaagauuggauacuguggaucucuuuugccauuucaugcuuccuucugugugucgcauugcucggcuuuaucaugugggccugccagaaggggaacauucgcuguaauaucugcauauga

SEQ ID NO: 139632 - RNA, 1701 nt, Artificial Sequence; identical to SEQ ID NO: 138042
  derived and/or modified CDS sequence (opt3) from hemagglutinin__InfluenzaA__AHL98009

SEQ ID NO: 139633 - RNA, 1701 nt, Artificial Sequence
  derived and/or modified CDS sequence (opt3) from hemagglutinin__InfluenzaA__AHL98021
augaagaccaucauugcccugagcuacauacucugccuuguguucgcucagaaacugcccggcaacgacaauuccacagcaacuuuguguuuagggcaccaugccgucccuaacggaacgaucguuaagaccauuacaaaugauagaaucgaggugacuaacgcgaccgaacugguacaaaauucuucaauugguaaaaucugcgacaguccacaccagauacuagauggcgagaacuguacacucauggacgcucugcuuggggauccgcagugcgacggauuucagaauaagaaaugggaucuguucguggaaaggagcaaggccuauuccaacuguuaccccuaugacgucccugauuacgcaucuuugcggucgcucguggccucaagcggcacccuggaguuuaauaacgaaaguuucaauugggcugguguuacucaaaacgggacauccucugcaugcauccgccgaagcaauuccucauuuuucagucgucugaacuggcucacccauuuaaauuuuaaguauccagcccugaacgugacgaugcccaacaaugagcaguucgacaaacuuuacauuuggggaguccaccauccuggcacugauaaggaccagaucuuuuuguaugcucagagcucuggcagaauuaccguguccacaaaaaggucacaacaggccguaaucccaaacauagggagccggccccgcauuagaaauaucccuaguaggauuucuaucuacuggacuaucguuaagccaggagauauucugcuaauaaacuccaccgguaaucucaucgcgccgcggggcuacuucaaaauucgcagcgggaagucgucuaucaugcgauccgacgcacccauaggaaaguguaaaucagagugcauuacaccuaacggcaguaucccaaaugacaagcccuuucagaacgugaauagaaucaccuauggugccuguccuagguacgucaaacagagcacgcugaaacuugcuacugggaugcggaacgugccagaaaaacaaacacguggaauuuucggcgccaucgcaggcuuuauugagaaugggugggaaggaaugauggaugguugguauggcuuccgccaccagaacuccgaggggagaggacaggcugccgaccugaagucuacccaagcggccauagaucagaucaauggcaaauugaacaggcucauugguaagacuaaugagaaguuccaccagaucgaaaaagaguuuagcgaaguggaggggcggauccaggaccuggaaaaguacgucgaggauacaaaaauugacuuauggucauauaacgcagagcugcucguugcucuugaaaaccaacauaccauagaucugacggacagugagaugaauaaguuguucgaaaagaccaagaagcagcuacgagagaacgccgaagauaugggcaauggaugcuuuaaaaucuaccacaagugugacaacgcuugcauuggcuccauccgcaaugggacauaugaucauaacguguacagagacgaggcccugaauaacagguuccagauuaaaggaguagagcucaagagcgguuacaaagacuggauccuguggauaucuuuugcaaucucaugcuuccuucuguguguggccuugcucggcuuuauuaugugggcuugccagaaggggaauauccgguguaacauuugcaucuga

SEQ ID NO: 139634 - RNA, 1701 nt, Artificial Sequence; identical to SEQ ID NO: 137916
  derived and/or modified CDS sequence (opt3) from hemagglutinin__InfluenzaA__AHL98033

SEQ ID NO: 139635 - RNA, 1701 nt, Artificial Sequence; identical to SEQ ID NO: 139513
  derived and/or modified CDS sequence (opt3) from hemagglutinin__InfluenzaA__AHL98045

SEQ ID NO: 139636 - RNA, 1701 nt, Artificial Sequence; identical to SEQ ID NO: 139513
  derived and/or modified CDS sequence (opt3) from hemagglutinin__InfluenzaA__AHL98057

SEQ ID NO: 139637 - RNA, 1701 nt, Artificial Sequence; identical to SEQ ID NO: 139513
  derived and/or modified CDS sequence (opt3) from hemagglutinin__InfluenzaA__AHL98069

SEQ ID NO: 139638 - RNA, 1701 nt, Artificial Sequence
  derived and/or modified CDS sequence (opt3) from hemagglutinin__InfluenzaA__AHL98081
augaagaccaucauugcccugagcuacauacucugccuuguguucgcucagaaacugcccggcaacgacaauuccacagcaacuuuguguuuagggcaccaugccgucccuaacggaacgaucguuaagaccauuacaaaugauagaaucgaggugacuaacgcgaccgaacugguacaaaauucuucaauuggugagaucugcgacaguccacaccagauacuagauggcgaaaacuguacacucaucgacgcucugcuuggggauccgcagugcgacggauuucagaauaaaaagugggaucuguucguggagaggagcaaagccuauuccaacuguuaccccuaugacgucccugauuacgcaucuuugcggucgcucguggccucaagcggcacccuggaauuuaauaacgagaguuucaauuggacugguguuacacaaaacgggaccuccucugcuugcauucgcaagagcaauuccucauuuuucagucgacugaacuggcucacgcauuuaaauuuuaaguauccagcacugaacgugacuaugcccaacaaugagcaguucgacaaacuuuacaucuggggaguccaccauccuggcaccgauaaggaccagaucuuuuuguaugcccagagcucuggccguauuacaguguccacucaaagaucacagcaggcuguaauaccaaacauugggagcaggccccggauccgcaauauuccuaguagaaucucuaucuacuggaccauuguuaaaccaggagauauacugcuaaucaacuccacagguaaucucauugccccgaggggcuacuucaagauccggagcgggaaaucgucuauaaugcgcuccgacgcgcccauuggaaaguguaagucagaaugcaucaccccuaacggcaguaucccaaaugacaaacccuuucagaacgugaaucgaauuacguauggugcauguccuagauacgucaagcaaagcacucugaaacuugccacagggaugaggaacgugccagagaagcagacccggggaaucuucggcgcuauugccggcuuuauagaaaaugggugggagggaaugguggaugguugguauggcuuccgucaccagaacuccgaggggcgcggacaagcagcugaccugaaaucuacucaggccgcgaucgaucagauuaauggcaaguugaacagacucgucgguaaaacaaaugaaaaguuccaccagaucgagaaggaauuuagcgagguugaagggaggauccaagaccuggagaaauacguggaggauaccaagauugacuuauggucauauaacgccgaacugcucguagcacuugagaaccagcauacgauagaucugaccgacagugaaaugaauaaauuguucgagaagacuaaaaagcagcuacgggaaaacgcugaggauaugggcaauggaugcuuuaagaucuaccacaaaugugacaacgccugcauuggcuccauccgaaaugggacauaugaucaugacguguaccgcgacgaggcucugaacaauagauuccagauuaagggagucgaacucaaaagcgguuacaaggauuggauccuguggauaucuuuugccaucucaugcuuccuucuguguguggcauugcucggcuuuauuaugugggccugccaaaaagggaacaucagguguaauauuugcaucuga

SEQ ID NO: 139639 - RNA, 1701 nt, Artificial Sequence; identical to SEQ ID NO: 137906
  derived and/or modified CDS sequence (opt3) from hemagglutinin__InfluenzaA__AHL98093

SEQ ID NO: 139640 - RNA, 1701 nt, Artificial Sequence
  derived and/or modified CDS sequence (opt3) from hemagglutinin__InfluenzaA__AHL98105
augaaggccauccugguggucaugcucuacaccuucgcuacagcaaacgccgacacucuuugcauuggcuaucacgcgaauaacagcacggauaccguugacacagugcuggagaaaaauguaacugugacccauuccgucaacuuguuagaagauaagcacaaugggaaacuguguaagcuaagaggaguggcuccccuccaucuggguaaaugcaacauagccggcuggauccuugggaauccugagugugaaucucugucaacagcaaguagcugguccuacauuguugagaccucuggaucggacaacggcacuugcuauccaggugauuuuaucgacuacgaagaguugagggagcagcucucaagcgugaguuccuucgaacgguuugagauuuucccgaagacaucuagcuggcccaaucacgauuccaacaagggggucaccgccgcuuguccucaugcaggagccaaaggcuuuuauaagaaucugaucuggcuggugaaaaagggcaacucauacccaaaacucaguauaagcuauaucaaugacaaggggaaggaaguauuaguucugugggguauucaccaccccucuacgacugcugaucaacagucccuuuaccagaacgccgacaccuacguguucgucggagcgucacgcuauagcaaaaaguuuaaaccugagaucgcaauucgaccaaaggugcgugaucaggagggcagaaugaauuacuauuggacauugguggaacccggggacaaaaucacuuucgaggccaccggaaaccuggucguuccuagguacgcuuuugccauggaacggaacgcaggcagugguauaauuaucucugauacaccagugcaugacugcaauaccacgugucaaacuccgaagggggcuauuaacacaucccuacccuuccagaauauccacccuaucaccauuggaaaaugcccaaaguauguaaagagcacuaaacuccgccuggccacaggccuuagaaacgugcccucgauacagucuaggggccuguuuggggcgaucgccggauucauugaggguggcuggaccgggauggucgacggaugguacggcuaucaucaccagaaugaacaagguuccggguacgcagcugauuugaagucaacgcagaacgccaucgacaaaauaaccaauaaggugaacaguguuauugagaaaaugaauacacaguuuacugcugugggcaaggaguucaaccaccucgaaaagcggaucgagaaucugaacaaaaaggucgaugacggauucuuagauaucuggaccuacaaugccgaacugcucgugcuucuggagaacgaacgcacauuggacuaucaugauagcaauguuaaaaaccuauacgagaagguacgaaaccagcugaaaaauaacgcaaaggagauuggcaauggguguuuugaguucuaucacaagugcgacaacacuuguauggaauccgugaaaaauggaaccuacgauuauccuaaguacucugaagaggccaaacucaacagagaagagaucgacggugucaagcuggagagcacaaggauuuaucaaauacuugcuaucuacucaaccgcggcaaguucccugguguuggucgugagccucggcgccauuucuuuuuggaugugcucaaaugggagucugcagugccggaucuguaucuga

SEQ ID NO: 139641 - RNA, 1701 nt, Artificial Sequence; identical to SEQ ID NO: 137906
  derived and/or modified CDS sequence (opt3) from hemagglutinin__InfluenzaA__AHL98116

SEQ ID NO: 139642 - RNA, 1701 nt, Artificial Sequence; identical to SEQ ID NO: 137916
  derived and/or modified CDS sequence (opt3) from hemagglutinin__InfluenzaA__AHL98128

SEQ ID NO: 139643 - RNA, 1701 nt, Artificial Sequence; identical to SEQ ID NO: 137906
  derived and/or modified CDS sequence (opt3) from hemagglutinin__InfluenzaA__AHL98140

SEQ ID NO: 139644 - RNA, 1701 nt, Artificial Sequence; identical to SEQ ID NO: 137906
  derived and/or modified CDS sequence (opt3) from hemagglutinin__InfluenzaA__AHL98152

SEQ ID NO: 139645 - RNA, 1701 nt, Artificial Sequence; identical to SEQ ID NO: 137916
  derived and/or modified CDS sequence (opt3) from hemagglutinin__InfluenzaA__AHL98164

SEQ ID NO: 139646 - RNA, 1701 nt, Artificial Sequence; identical to SEQ ID NO: 137916
  derived and/or modified CDS sequence (opt3) from hemagglutinin__InfluenzaA__AHL98176

SEQ ID NO: 139647 - RNA, 1701 nt, Artificial Sequence; identical to SEQ ID NO: 137906
  derived and/or modified CDS sequence (opt3) from hemagglutinin__InfluenzaA__AHL98188

SEQ ID NO: 139648 - RNA, 1701 nt, Artificial Sequence; identical to SEQ ID NO: 138071
  derived and/or modified CDS sequence (opt3) from hemagglutinin__InfluenzaA__AHL98200

SEQ ID NO: 139649 - RNA, 1701 nt, Artificial Sequence; identical to SEQ ID NO: 137906
  derived and/or modified CDS sequence (opt3) from hemagglutinin__InfluenzaA__AHL98212

SEQ ID NO: 139650 - RNA, 1701 nt, Artificial Sequence; identical to SEQ ID NO: 137906
  derived and/or modified CDS sequence (opt3) from hemagglutinin__InfluenzaA__AHL98224

SEQ ID NO: 139651 - RNA, 1701 nt, Artificial Sequence; identical to SEQ ID NO: 138042
  derived and/or modified CDS sequence (opt3) from hemagglutinin__InfluenzaA__AHL98236

SEQ ID NO: 139652 - RNA, 1701 nt, Artificial Sequence; identical to SEQ ID NO: 137916
  derived and/or modified CDS sequence (opt3) from hemagglutinin__InfluenzaA__AHL98248

SEQ ID NO: 139653 - RNA, 1701 nt, Artificial Sequence; identical to SEQ ID NO: 137906
  derived and/or modified CDS sequence (opt3) from hemagglutinin__InfluenzaA__AHL98260

SEQ ID NO: 139654 - RNA, 1701 nt, Artificial Sequence; identical to SEQ ID NO: 137916
  derived and/or modified CDS sequence (opt3) from hemagglutinin__InfluenzaA__AHL98272

SEQ ID NO: 139655 - RNA, 1701 nt, Artificial Sequence; identical to SEQ ID NO: 139512
  derived and/or modified CDS sequence (opt3) from hemagglutinin__InfluenzaA__AHL98284

SEQ ID NO: 139656 - RNA, 1701 nt, Artificial Sequence
  derived and/or modified CDS sequence (opt3) from hemagglutinin__InfluenzaA__AHL98295
augaagaccaucauugcccugagcuacauacucugccuuguguucgcucagaaaauccccggcaacgacaauuccacagcaacucuguguuuggggcaccaugccgucccuaacggaacgauuguuaagaccaucacaaaugauagaauugaggugacuaacgcgaccgaauuaguacaaaauucuucaaucggugagauaugcgacaguccacaccagauccuggauggcgaaaacuguacacuaauugacgcucuccugggggauccgcagugcgacggauuucagaauaaaaagugggaucuuuucguggagaggagcaaagccuauuccaacuguuaccccuaugacgucccugauuacgcaucucugcggucguugguggccucaagcggcacccucgaauuuaauaacgagaguuucaauugggcugguguuacucaaaacgggacauccucugcaugcauccgcggaagcaauuccucauuuuucagucgacugaacuggcugacccaucucaauuuuaaguauccagccuuaaacgugacgaugcccaacaaugagcaguucgacaagcuguacauuuggggcguccaccauccuggcacugauaaagaccagaucuuucuuuaugcucagagcucugggcguauaaccguguccacaaagagaucacaacaggccguaauuccaaacaucggaagcaggccccggauucgcaauaucccuaguagaaucucuauuuacuggacuauaguuaaaccaggugauaucuugcugauuaacuccaccggcaaucuaaucgcgccgaggggguacuucaagauacggagcggaaaaucgucuauuaugcgcuccgacgcacccaucggcaaguguaagucagaaugcaucacaccuaacgguaguauuccaaaugacaaacccuuucagaacgugaaucgaaucaccuauggggccuguccuagauacgucaagcagagcacgcucaaacuggcuacuggaaugaggaacgugccagagaagcaaacacggggcauuuucggcgccauagcaggguuuaucgaaaauggaugggaggguaugauggauggcugguauggguuccgucaccagaacuccgagggacgcggccaggcugccgaccuuaaaucuacccaagcggccauugaucagaucaaugguaagcugaacagauugaucgggaaaacuaaugaaaaguuccaccagauugagaaggaauuuagcgagguggaaggcaggauacaggaccucgagaaauacgucgaggauacaaagaucgaccuguggucauauaacgcagaauuacugguugcucucgagaaccaacauaccauugaucuuacggacagugaaaugaauaaacuguucgagaagaccaaaaagcaguugcgggaaaacgccgaggauaugggaaauggcugcuuuaagaucuaccacaaaugugacaacgcuugcauuggguccauccgaaauggaacauaugaucaugacguguaccgcgacgaggcccuaaacaauagauuccagauaaaggguguagaacugaaaagcggcuacaaggauuggauccucuggauuucuuuugcaaucucaugcuuccugcuuuguguggcccuguugggguuuauuaugugggcuugccagaaaggaaacaucagguguaauauaugcauuuga

SEQ ID NO: 139657 - RNA, 1701 nt, Artificial Sequence; identical to SEQ ID NO: 139554
  derived and/or modified CDS sequence (opt3) from hemagglutinin__InfluenzaA__AHL98307

SEQ ID NO: 139658 - RNA, 1701 nt, Artificial Sequence; identical to SEQ ID NO: 137916
  derived and/or modified CDS sequence (opt3) from hemagglutinin__InfluenzaA__AHL98319

SEQ ID NO: 139659 - RNA, 1701 nt, Artificial Sequence; identical to SEQ ID NO: 137916
  derived and/or modified CDS sequence (opt3) from hemagglutinin__InfluenzaA__AHL98331

SEQ ID NO: 139660 - RNA, 1701 nt, Artificial Sequence; identical to SEQ ID NO: 138042
  derived and/or modified CDS sequence (opt3) from hemagglutinin__InfluenzaA__AHL98343

SEQ ID NO: 139661 - RNA, 1701 nt, Artificial Sequence; identical to SEQ ID NO: 139554
  derived and/or modified CDS sequence (opt3) from hemagglutinin__InfluenzaA__AHL98354

SEQ ID NO: 139662 - RNA, 1701 nt, Artificial Sequence; identical to SEQ ID NO: 137906
  derived and/or modified CDS sequence (opt3) from hemagglutinin__InfluenzaA__AHL98366

SEQ ID NO: 139663 - RNA, 1701 nt, Artificial Sequence; identical to SEQ ID NO: 137906
  derived and/or modified CDS sequence (opt3) from hemagglutinin__InfluenzaA__AHL98378

SEQ ID NO: 139664 - RNA, 1701 nt, Artificial Sequence; identical to SEQ ID NO: 137906
  derived and/or modified CDS sequence (opt3) from hemagglutinin__InfluenzaA__AHL98390

SEQ ID NO: 139665 - RNA, 1701 nt, Artificial Sequence; identical to SEQ ID NO: 137906
  derived and/or modified CDS sequence (opt3) from hemagglutinin__InfluenzaA__AHL98402

SEQ ID NO: 139666 - RNA, 1701 nt, Artificial Sequence; identical to SEQ ID NO: 137916
  derived and/or modified CDS sequence (opt3) from hemagglutinin__InfluenzaA__AHL98414

SEQ ID NO: 139667 - RNA, 1701 nt, Artificial Sequence
  derived and/or modified CDS sequence (opt3) from hemagglutinin__InfluenzaA__AHL98426
augaagaccaucauugcccugagcuacauacucugccuuguguucgcucagaaacugcccggcaacgacaauuccacagcaacuuuguguuuagggcaccaugccgucccuaacggaacgaucguuaagaccauuacaaaugauagaaucgaggugacuaacgcgaccgaacugguacaaaauucuucaauuggugagaucugcgacaguccacaccagauacuagauggcgaaaacuguacacucaucgacgcucugcuuggggauccgcagugcgacggauuucagaauaaaaagugggaucuguucguggagaggagcaaagccuauuccaacuguuaccccuaugacgucccugauuacgcaucuuugcggucgcucguggccucaagcggcacccuggaauuuaauaacgagaguuucaauuggacugguguuacacaaaacgggaccuccucugcuugcauucgccgaagcaauaacuccuuuuucucacgucugaauuggcucacgcauaguaacuuuaaguauccagcauuaaacgugacuaugcccaauaacgagcaguucgacaagcuguacaucuggggaguccaccauccuggcaccgauaaagaccagauuuuucuuuaugcccagagcucuggcagaaucacaguguccacuaagaggucacaacaggcuguaauaccaaauauugggagccggccccgcaucagaaacauuccuaguaggaucucuaucuacuggaccauuguuaaaccaggagauauauugcugaucaauuccacagguaaccuaauugccccgcggggcuacuucaagauccgcagcgggaaaucgucuauaaugcgauccgacgcgcccauuggaaaguguaagucagaaugcaucaccccuaauggcaguaucccaaacgacaaacccuuucagaaugugaacagaauuacguauggugcauguccuagguacgucaagcagagcacucucaaacuggccacagggaugcggaaugugccagagaagcaaacccguggaaucuucggcgcuauugccggcuuuauagaaaacgggugggagggaaugauggaugguugguauggcuuccgccaccaaaauuccgaggggagaggacaggcagcugaccuuaaaucuacucaggccgcgaucgaucagauuaacggcaagcugaauagguugaucgguaaaacaaacgaaaaguuccaccagaucgagaaggaauuuagcgagguggaagggcggauucaggaccucgagaaauacgucgaggauaccaagauagaccuguggucauauaacgccgaauuacugguugcacucgagaaucaacauacgaucgaucuuaccgacagugaaaugaacaaacuguucgagaagacuaaaaagcaguugcgagaaaaugcugaggauaugggcaacggaugcuuuaagauuuaccacaaaugugacaaugccugcaucggcuccauucgcaacgggacauaugaucaugacguguacagagacgaggcucuaaauaacagguuccagguaaagggaguggaacugaaaagcgguuacaaggauuggauccucuggauaucuuuugccaucucaugcuuccugcuuugugucgcacuguugggcuuuauuaugugggccugccagaaagggaauauccgguguaacauuugcaucuga

SEQ ID NO: 139668 - RNA, 1701 nt, Artificial Sequence; identical to SEQ ID NO: 138088
  derived and/or modified CDS sequence (opt3) from hemagglutinin__InfluenzaA__AHL98438

SEQ ID NO: 139669 - RNA, 1701 nt, Artificial Sequence; identical to SEQ ID NO: 138088
  derived and/or modified CDS sequence (opt3) from hemagglutinin__InfluenzaA__AHL98449

SEQ ID NO: 139670 - RNA, 1701 nt, Artificial Sequence
  derived and/or modified CDS sequence (opt3) from hemagglutinin__InfluenzaA__AHL98471
augaaggccauccuggugguccuccuuuacaccuucgcuacagcaaacgccgacacucugugcauuggcuaucacgcgaauaacagcacggauaccguugacacaguguuggagaaaaauguaacugugacccauuccgucaacuuacuggaagauaagcacaaugggaaacuauguaagcucagaggaguggcuccccugcaucuugguaaaugcaacauagccggcuggauccuggggaauccugagugugaaucuuugucaacagcaaguagcugguccuacauuguugagaccucuucgucagacaacggaacuugcuauccaggcgauuuuaucaauuacgaagaacucagggagcagcugagcaguguguccucuuucgaaaaguuugagauuuucccgaagacaagcuccuggcccaaccacgacucaaauaaaggugucaccgccgcuuguccucaugcaggggccaagaguuuuuauaaaaaccugaucuggcucgugaagaaaggaaauagcuacccaaaguuacgggaaucuuauauaaacgauaagggcaaagagguacugguucuuuggggcauccaccaccccuccacgacugcugaccaacagucauuguaccagaaugccgaugcguacguguucgucgggaccagccgcuauaguaagaaauuuaagccugagauugcaauccgaccaaaagugcgugaccaggaaggaagaaugaacuacuauuggacacugauugagcccggugauaagaucacuuucgaagccaccggcaaccuaguggucccuagguacgcuuuugccauggagcggaaugcagggucuggaauaauuaucuccgacacaccaguucaugauugcaacaccacgugucaaacuccggaaggcgcuauuaauacaagccuccccuuccagaacauccacccuaucaccauugguaaaugcccaaaguaugugaagucgacuaaacugcgccuugccacagggcugagaaauguacccucuauacaguccaggggauuguuuggcgcgaucgccggcuucauugaagggggauggaccgguaugguggacggcugguacggguaucaucaccagaacgagcaaggaucaggcuacgcagcugaccucaagaguacgcagaaugccaucgauaaaauaaccaacaaggucaauagcgugauugagaaaaugaacacacaguuuacugcuguugguaaggaguucaaucaccuggaaaagcggaucgagaacuuaaauaaaaagguggacgauggguuccuggacaucuggaccuacaacgccgaacuccuuguccuguuggagaaugagcgcacacuagauuaucaugacuccaacgugaaaaaccuguacgaaaagguacgaaaucagcucaaaaacaaugcaaaggagauuggcaacggauguuuugaguucuaucacaagugcgauaauacuuguauggagucuguuaaaaacggcaccuacgacuauccuaaguacagcgaagaggccaaacugaauagagagaagaucgauggggugaaacuugaaucaacaaggauuuaucaaauacuggcuaucuacaguaccgucgcguccagcuuggugcucgucgugucucugggagcaauuucauuuuggaugugcaguaacgguagcuuacagugccggaucuguaucuga

SEQ ID NO: 139671 - RNA, 1701 nt, Artificial Sequence; identical to SEQ ID NO: 138042
  derived and/or modified CDS sequence (opt3) from hemagglutinin__InfluenzaA__AHL98482

SEQ ID NO: 139672 - RNA, 1701 nt, Artificial Sequence; identical to SEQ ID NO: 137883
  derived and/or modified CDS sequence (opt3) from hemagglutinin__InfluenzaA__AHL98494

SEQ ID NO: 139673 - RNA, 1701 nt, Artificial Sequence; identical to SEQ ID NO: 138042
  derived and/or modified CDS sequence (opt3) from hemagglutinin__InfluenzaA__AHL98506

SEQ ID NO: 139674 - RNA, 1701 nt, Artificial Sequence; identical to SEQ ID NO: 138042
  derived and/or modified CDS sequence (opt3) from hemagglutinin__InfluenzaA__AHL98518

SEQ ID NO: 139675 - RNA, 1701 nt, Artificial Sequence; identical to SEQ ID NO: 137883
  derived and/or modified CDS sequence (opt3) from hemagglutinin__InfluenzaA__AHL98530

SEQ ID NO: 139676 - RNA, 1701 nt, Artificial Sequence; identical to SEQ ID NO: 138042
  derived and/or modified CDS sequence (opt3) from hemagglutinin__InfluenzaA__AHL98542

SEQ ID NO: 139677 - RNA, 1701 nt, Artificial Sequence; identical to SEQ ID NO: 138042
  derived and/or modified CDS sequence (opt3) from hemagglutinin__InfluenzaA__AHL98554

SEQ ID NO: 139678 - RNA, 1701 nt, Artificial Sequence; identical to SEQ ID NO: 137916
  derived and/or modified CDS sequence (opt3) from hemagglutinin__InfluenzaA__AHL98566

SEQ ID NO: 139679 - RNA, 1701 nt, Artificial Sequence; identical to SEQ ID NO: 137916
  derived and/or modified CDS sequence (opt3) from hemagglutinin__InfluenzaA__AHL98578

SEQ ID NO: 139680 - RNA, 1701 nt, Artificial Sequence; identical to SEQ ID NO: 138042
  derived and/or modified CDS sequence (opt3) from hemagglutinin__InfluenzaA__AHL98590

SEQ ID NO: 139681 - RNA, 1701 nt, Artificial Sequence; identical to SEQ ID NO: 137906
  derived and/or modified CDS sequence (opt3) from hemagglutinin__InfluenzaA__AHL98602

SEQ ID NO: 139682 - RNA, 1701 nt, Artificial Sequence; identical to SEQ ID NO: 137883
  derived and/or modified CDS sequence (opt3) from hemagglutinin__InfluenzaA__AHL98614

SEQ ID NO: 139683 - RNA, 1701 nt, Artificial Sequence
  derived and/or modified CDS sequence (opt3) from hemagglutinin__InfluenzaA__AHL98626
augaagaccaucauugcccugagcuacauacucugccuuguguucgcucaggagcugcccggcaacgacgauuccacagcaacuuuguguuuagggcaccaugccgucccuaauggaacgaucguuaaaaccauuacaaacgaccaaaucgaagugacuaaugcgaccgagcugguacagucuucaaguacaggugaaauuugcaacagcccacaccagauccuagauggcgagaauuguacccucauagacgcucugcuuggggauccgcagugcgacggauuucaaaacaagagaugggaucuguucguggaaagguccaaagcccauucuaauuguuaucccuacgacgucccugauuaugcaucguugcggucacucguggccagcaguggcacucuggaguuuaacaaugaguccuucaacuggacagguguuacccagaaugggacgucuagcgcuugcauccgccgauccaacaauucauuuuucagucgucugaacuggcucacucacuuaaauuuuaaguacccagcacugaacgugaccaugcccaacaaugaacaguucgacaaacuuuauauuuggggaguccaucacccuggcacagauaaggaccagaucuuuuuguacgcccaagcuagcggcagaauuacugugucuaccaagaggucccagcaggccguaaucccaaacauagggucacggccccgcguuagaaauauuccuagcagggugaguaucuauuggacaauugucaaaccaggagauauccugcuaaucaacucuaccgguaaucucauugcgccgcggggcuacuucaagauacgcuccgggaaaagcucgaucaugcgaucugacgcacccauuggaaaguguaacuccgccugcaucacgccuaauggcucaauaccaaacgacaaacccuuucagaaugugaacagaauuacuuacggugcuuguccuagguaugugaagcaaaauacacugaagcuggccaccgggaugcggaacgucccagagaaacagacucguggaaucuucggcgcaaucgcuggcuuuauugaaaaugggugggagggaaugguugaugguugguacggcuuccgccaccagaacagugaggggagaggacaagccgcggaccuuaagagcacacaggccgcaaucgaucagauuaauggcaaauugaacaggcucauagguaagaccaacgaaaaauuccaucagaucgagaaggaauuuuccgagguggaagggcggauucaagaccuggagaaauauguagaggauacgaagaucgacuuauggucuuacaaugcugaacugcucguggcccuugagaaccagcacaccaucgaucugacagacagcgaaaugaauaaguuguucgagaaaacuaagaaacagcuacgagaaaacgcugaggauaugggcaauggaugcuuuaagauuuaucauaaaugugacaacgccugcauaggcucaauccgcaaugggaccuacgaucacgacgucuauagagacgaggcacugaacaauagguuccagauuaagggaguggaacucaagagugguuacaaagauuggauccuguggauuuccuuugccaucagcugcuuccuucuguguguugcuuugcucggcuuuauaaugugggcgugccaaaaggggaacauccgguguaauauuugcaucuga

SEQ ID NO: 139684 - RNA, 1701 nt, Artificial Sequence; identical to SEQ ID NO: 137906
  derived and/or modified CDS sequence (opt3) from hemagglutinin__InfluenzaA__AHL98638

SEQ ID NO: 139685 - RNA, 1701 nt, Artificial Sequence; identical to SEQ ID NO: 137916
  derived and/or modified CDS sequence (opt3) from hemagglutinin__InfluenzaA__AHL98650

SEQ ID NO: 139686 - RNA, 1701 nt, Artificial Sequence
  derived and/or modified CDS sequence (opt3) from hemagglutinin__InfluenzaA__AHL98662
augaagaccaucauugcccugagcuacauacucugccuuguguucgcucagaaacugcccggcaacgacaauuccacagcaacuuuguguuuagggcaccaugccgucccuaacggaacgaugguuaagaccaucacaaaugauagaauugaggugacuaacgcgaccgaacugguacaaaauucuucaaucggugagauuugcgacaguccacaccagauccuagauggcgaaaacuguacacucauagacgcucugcuuggggauccgcagugcgacggauuucagaauaaaaagugggaucuguucguggagaggagcaaagccuauuccaacuguuaccccuaugacgucccugauuacgcaucuuugcggucgcucguggccucaagcggcacccuggaauuuaauaacgagaguuucaauuggacugguguuacacaaaacgggaccuccucugcuugcauccgccgaagcaauaacuccuuuuucucacgucugaauuggcucacgcauaguaacuuuaaguauccagcauuaaacgugacuaugcccaauaacgagcaguucgacaagcuguacauuuggggaguccaccauccuggcaccgauaaagaccagaucuuucuuuaugcccagagcucuggcagaauuacaguguccacuaagaggucacaacaggcuguaaucccaaauauagggagccggccccgcauuagaaacaucccuaguaggauuucuaucuacuggaccaucguuaaaccaggagauauuuugcugauaaauuccacagguaaccuaaucgccccgcggggcuacuucaagauucgcagcgggaaaucgucuaucaugcgauccgacgcgcccauaggaaaguguaagucagaaugcauuaccccuaauggcaguaucccaaacgacaaacccuuucagaaugugaacagaaucacguauggugcauguccuagguacgucaagcagagcacucucaaacuggccacagggaugcggaaugugccagagaagcaaacccguggaauuuucggcgcuaucgccggcuuuauugaaaacgggugggagggaaugauggaugguugguauggcuuccgccaccaaaauuccgaggggagaggacaggcagcugaccuuaaaucuacucaggccgcgauagaucagaucaacggcaagcugaauagguugauugguaaaacaaacgaaaaguuccaccagaucgagaaggaauuuagcgagguggaagggcggauccaggaccucgagaaauacgucgaggauaccaagauugaccuguggucauauaacgccgaauuacugguugcacucgagaaucaacauacgauagaucuuaccgacagugaaaugaacaaacuguucgagaagacuaaaaagcaguugcgagaaaaugcugaggauaugggcaacggaugcuuuaagaucuaccacaaaugugacaaugccugcauuggcuccauccgcaacgggacauaugaucaugacguguacagagacgaggcucuaaauaacagguuccagauuaagggaguagaacugaaaagcgguuacaaggauuggauccucuggauaucuuuugccaucucaugcuuccugcuuuguguggcacuguugggcuuuauuaugugggccugccagaaagggaauauccgguguaacauuugcaucuga

SEQ ID NO: 139687 - RNA, 1701 nt, Artificial Sequence; identical to SEQ ID NO: 139554
  derived and/or modified CDS sequence (opt3) from hemagglutinin__InfluenzaA__AHL98674

SEQ ID NO: 139688 - RNA, 1701 nt, Artificial Sequence; identical to SEQ ID NO: 137906
  derived and/or modified CDS sequence (opt3) from hemagglutinin__InfluenzaA__AHL98686

SEQ ID NO: 139689 - RNA, 1701 nt, Artificial Sequence; identical to SEQ ID NO: 138042
  derived and/or modified CDS sequence (opt3) from hemagglutinin__InfluenzaA__AHL98699

SEQ ID NO: 139690 - RNA, 1701 nt, Artificial Sequence; identical to SEQ ID NO: 138171
  derived and/or modified CDS sequence (opt3) from hemagglutinin__InfluenzaA__AHL98711

SEQ ID NO: 139691 - RNA, 1701 nt, Artificial Sequence; identical to SEQ ID NO: 138515
  derived and/or modified CDS sequence (opt3) from hemagglutinin__InfluenzaA__AHL98722

SEQ ID NO: 139692 - RNA, 1701 nt, Artificial Sequence; identical to SEQ ID NO: 137916
  derived and/or modified CDS sequence (opt3) from hemagglutinin__InfluenzaA__AHL98734

SEQ ID NO: 139693 - RNA, 1701 nt, Artificial Sequence; identical to SEQ ID NO: 138042
  derived and/or modified CDS sequence (opt3) from hemagglutinin__InfluenzaA__AHL98746

SEQ ID NO: 139694 - RNA, 1701 nt, Artificial Sequence; identical to SEQ ID NO: 137916
  derived and/or modified CDS sequence (opt3) from hemagglutinin__InfluenzaA__AHL98758

SEQ ID NO: 139695 - RNA, 1701 nt, Artificial Sequence; identical to SEQ ID NO: 137906
  derived and/or modified CDS sequence (opt3) from hemagglutinin__InfluenzaA__AHL98770

SEQ ID NO: 139696 - RNA, 1701 nt, Artificial Sequence; identical to SEQ ID NO: 138045
  derived and/or modified CDS sequence (opt3) from hemagglutinin__InfluenzaA__AHL98782

SEQ ID NO: 139697 - RNA, 1701 nt, Artificial Sequence
  derived and/or modified CDS sequence (opt3) from hemagglutinin__InfluenzaA__AHL98794
augaagaccaucauugcccugagcuacauacucugccuuguguucgcucagaaacugcccggcaacgacaauuccacagcaacuuuguguuuagggcaccaugccgucccuaacggaacgaucguuaagaccauuacaaaugauagaaucgaggugacuaacgcgaccgaacugguacaaaauucuucaauuggugagaucugcgacaguccacaccagauacuagauggcgaaaacuguacacucaucgacgcucugcuuggggauccgcagugcgacggauuucagaauaaaaagugggaucuguucguggagaggagcaaagccuauuccaacuguuaccccuaugacgucccugauuacgcaucuuugcggucgcucguggccucaagcggcacccuggaauuuaauaacgagaguuucaauugggcugguguuacucaaaacgggacauccucugcaugcauucgcggaagcaauuccucauuuuucagucgacugaacuggcucacccauuuaaauuuuaaguauccagcccugaacgugacgaugcccaacaaugagcaguucgacaaguuguacaucuggggcguccaccauccuggcacugauaaagaccagauuuuucuuuaugcucagagcucugggcguaucaccguguccacaaagagaucacaacaggccguaauaccaaacauuggaagcaggccccggauccgcaauauuccuaguagaaucucuaucuacuggacuauuguuaaaccaggugauauacugcuaaucaacuccaccggcaaucucauugcgccgaggggguacuucaagauccggagcggaaaaucgucuauaaugcgcuccgacgcacccauuggcaagugucgaucagaaugcaucacaccuaacgguaguaucccaaaugacaagcccuuucagaacgugaauagaauuaccuauggggccuguccuagguacgucaaacagagcacgcugaaacuugcuacuggaaugcggaacgugccagagaagcaaacacguggcaucuucggcgccauugcaggguuuauagaaaauggaugggaggguaugguggauggcugguauggguuccgccaccagaacuccgagggaagaggccaggcugccgaccugaagucuacccaagcggccaucgaucagauuaaugguaaauugaacaggcucaucgggaagacuaaugaaaaauuccaccagaucgagaaggaauuuagcgaggucgaaggccggauucaggaccuggagaaguacguugaggauacaaaaauagacuuauggucauauaacgcagaacugcucguggcucuugagaaccaacauaccaucgaucugacggacagugaaaugaauaaguuguucgagaaaaccaagaaacagcuacgagaaaacgccgaggauaugggaaauggcugcuuuaagauuuaccacaagugugacaacgcuugcaucggguccauucgcaauggaacauaugaucaugacguauacagagacgaggcccugaacaauagguuccagaucaaagguguggaacucaagagcggcuacaaagauuggauacuguggaucucuuuugcaauuucaugcuuccuucugugugucgccuugcucggguuuaucaugugggcuugccagaagggaaacauucgguguaauaucugcauauga

SEQ ID NO: 139698 - RNA, 1701 nt, Artificial Sequence
  derived and/or modified CDS sequence (opt3) from hemagglutinin__InfluenzaA__AHL98806
augaagaccaucauugcccugagcuacauacucugccuuguguucgcucagaaacugcccggcaacgacaauuccacagcaacuuuguguuuagggcaccaugccgucccuaacggaacgaucguuaagaccauuacaaaugauagaaucgaggugacuaacgcgaccgaacugguacaaaauucuucaauuggugagaucugcgacaguccacaccagauacuagauggcgaaaacuguacacucaucgacgcucugcuuggggauccgcagugcgacggauuucagaauaaaaagugggaucuguucguggagaggagcaaagccuauuccaacuguuaccccuaugacgucccugauuacgcaucuuugcggucgcucguggccucaagcggcacccuggaauuuaauaacgagaguuucaauugggcugguguuacucaaaacgggacauccucugcaugcauucgcggaagcaauuccucauuuuucagucgacugaacuggcucacccauuuaaauuuuaaguauccagcccugaacgugacgaugcccaacaaugagcaguucgacaaacuuuacaucuggggcguccaccauccuggcacugauaaagaccagaucuuuuuguaugcucagagcucugggcguauuaccguguccacaaagagaucacaacaggccguaauaccaaacauuggaagcaggccccggauccgcaauauuccuaguagaaucucuaucuacuggacuauuguuaaaccaggugauauacugcuaaucaacuccaccggcaaucucauugcgccgaggggguacuucaagauccggagcggaaaaucgucuauaaugcgcuccgacgcacccauuggcaaguguaagucagaaugcaucacaccuaacgguaguaucccaaaugacaaacccuuucagaacgugaaucgaauuaccuauggggccuguccuagauacgucaagcagagcacgcugaaacuugcuacuggaaugaggaacgugccagagaagcaaacacggggcaucuucggcgccauugcaggguuuauagaaaauggaugggaggguaugguggauggcugguauggguuccgucaccagaacuccgagggacgcggccaggcugccgaccugaaaucuacccaaacugcgaucgaucagauuaaugguaaguugaacagacucaucgggaaaacaaaugaaaaguuccaccagaucgagaaggaauuuagcgaggucgaaggcaggauucaggaccuggagaaauacguugaggauaccaagauagacuuauggucauauaacgccgaacugcucguggcacuugagaaccaacauacgaucgaucugaccgacagugaaaugaauaaauuguucgagaagacaaagaagcagcuacgggaaaacgcugaggauaugggaaauggcugcuuuaagauuuaccacaaaugugacaacgccugcaucggguccauucgaaauggaacuuaugaucaugacguauaccgcgacgaggcucugaacaauagauuccagaucaaggguguggaacucaaaagcggcuacaaggauuggauacuguggaucucuuuugccauuucaugcuuccuucugugugucgcauugcucggguuuaucaugugggccugccagaaaggaaacauuagguguaauaucugcauauga

SEQ ID NO: 139699 - RNA, 1701 nt, Artificial Sequence; identical to SEQ ID NO: 137906
  derived and/or modified CDS sequence (opt3) from hemagglutinin__InfluenzaA__AHL98818

SEQ ID NO: 139700 - RNA, 1701 nt, Artificial Sequence; identical to SEQ ID NO: 137916
  derived and/or modified CDS sequence (opt3) from hemagglutinin__InfluenzaA__AHL98830

SEQ ID NO: 139701 - RNA, 1701 nt, Artificial Sequence; identical to SEQ ID NO: 137906
  derived and/or modified CDS sequence (opt3) from hemagglutinin__InfluenzaA__AHL98842

SEQ ID NO: 139702 - RNA, 1701 nt, Artificial Sequence; identical to SEQ ID NO: 137906
  derived and/or modified CDS sequence (opt3) from hemagglutinin__InfluenzaA__AHL98854

SEQ ID NO: 139703 - RNA, 1701 nt, Artificial Sequence
  derived and/or modified CDS sequence (opt3) from hemagglutinin__InfluenzaA__AHL98878
augaagaccaucauugcccugagcuacauacucugccuuguguucacacagaaacugcccggcaacgacaauuccacugcuacguuguguuuagggcaccaugcagucccuaacggaaccaucguuaagacaauuacuaaugauagaaucgaggugaccaacgccacagaacugguacaaaauucuucaauuggugagaucugcgacaguccacaccagauacuagauggcgaaaacuguacccucaucgacgcgcugcuuggggauccgcagugcgacggauuucagaauaaaaagugggaucuguucguggagaggagcaaggcuuauuccaacuguuaccccuaugacgucccugauuacgccucuuugcggucgcucguggcaucaagcggcacucuggaauuuaauaacgagaguuucaauuggacagguguuacccaaaacgggacguccucugccugcauucgccgaagcaauuccucauuuuucagucgucugaacuggcucacucauuuaaauuuuaaguauccagcucugaacgugaccaugcccaacaaugagcaguucgacaaacuuuacaucuggggaguccaccauccuggcacagauaaagaccagaucuuuuuguaugcacagagcucuggcagaauuacuguguccaccaagaggucacaacaggccguaauaccaaacauugggagccggccccgcaucagaaauauuccuaguaggaucucuaucuacuggacaauuguuaaaccaggagauauacugcuaaucaacuccaccgguaaucucauugcuccgcggggcuacuucaagauccgcagcgggaaaucgucuauaaugcgauccgacgcccccauuggaaaguguaagucagaaugcaucacgccuaacggcaguaucccaaaugacaaacccuuucagaacgugaauagaauuacuuauggugcguguccuagguacgucaagcagagcacacugaaacuugcaaccgggaugcggaacgugccagagaagcaaacucguggaaucuucggcgccauugcuggcuuuauagaaaaugggugggagggaaugguggaugguugguauggcuuccgccaccagaacuccgaggggagaggacaggccgcagaccugaaaucuacacaagcugccaucgaucagauuaauggcaaguugaacaggcucaucgguaaaaccaaugaaaaguuccaccagaucgagaaggaauuuagcgaggucgaagggcggauucaggaccuggagaaauacguugaggauacgaagauagacuuauggucauauaacgcggaacugcucguggcccuugagaaccaacauaccaucgaucugacagacagugaaaugaauaaauuguucgagaagacuaaaaagcagcuacgagaaaacgcagaggauaugggcaauggaugcuuuaagauuuaccacaaaugugacaacgcuugcaucggcuccauucgcaaugggaccuaugaucauaacguauacagagacgaggcccugaauaacagguuccagaucaagggaguggaacucaaaagcgguuacaaggacuggauacuguggaucucuuuugcuauuucaugcuuccuucugugugucgccuugcucggcuuuaucaugugggcaugccagaaagggaauauucgguguaacaucugcauauga

SEQ ID NO: 139704 - RNA, 1701 nt, Artificial Sequence
  derived and/or modified CDS sequence (opt3) from hemagglutinin__InfluenzaA__AHL98890
augaagaccaucauugcccugagcuacauacucugccuuguguucgcucagaaacugcccggcaacgacaauuccacagcaacuuuguguuuagggcaccaugccgucccuaacggaacgaucguuaagaccauuacaaaugauagaaucgaggugacuaacgcgaccgaacugguacaaaauucuucaauuggugagaucugcgacaguccacaccagauacuagauggcgaaaacuguacacucaucgacgcucugcuuggggauccgcagugcgacggauuucagaauaaaaagugggaucuguucguggagaggagcaaagccuauuccaacuguuaccccuaugacgucccugauuacgcaucuuugcggucgcucguggccucaagcggcacccuggaauuuaauaacgagaguuucaauugggcugguguuacucaaaacgggacauccucugcaugcauucgcggaagcaauuccucauuuuucagucgacugaacuggcucacccauuuaaauuuuaaguauccagcccugaacgugacgaugcccaacaaugagcaguucgacaaguuguacaucuggggcguccaccauccuggcacugauaaagaccagauuuuucuuuaugcucagagcucugggcguaucaccguguccacaaagagaucacaacaggccguaauaccaaacauuggaagcaggccccggauccgcaauauuccuaguagaaucucuaucuacuggacuauuguuaaaccaggugauauacugcuaaucaacuccaccggcaaucucauugcgccgaggggguacuucaagauccggagcggaaaaucgucuauaaugcgcuccgacgcacccauuggcaaguguaagucagaaugcaucacaccuaacgguaguaucccaaaugacaaacccuuucagaacgugaaucgaauuaccuauggggccuguccuagauacgucaagcagagcacgcugaaacuugcuacuggaaugaggaacgugccagagaagcaaacacggggcaucuucggcgccauugcaggguuuauagaaaauggaugggaggguaugguggauggcugguauggguuccgucaccagaacuccgagggacgcggccaggcugccgaccugaaaucuacccaagcggccaucgaucagauuaaugguaaguugaacagacucaucgggaaaacuaaugaaaaguuccaccagaucgagaaggaauuuagcgaggucgaaggcaggauucaggaccuggagaaauacguugaggauacaaagauagacuuauggucauauaacgcagaacugcucguggcucuugagaaccaacauaccaucgaucugacggacagugaaaugaauaaauuguucgagaagaccaaaaagcagcuacgggaaaacgccgaggauaugggaaauggcugcuuuaagauuuaccacaaaugugacaacgcuugcaucggguccauucgaaauggaacauaugaucaugacguauaccgcgacgaggcccugaacaauagauuccagaucaaggguguggaacucaaaagcggcuacaaggauuggauacuguggaucucuuuugcaauuucaugccuucuguugugugucgcccuccugggguucaucaugugggcuugccagaaaggaaacauuagguguaauaucugcauauga

SEQ ID NO: 139705 - RNA, 1701 nt, Artificial Sequence
  derived and/or modified CDS sequence (opt3) from hemagglutinin__InfluenzaA__AHL98902
augaagaccaucauugcccugagcuacauacucugccuuguguucgcucagaaacugcccggcaacgacaauuccacagcaacuuuguguuuagggcaccaugccgucccuaacggaacgguugugaagaccaucacaaaugauagaauugagguaacuaacgcgaccgaacuggugcaaaauucuucaaucggugagauuugcgacaguccacaccagauccuagauggcgaaaacuguacacucauagacgcucugcuuggggauccgcagugcgacggauuucagaauaaaaagugggaucuguucgucgagaggagcaaagccuauuccaacuguuaccccuaugacgugccugauuacgcaucuuugcggucgcucguugccucaagcggcacccuggaauuuaauaacgagaguuucaauugggcuggugugacucaaaacgggacauccucugcaugcauccgcggaagcaauuccucauuuuucagucgacugaacuggcucacccauuuaaauuuuaaguauccagcccugaacgucacgaugcccaacaaugagcaguucgacaaacuuuacauuuggggcgugcaccauccuggcacugauaaggaccagaucuuuuuguaugcucagagcucugggcguauuaccguauccacaaagagaucacaacaggccguuaucccaaacauaggaagcaggccccggauucgcaauaucccuaguagaauuucuaucuacuggacuaucgugaaaccaggugauauucugcuaauaaacuccaccggcaaucucaucgcgccgaggggguacuucaagauucggagcggaaaaucgucuaucaugcgcuccgacgcacccauaggcaaguguaagucagaaugcauuacaccuaacgguaguaucccaaaugacaaacccuuucagaacgucaaucgaaucaccuauggggccuguccuagauacgugaagcagagcacgcugaaacuugcuacuggaaugaggaacgugccagagaagcaaacacggggcauuuucggcgccaucgcaggguuuauugaaaauggaugggaggguauggucgauggcugguauggguuccgucaccagaacuccgagggacgcggccaggcugccgaccugaaaucuacccaagcggccauagaucagaucaaugguaaguugaacagacucauugggaaaacuaaugaaaaguuccaccagaucgagaaggaauuuagcgagguugaaggcaggauccaggaccuggagaaauacguggaggauacaaagauugacuuauggucauauaacgcagaacugcucguagcucuugagaaccaacauaccauagaucugacggacagugaaaugaauaaauuguucgagaagaccaaaaagcagcuacgggaaaacgccgaggauaugggaaauggcugcuuuaagaucuaccacaaaugugacaacgcuugcauuggguccauccgaaauggaacauaugaucaugacguguaccgcgacgaggcccugaacaauagauuccagauuaagggugucgaacucaaaagcggcuacaaggauuggauccuguggauaucuuuugcaaucucaugcuuccuucuguguguggccuugcucggguuuauuaugugggcuugccagaaaggaaacaucagguguaauauuugcaucuga

SEQ ID NO: 139706 - RNA, 1701 nt, Artificial Sequence; identical to SEQ ID NO: 137916
  derived and/or modified CDS sequence (opt3) from hemagglutinin__InfluenzaA__AHL98913

SEQ ID NO: 139707 - RNA, 1701 nt, Artificial Sequence; identical to SEQ ID NO: 137906
  derived and/or modified CDS sequence (opt3) from hemagglutinin__InfluenzaA__AHL98925

SEQ ID NO: 139708 - RNA, 1701 nt, Artificial Sequence; identical to SEQ ID NO: 138045
  derived and/or modified CDS sequence (opt3) from hemagglutinin__InfluenzaA__AHL98937

SEQ ID NO: 139709 - RNA, 1701 nt, Artificial Sequence; identical to SEQ ID NO: 138042
  derived and/or modified CDS sequence (opt3) from hemagglutinin__InfluenzaA__AHL98961

SEQ ID NO: 139710 - RNA, 1701 nt, Artificial Sequence
  derived and/or modified CDS sequence (opt3) from hemagglutinin__InfluenzaA__AHL98973
augaagaccaucauugcccugagcuacauacucugccuuguguucgcucagaaacugcccggcaacgacaauuccacagcaacuuuguguuuagggcaccaugccgucccuaacggaacgaucguuaagaccauuacaaaugauagaaucgaggugacuaacgcgaccgaacugguacaaaauucuucaauuggugagaucugcgacaguccacaccagauacuagauggcgaaaacuguacacucaucgacgcucugcuuggggauccgcagugcgacggauuucagaauaaaaagugggaucuguucguggagaggagcaaagccuauuccaacuguuaccccuaugacgucccugauuacgcaucuuugcggucgcucguggccucaagcggcacccuggaauuuaauaacgagaguuucaauuggacugguguuacacaaaacgggaccuccucugcuugcauucgccgaagcaauuccucauuuuucagucgucugaacuggcucacgcauuuaaauuuuaaguauccagcacugaacgugacuaugcccaacaaugagcaguucgacaaacuuuacaucuggggaguccaccauccuggcaccgauaaagaccagaucuuuuuguaugcccagagcucuggcagaauuacaguguccacuaagaggucacaacaggcuguaguuccaaacauagggagccggccccgcauuagaaauaucccuaguaggauuucuaucuacuggaccaucgugaaaccaggagauauucugcuaauaaacuccacagguaaucucaucgccccgcggggcuacuucaagauucgcagcgggaaaucgucuaucaugcgauccgacgcgcccauaggaaaguguaagucagaaugcauuaccccuaacggcaguaucccaaaugacaaacccuuucagaacgucaauagaaucacguauggugcauguccuagguacgugaagcagagcacucugaaacuugccacagggaugcggaacgugccagagaagcaaacccguggaauuuucggcgcuaucgccggcuuuauugaaaaugggugggagggaauggucgaugguugguauggcuuccgccaccagaacuccgaggggagaggacaggcagcugaccugaaaucuacucaagccgcgauagaucagaucaauggcaaguugaacaggcucauugguaaaacaaaugaaaaguuccaccagaucgagaaggaauuuagcgagguugaagggcggauccaggaccuggagaaauacguggaggauaccaagauugacuuauggucauauaacgccgaacugcucguagcacuugagaaccaacauacgauagaucugaccgacagugaaaugaauaaauuguucgagaagacaaagaagcagcuacgagaaaacgcugaggauaugggcaauggaugcuuuaagaucuaccacaaaugugacaacgccugcauuggcuccauccgcaaugggacuuaugaucaugacguguacagagacgaggcucugaacaauagguuccagauuaagggagucgaacucaaaagcgguuacaaggauuggauccuguggauaucuuuugccaugucaugcuuccuucuguguguggcauugcucggcuuuaucaugugggccugccagaaagggaacauucgguguaauaucugcauuuga

SEQ ID NO: 139711 - RNA, 1701 nt, Artificial Sequence
  derived and/or modified CDS sequence (opt3) from hemagglutinin__InfluenzaA__AHL98985
augaagaccaucauugcccugagcuacauacucugccuuguguucgcucagaaacugcccggcaacgacaauuccacagcaacuuuguguuuagggcaccaugccgucccuaacggaacgaucguuaagaccauuacaaaugauagaaucgaggugacuaacgcgaccgaacugguacaaaauucuucaauuggugagaucugcgacaguccacaccagauacuagauggcgaaaacuguacaaucauugacgcucuccugggggauccgcagugcgacggauuucagaauaaaaagugggaucuuuucguggagaggagcaaagccuauuccaacuguuaccccuaugacgucccugauuacgcaucucugcggucguugguggccucaagcggcacccucgaauuuaauaacgagaguuucaauugggcugguguuacucaaaacgggacauccucugcaugcauccgcggaagcaauuccucauuuuucagucgacugaacuggcugacccaucucaauuuuaaguauccagccuuaaacgugacgaugcccaacaaugagcaguucgacaagcuguacauuuggggcguccaccauccuggcacugauaaagaccagaucuuucuuuaugcucagagcucugggcguauaaccguguccacaaagagaucacaacaggccguaauuccaaacaucggaagcaggccccggauucgcaauaucccuaguagaaucucuauuuacuggacuauaguuaaaccaggugauaucuugcugauuaacuccaccggcaaucuaaucgcgccgaggggguacuucaagauacggagcggaaaaucgucuauuaugcgcuccgacgcacccaucggcaaguguaagucagaaugcaucacaccuaacgguaguauuccaaaugacaaacccuuucagaacgugaaucgaaucaccuauggggccuguccuagauacgucaagcagagcacgcucaaacuggcuacuggaaugaggaacgugccagagaagcaaacacggggcauuuucggcgccauagcaggguuuaucgaaaauggaugggaggguaugguggauggcugguauggguuccgucaccagaacuccgagggacgcggccaggcugccgaccuuaaaucuacccaagcggccauugaucagaucaaugguaagcugaacagauugaucgggaaaacuaaugaaaaguuccaccagauugagaaggaauuuagcgaggucgaaggcaggauacaggaccucgagaaauacguugaggauacaaagaucgaccuguggucauauaacgcagaauuacugguggcucucgagaaccaacauaccauugaucuuacggacagugaaaugaauaaacuguucgagaagaccaaaaagcaguugcgggaaaacgccgaggauaugggaaauggcugcuuuaagaucuaccacaaaugugacaacgcuugcauuggguccauccgaaauggaacauaugaucaugacguauaccgcgacgaggcccuaaacaauagauuccagauaaaggguguggaacugaaaagcggcuacaaggauuggauccucuggauuucuuuugcaaucucaugcuuccugcuuugugucgcccuguugggguuuauuaugugggcuugccagaaaggaaacaucagguguaauauaugcauuuga

SEQ ID NO: 139712 - RNA, 1701 nt, Artificial Sequence; identical to SEQ ID NO: 138042
  derived and/or modified CDS sequence (opt3) from hemagglutinin__InfluenzaA__AHL98997

SEQ ID NO: 139713 - RNA, 1701 nt, Artificial Sequence; identical to SEQ ID NO: 137906
  derived and/or modified CDS sequence (opt3) from hemagglutinin__InfluenzaA__AHL99009

SEQ ID NO: 139714 - RNA, 1701 nt, Artificial Sequence; identical to SEQ ID NO: 137916
  derived and/or modified CDS sequence (opt3) from hemagglutinin__InfluenzaA__AHL99021

SEQ ID NO: 139715 - RNA, 1701 nt, Artificial Sequence
  derived and/or modified CDS sequence (opt3) from hemagglutinin__InfluenzaA__AHL99045
augaagaccaucauugcccugagcuacauacucugccuuguguucgcucagaaaauccccggcaacgacaauuccacagcaacucuguguuuggggcaccaugccgucccuaacggaacgauuguuaagaccaucacaaaugauagaauugaggugacuaacgcgaccgaauuaguacaaaauucuucaaucggugagauaugcgacaguccacaccagauccuggauggcgaaaacuguacacuaauugacgcucuccugggggauccgcagugcgacggauuucagaauaaaaagugggaucuuuucguggagaggagcaaagccuauuccaacuguuaccccuaugacgucccugauuacgcaucucugcggucguugguggccucaagcggcacccucgaauuuaauaacgagaguuucaauuggacugguguuacacaaaacgggaccuccucugcuugcauccgccgaagcaauuccucauuuuucagucgucugaacuggcugacgcaucucaauuuuaaguauccagcauuaaacgugacuaugcccaacaaugagcaguucgacaagcuguacauuuggggaguccaccauccuggcaccgauaaagaccagaucuuucuuuaugcccagagcucuggcagaauaacaguguccacuaagaggucacaacaggcuguaauuccaaacaucgggagccggccccgcauuagaaauaucccuaguaggaucucuauuuacuggaccauaguuaaaccaggagauaucuugcugauuaacuccacagguaaucuaaucgccccgcggggcuacuucaagauacgcagcgggaaaucgucuauuaugcgauccgacgcgcccaucggaaaguguaagucagaaugcaucaccccuaacggcaguauuccaaaugacaaacccuuucagaacgugaauagaaucacguaugguccuuguccaagguacgucaagcagagcacucucaaacuggcaacagggaugcggaacgugcccgagaagcaaacccguggaauuuucggcgccauagcuggcuuuaucgaaaaugggugggagggaaugguggaugguugguauggcuuccgccaccagaacuccgaggggagaggacaggccgcagaccuuaaaucuacucaagcugccauugaucagaucaauggcaagcugaacagguugaucgguaaaacaaaugaaaaguuccaccagauugagaaggaauuuagcgaggucgaagggcggauacaggaccucgagaaauacguugaggauaccaagaucgaccuguggucauauaacgcggaauuacugguggcccucgagaaccaacauacgauugaucuuaccgacagugaaaugaauaaacuguucgagaagacuaaaaagcaguugcgagaaaacgcagaggauaugggcaauggaugcuuuaagaucuaccacaaaugugacaacgcuugcauuggcuccauccgcaaugggacauaugaucaugacguauacagagacgaggcccuaaacaauagguuccagauaaagggaguggaacugaaaagcgguuacaaggauuggauccucuggauuucuuuugcuaucucaugcuuccugcuuugugucgcccuguugggcuuuauuaugugggcaugccagaaagggaacauccgguguaauauaugcauuuga

SEQ ID NO: 139716 - RNA, 1701 nt, Artificial Sequence
  derived and/or modified CDS sequence (opt3) from hemagglutinin__InfluenzaA__AHL99057
augaagaccaucauugcccugagcuacauacucugccuuguguucgcucagaaacugcccggcaacgacaauuccacagcaacuuuguguuuagggcaccaugccgucccuaacggaacgaucguuaagaccauuacaaaugauagaaucgaggugacuaacgcgaccgaacugguacaaaauucuucaauuggugagaucugcgacaguccacaccagauaaucgauggcgaaaacuguacacuaauugacgcucuccugggggauccgcagugcgacggauuucagaauaaaaagugggaucuuuucguggagaggagcaaagccuauuccaacuguuaccccuaugacgucccugauuacgcaucucugcggucguugguggccucaagcggcacccucgaauuuaauaacgagaguuucaauugggcugguguuacucaaaacgggacauccucugcaugcauccgcggaagcaauuccucauuuuucagucgacugaacuggcugacccaucucaauuuuaaguauccagccuuaaacgugacgaugcccaacaaugagcaguucgacaagcuguacauuuggggcguccaccauccuggcacugauaaagaccagaucuuucuuuaugcucagagcucugggcguauaaccguguccacaaagagaucacaacaggccguaauuccaaacaucggaagcaggccccggauucgcaauaucccuaguagaaucucuauuuacuggacuauaguuaaaccaggugauaucuugcugauuaacuccaccggcaaucuaaucgcgccgaggggguacuucaagauacggagcggaaaaucgucuauuaugcgcuccgacgcacccaucggcaaguguaagucagaaugcaucacaccuaacgguaguauuccaaaugacaaacccuuucagaacgugaaucgaaucaccuauggggccuguccuagauacgucaagcagagcacgcucaaacuggcuacuggaaugaggaacgugccagagaagcaaacacggggcauuuucggcgccauagcaggguuuaucgaaaauggaugggaggguaugguggauggcugguauggguuccgucaccagaacuccgagggacgcggccaggcugccgaccuuaaaucuacccaagcggccauugaucagaucaaugguaagcugaacagauugaucgggaaaacuaaugaaaaguuccaccagauugagaaggaauuuagcgaggucgaaggcaggauacaggaccucgagaaauacguugaggauacaaagaucgaccuguggucauauaacgcagaauuacugguggcucucgagaaccaacauaccauugaucuuacggacagugaaaugaauaaacuguucgagaagaccaaaaagcaguugcgggaaaacgccgaggauaugggaaauggcugcuuuaagaucuaccacaaaugugacaacgcuugcauuggguccauccgaaauggaacauaugaucaugacguauaccgcgacgaggcccuaaacaauagauuccagauaaaggguguggaacugaaaagcggcuacaaggauuggauccucuggauuucuuuugcaaucucaugcuuccugcuuugugucgcccuguugggguuuauuaugugggcuugccagaaaggaaacaucagguguaauauaugcauuuga

SEQ ID NO: 139717 - RNA, 1701 nt, Artificial Sequence
  derived and/or modified CDS sequence (opt3) from hemagglutinin__InfluenzaA__AHL99069
augaagaccaucauugcccugagcuacauacucugccuuguguucgcucagaaacugcccggcaacgacaauuccacagcaacuuuguguuuagggcaccaugccgucccuaacggaacgaucguuaagaccauuacaaaugauagaaucgaggugacuaacgcgaccgaacugguacaaaauucuucaauuggugagaucugcgacaguccacaccagauacuagauggcgaaaacuguacacucaucgacgcucugcuuggggauccgcagugcgacggauuucagaauaaaaagugggaucuguucguggagaggagcaaagccuauuccaacuguuaccccuaugacgucccugauuacgcaucuuugcggucgcucguggccucaagcggcacccuggaauuuaauaacgagaguuucaauugggcugguguuacucaaaacgggacauccucugcaugcauucgcggaagcaauuccucauuuuucagucgacugaacuggcucacccauuuaaauuuuaaguauccagcccugaacgugacgaugcccaacaaugagcaguucgacaaacuuuacaucuggggcguccaccauccuggcacugauaaagaccagaucuuuuuguaugcucagagcucugggcguauuaccguguccacaaagagaucacaacaggccguaauaccaaacauuggaagcaggccccggauccgcaauauuccuaguagaaucucuaucuacuggacuauuguuaaaccaggugauacccugcuaauaaacuccacaggcaaucucaucgcgccgaggggguacuucaagauucggagcggaaaaucgucuaucaugcgcuccgacgcacccauaggcaaguguaagucagaaugcauuaccccuaacgguaguaucccaaaugacaaacccuuucagaacgugaaucgaaucacguauggggccuguccuagauacgucaagcagagcacucugaaacuugcuacaggaaugaggaacgugccagagaagcaaacccggggcauuuucggcgccaucgcaggguuuauugaaaauggaugggaggguaugguggauggcugguauggguuccgucaccagaacuccgagggacgcggccaggcugccgaccugaaaucuacucaagcggccauagaucagaucaaugguaaguugaacagacucauugggaaaacaaaugaaaaguuccaccagaucgagaaggaauuuagcgaggucgaaggcaggauccaggaccuggagaaauacguugaggauaccaagauugacuuauggucauauaacgcagaacugcucguggcucuugagaaccaacauacgauagaucugaccgacagugaaaugaauaaauuguucgagaagacaaagaagcagcuacgggaaaacgccgaggauaugggaaauggcugcuuuaagaucuaccacaaaugugacaacgcuugcauuggguccauccgaaauggaacuuaugaucauaacguauaccgcgacgaggcccugaauaacagauuccagauuaaggguguggaacucaaaagcggcuacaaggacuggauccuguggauaucuuuugcaaucucaugcuuccuucugugugucgccuugcucggguuuauuaugugggcuugccagaaaggaaauaucagguguaacauuugcaucuga

SEQ ID NO: 139718 - RNA, 1701 nt, Artificial Sequence
  derived and/or modified CDS sequence (opt3) from hemagglutinin__InfluenzaA__AHL99081
augaagaccaucauugcccugagcuacauacucugccuuguguucgcucagaaacugcccggcaacgacaauuccacagcaacuuuguguuuagggcaccaugccgucccuaacggaacgaucguuaagaccauuacaaaugauagaaucgaggugacuaacgcgaccgaacugguacaaaauucuucaauuggugagaucugcgacaguccacaccagauacuagauggcgaaaacuguacacucaucgacgcucugcuuggggauccgcagugcgacggauuucagaauaaaaagugggaucuguucguggagaggagcaaagccuauuccaacuguuaccccuaugacgucccugauuacgcaucuuugcggucgcucguggccucaagcggcacccuggaauuuaauaacgagaguuucaauuggacugguguuacacaaaacgggaccuccucugcuugcauucgccgaagcaauuccucauuuuucagucgucugaacuggcucacgcauuuaaauuuuaaguauccagcacugaacgugacuaugcccaacaaugagcaguucgacaaacuuuacaucuggggaguccaccauccuggcaccgauaaagaccagaucuuuuuguaugcccagagcucuggcagaauuacaguguccacuaagaggucacaacaggcuguaauaccaaacauugggagccggccccgcaucagaaauauuccuaguaggaucucuaucuacuggaccauuguuaaaccaggagauauacugcuaaucaacuccacagguaaucucauugccccgcggggcuacuucaagauccgcagcgggaaaucgucuauaaugcgauccgacgcgcccauuggaaaguguaagucagaaugcaucaccccuaacggcaguaucccaaaugacaaacccuuucagaacgugaauagaauuacguauggugcauguccuagguacgucaagcaggggacucugaaacuugccacaggaaugcggaacgugccagagaagcaaacccguggcaucuucggcgcuauugccggguuuauagaaaauggaugggaggguaugguggauggcugguauggguuccgccaccagaacagcgagggaagaggccaggcagcugaccugaaauccacucaagccgcgaucgaucagauuaaugguaaguugaacaggcucaucgggaaaacaaaugaaaaguuccaccagaucgagaaggaauuuucugaggucgaaggccggauucaggaccuggagaaauacguugaggauaccaagauagacuuauggagcuauaacgccgaacugcucguggcacuugagaaccaacauacgaucgaucugaccgacucagaaaugaauaaauuguucgagaagacaaagaagcagcuacgagaaaacgcugaggauaugggaaauggcugcuuuaagauuuaccacaaaugugacaacgccugcaucgggaguauucgcaauggaacuuaugaucauaacguauacagagacgaggcucugaauaacagguuccagaucaaggguguggaacucaaauccggcuacaaggacuggauacuguggaucagcuuugccauuucuugcuuccuucugugugucgcauugcucggguuuaucaugugggccugccagaaaggaaauauucgguguaacaucugcauauga

SEQ ID NO: 139719 - RNA, 1701 nt, Artificial Sequence
  derived and/or modified CDS sequence (opt3) from hemagglutinin__InfluenzaA__AHL99093
augaagaccaucauugcccugagcuacauacucugccuuaucuucgcucagaaacugcccggcaacgacaauuccacagcaacuuuguguuuagggcaccaugccgugccuaacggaacgauugucaagaccaucacaaaugauagaauugagguuacuaacgcgaccgaacuggugcaaaauucuucaaucggugagauaugcgacaguccacaccagauccuagauggcgaaaacuguacacucauugacgcucugcuuggggauccgcagugcgacggauuucagaauaaaaagugggaucuguucguagagaggagcaaagccuauuccaacuguuaccccuaugacgugccugauuacgcaucuuugcggucgcucgucgccucaagcggcacccuggaauuuaauaacgagaguuucaauuggacuggugugacacaaaacgggaccuccucugcuugcauccgccgaagcaauuccucauuuuucagucgucugaacuggcucacgcauuuaaauuuuaaguauccagcacugaacguuacuaugcccaacaaugagcaguucgacaaacuuuacauuuggggagugcaccauccuggcaccgauaaagaccagaucuuuuuguaugcccagagcucuggcagaauaacagucuccacuaagaggucacaacaggcugugauuccaaacaucgggagccggccccgcauuagaaauaucccuaguaggaucucuauuuacuggaccauaguaaaaccaggagauauccugcuaauuaacuccacagguaaucucaucgccccgcggggcuacuucaagauacgcagcgggaaaucgucuauuaugcgauccgacgcgcccaucggaaaguguaagucagaaugcaucaccccuaacggcaguauuccaaaugacaaacccuuucagaacguuaauagaaucacguauggugcauguccuagguacgugaagcagagcacucugaaacuugccacagggaugcggaacgucccagagaagcaaacccguggaauuuucggcgcuauagccggcuuuaucgaaaaugggugggagggaaugguggaugguugguauggcuuccgccaccagaacuccgaggggagaggacaggcagcugaccugaaaucuacucaagccgcgauugaucagaucaauggcaaguugaacaggcucaucgguaaaacaaaugaaaaguuccaccagauugagaaggaauuuagcgagguggaagggcggauacaggaccuggagaaauacgucgaggauaccaagaucgacuuauggucauauaacgccgaacugcucguugcacuugagaaccaacauacgauugaucugaccgacagugaaaugaauaaauuguucgagaagacaaagaagcagcuacgagaaaacgcugaggauaugggcaauggaugcuuuaagaucuaccacaaaugugacaacgccugcauuggcuccauccgcaaugggacuuaugaucauaacguguacagagacgaggcucugaauaacagguuccagauaaagggaguagaacucaaaagcgguuacaaggacuggauccuguggauuucuuuugccaucucaugcuuccuucuguguguggcauugcucggcuuuauuaugugggccugccagaaagggaauaucaaguguaacauaugcauuuga

SEQ ID NO: 139720 - RNA, 1701 nt, Artificial Sequence; identical to SEQ ID NO: 137906
  derived and/or modified CDS sequence (opt3) from hemagglutinin__InfluenzaA__AHL99117

SEQ ID NO: 139721 - RNA, 1701 nt, Artificial Sequence
  derived and/or modified CDS sequence (opt3) from hemagglutinin__InfluenzaA__AHL99129
augaagaccaucauugcccugagcuacauacucugccuuguguucgcucagaaacugcccggcaacgacaauuccacagcaacuuuguguuuagggcaccaugccgucccuaacggaacgaucguuaagaccauuacaaaugauagaaucgaggugacuaacgcgaccgaacugguacaaaauucuucaauuggugagaucugcgacaguccacaccagauacuagauggcgaaaacuguacacucaucgacgcucugcuuggggauccgcagugcgacggauuucagaauaaaaagugggaucuguucguggagaggagcaaagccuauuccaacuguuaccccuaugacgucccugauuacgcaucuuugcggucgcucguggccucaagcggcacccuggaauuuaauaacgagaguuucaauuggacugguguuacacaaaacgggaccuccucugcuugcauucgccgaagcaauuccucauuuuucagucgucugaacuggcucacgcauuuaaauuuuaaguauccagcacugaacgugacuaugcccaacaaugagcaguucgacaaacuuuacaucuggggaguccaccauccuggcaccgauaaagaccagaucuuuuuguaugcccagagcucuggcagaauuacaguguccacuaagaggucacaacaggcuguaauaccaaacauugggagccggccccgcaucagaaauauuccuaguaggaucucuaucuacuggaccauuguuaaaccaggagauauacugcuaaucaacuccacagguaaucucauugccccgcggggcuacuucaagauccgcagcgggaaaucgucuauaaugcgauccgacgcgcccauuggaaaguguaagucagaaugcaucaccccuaacggcaguaucccaaaugacaaacccuuucagaacgugaauagaauuacguauggugcauguccuagguacgucaagcagagcacucugaaacuugccacagggaugcggaacgugccagagaagcaaacccguggaaucuucggcgcuauugccggcuuuauagaaaaugggugggagggaaugguggaugguugguauggcuuccgccaccagaacuccgaggggagaggacaggcagcugaccugaaaucuacucaagccgcgaucgaucagauuaauggcaaguugaacaggcucaucgguaaaacaaaugaaaaguuccaccagaucgagaaggaauuuagcgaggucgaagggcggauucaggacauagagaaauacguugaggauaccaagaucgaccuguggucauauaacgccgaauuacugguggcacucgagaaccaacauacgauugaucuuaccgacagugaaaugaauaaacuguucgagaagacaaagaagcaguugcgagaaaacgcugaggauaugggcaauggaugcuuuaagaucuaccacaaaugugacaacgccugcauuggcuccauccgcaaugggacuuaugaucauaacguauacagagacgaggcucuaaauaacagguuccagauaaagggaguggaacugaaaagcgguuacaaggacuggauccucuggauuucuuuugccaucucaugcuuccugcuuugugucgcacuguugggcuuuauuaucugggccugccagaaagggaauauacgguguaacauuugcaucuga

SEQ ID NO: 139722 - RNA, 1701 nt, Artificial Sequence
  derived and/or modified CDS sequence (opt3) from hemagglutinin__InfluenzaA__AHL99141
augaagaccaucauugcccugagcuacauacucugccuuguguucgcucagaaacugcccggcaacgacaauuccacagcaacuuuguguuuagggcaccaugccgucccuaacggaacgaucguuaagaccauuacaaaugaucaaaucgaggugacuaacgcgaccgaacugguacaaaauucuucaauuggugagaucugcgacaguccacaccagauacuagauggcgaaaacuguacacucaucgacgcucugcuuggggauccgcagugcgacggauuucagaauaaaaagugggaucuguucguggagagaagcaaagccuauuccaacuguuaccccuaugacgucccugauuacgcaucuuugaggucgcucguggccucaagcggcacccuggaauuuaauaacgagaguuucaauuggacugguguuacacagaacgggaccuccucugcuugcauucggcgcagcaauuccucauuuuucagucgacugaacuggcucacgcauuuagacuuuaaguauccagcacugaaugugacuaugcccaacaacgagcaguucgauaaacuuuacaucuggggaguccaccauccuggcaccgacaaagaucagaucuuuuuguaugcccaaagcucuggccguauuacaguguccacuaagagaucacagcaggcuguaauaccaaauauugggagcaggccccggauccgcaacauuccuaguagaaucucuaucuacuggaccauuguuaaaccaggagacauacugcuaaucaauuccacagguaaccucauugccccgaggggcuacuucaagauccggagcgggaaaucgucuauaaugcgcuccgacgcgcccauuggaaaguguaagucagaaugcaucaccccuaauggcaguaucccaaacgauaaacccuuucagaaugugaaccgaauuacguauggugcauguccuagauacgucaagcaaagcacucugaaacuugccacagggaugaggaaugugccagagaagcagacccggggaaucuucggcgcuauugccggcuuuauagaaaacgggugggagggaaugguggacgguugguauggcuuccgucaccaaaauuccgaggggcgcggacaggcagcugaucugaaaucuacucaggccgcgaucgaccagauuaacggcaaguugaauagacucaucgguaaaacaaacgaaaaguuccaccagaucgagaaggaauuuagcgaggucgaagggaggauucaagaucuggagaaauacguugaggacaccaagauagauuuauggucauauaaugccgaacugcucguggcacuugagaaccagcauacgaucgaccugaccgauagugaaaugaacaaauuguucgagaagacaaagaagcagcuacgggaaaaugcugaggacaugggcaacggaugcuuuaagauuuaccacaaaugugauaaugccugcaucggcuccauucgaaacgggacuuaugaccaugacguauaccgcgaugaggcucugaauaacagauuccagaucaagggaguggaacucaaaagcgguuacaaggacuggauacuguggaucucuuuugccauuucaugcuuccuucugugugucgcauugcucggcuuuaucaugugggccugccaaaaagggaauauuagguguaacaucugcauauga

SEQ ID NO: 139723 - RNA, 1701 nt, Artificial Sequence
  derived and/or modified CDS sequence (opt3) from hemagglutinin__InfluenzaA__AHL99153
augaagaccaucauugcccugagcuacauacucugccuuguguucgcucagaaacugcccggcaacgacaauuccacagcaacuuuguguuuagggcaccaugccgucccuaacggaacgaucguuaagaccauuacaaaugauagaaucgaggugacuaacgcgaccgaacugguacaaaauucuucaauuggugagaucugcgacaguccacaccagauacuagauggcgaaaacuguacacucaucgacgcucugcuuggggauccgcagugcgacggauuucagaauaaaaagugggaucuguucguggagaggagcaaagccuauuccaacuguuaccccuaugacgucccugauuacgcaucuuugcggucgcucguggccucaagcggcacccuggaauuuaauaacgagaguuucaauugggcugguguuacucaaaacgggacauccucugcaugcauucgcggaagcaauuccucauuuuucagucgacugaacuggcucacccauuuaaauuuuaaguauccagcccugaacgugacgaugcccaacaaugagcaguucgacaaacuuuacaucuggggcguccaccauccuggcacugauaaagaccagaucuuuuuguaugcucagagcucugggcguauuaccguguccacaaagagaucacaacaggccguaacuccaaacauaggaagcaggccccggauucgcgauaucccuaguagaauuucuaucuacuggaccaucguuaaaccaggugacauucugcuaauaaauuccacaggcaaccucaucgcgccgaggggguacuucaagauucggagcggaaaaucgucuaucaugcgcuccgacgcacccauaggcaaguguaagucagaaugcauuaccccuaaugguaguaucccaaacgauaaacccuuucagaaugugaaccgaaucacguauggggccuguccuagauacgucaagcagagcacucugaaacuugcuacaggaaugaggaaugugccagagaagcaaacccggggcauuuucggcgccaucgcaggguuuauugaaaacggaugggaggguaugauggacggcugguauggguuccgucaccaaaauuccgagggacgcggccaggcugccgaucugaaaucuacucaggcggccauagaccagaucaacgguaaguugaauagacucauugggaaaacaaacgaaaaguuccaccagaucgagaaggaauuuagcgagguggaaggcaggauccaggaucuggagaaauacgucgaggacaccaagauugauuuauggucauauaaugcagaacugcucguugcucuugagaaccaacauacgauagaccugaccgauagugaaaugaacaaauuguucgagaagacaaagaagcagcuacgggaaaaugccgaggacaugggaaacggcugcuuuaagaucuaccacaaaugugauaaugcuugcauuggguccauccgaaacggaacuuaugaccaugacguguaccgcgaugaggcccugaauaacagauuccagauuaaggguguagaacucaaaagcggcuacaaggacuggauccuguggauaucuuuugcaaucucaugcuuccuucuguguguggccuugcucggguuuauuaugugggcuugccagaaaggaaauaucagguguaacauuugcaucuga

SEQ ID NO: 139724 - RNA, 1701 nt, Artificial Sequence; identical to SEQ ID NO: 138045
  derived and/or modified CDS sequence (opt3) from hemagglutinin__InfluenzaA__AHL99165

SEQ ID NO: 139725 - RNA, 1701 nt, Artificial Sequence; identical to SEQ ID NO: 138530
  derived and/or modified CDS sequence (opt3) from hemagglutinin__InfluenzaA__AHL99177

SEQ ID NO: 139726 - RNA, 1701 nt, Artificial Sequence; identical to SEQ ID NO: 137906
  derived and/or modified CDS sequence (opt3) from hemagglutinin__InfluenzaA__AHL99189

SEQ ID NO: 139727 - RNA, 1701 nt, Artificial Sequence; identical to SEQ ID NO: 138042
  derived and/or modified CDS sequence (opt3) from hemagglutinin__InfluenzaA__AHL99225

SEQ ID NO: 139728 - RNA, 1701 nt, Artificial Sequence; identical to SEQ ID NO: 138515
  derived and/or modified CDS sequence (opt3) from hemagglutinin__InfluenzaA__AHL99237

SEQ ID NO: 139729 - RNA, 1701 nt, Artificial Sequence; identical to SEQ ID NO: 137916
  derived and/or modified CDS sequence (opt3) from hemagglutinin__InfluenzaA__AHL99249

SEQ ID NO: 139730 - RNA, 1701 nt, Artificial Sequence; identical to SEQ ID NO: 137906
  derived and/or modified CDS sequence (opt3) from hemagglutinin__InfluenzaA__AHL99261

SEQ ID NO: 139731 - RNA, 1701 nt, Artificial Sequence; identical to SEQ ID NO: 138045
  derived and/or modified CDS sequence (opt3) from hemagglutinin__InfluenzaA__AHL99273

SEQ ID NO: 139732 - RNA, 1701 nt, Artificial Sequence
  derived and/or modified CDS sequence (opt3) from hemagglutinin__InfluenzaA__AHL99285
augaagaccaucauugcccugagcuacauacucugccuuguguucgcucagaaacugcccggcaacgacaauuccacagcaacuuuguguuuagggcaccaugccgucccuaacggaacgaucguuaagaccauuacaaaugauagaaucgaggugacuaacgcgaccgaacugguacaaaauucuucaauuggugagaucugcgacaguccacaccagauacuagauggcgaaaacuguacacucaucgacgcucugcuuggggauccgcagugcgacggauuucagaauaaaaagugggaucuguucguggagaggagcaaagccuauuccaacuguuaccccuaugacgucccugauuacgcaucuuugcggucgcucguggccucaagcggcacccuggaauuuaauaacgagaguuucaauuggacugguguuacacaaaacgggaccuccucugcuugcauucgccgaagcaauuccucauuuuucagucgucugaacuggcucacgcauuuaaauuuuaaguauccagcacugaacgugacuaugcccaacaaugagcaguucgacaaacuuuacaucuggggaguccaccauccuggcaccgauaaagaccagaucuuuuuguaugcccagagcucuggcagaauuacaguguccacuaagaggucacaacaggcuguaauaccaaacauugggagccggccccgcaucagaaauauuccuaguaggaucucuaucuacuggaccauuguuaaaccaggagauauacugcuaaucaacuccacagguaaucucauugccccgcggggcuacuucaagauccagagcgggaaaucgucuauaaugcgcuccgacgcgcccauuggaaaguguaagucagaaugcaucaccccuaacggcaguaucccaaaugacaaacccuuucagaacgugaaucgaauuacguauggugcauguccuagauacgucaagcaaagcacucugaaacuugccacagggaugaggaacgugccagagaagcagacccggggaaucuucggcgcuauugccggcuuuauagaaaaugggugggagggaaugguggaugguugguauggcuuccgucaccagaacuccgaggggcgcggacaagcagcugaccugaaaucuacucaggccgcgaucgaucagauuaauggcaaguugaacagacucaucgguaaaacaaaugaaaaguuccaccagaucgagaaggaauuuagcgaggucgaagggaggauucaagaccuggagaaauacguugaggauaccaagauagacuuauggucauauaacgccgaacugcucguggcacuugagaaccagcauacgaucgaucugaccgacagugaaaugaauaaauuguucgagaagacaaagaagcagcuacgggaaaacgcugaggauaugggcaauggaugcuuuaagauuuaccacaaaugugacaacgccugcaucggcuccauucgaaaugggacuuaugaucauaacguauaccgcgacgaggcucugaauaacagauuccagaucaagggaguggaacucaaaagcgguuacaaggacuggauacuguggaucucuuuugccauuucaugcuuccuucugugugucgcauugcucggcuuuaucaugugggccugccaaaaagggaauauuagguguaacaucugcauauga

SEQ ID NO: 139733 - RNA, 1701 nt, Artificial Sequence; identical to SEQ ID NO: 138071
  derived and/or modified CDS sequence (opt3) from hemagglutinin__InfluenzaA__AHL99297

SEQ ID NO: 139734 - RNA, 1701 nt, Artificial Sequence; identical to SEQ ID NO: 137916
  derived and/or modified CDS sequence (opt3) from hemagglutinin__InfluenzaA__AHL99309

SEQ ID NO: 139735 - RNA, 1701 nt, Artificial Sequence
  derived and/or modified CDS sequence (opt3) from hemagglutinin__InfluenzaA__AHL99321
augaagaccaucauugcccugagcuacauacucugccuuguguucacacagaaacugcccggcaacgacaauuccacugcuacguuguguuuagggcaccaugcagucccuaacggaaccaucguuaagacaauuacuaaugaucaaaucgaggugaccaacgccacagaacugguacaaaauucuucaauuggugagaucugcgacaguccacaccagauacuagauggcgaaaacuguacccucaucgacgcgcugcuuggggauccgcagugcgacggauuucagaauaaaaagugggaucuguucguggagagaagcaaggcuuauuccaacuguuaccccuaugacgucccugauuacgccucuuugaggucgcucguggcaucaagcggcacucuggaauuuaauaacgagaguuucaauugggccgguguuacacagaacgggaccuccucugcuugcauucggggaagcaauuccucauuuuucagucgccugaacuggcucacgcauuuaaauuuuaaguauccagcacugaacgugacuaugcccaacaaugagcaguucgacaaacuuuacaucuggggcguccaccauccuggcaccgauaaagaccagaucuuuuuguaugcccaaagcucugggcgaauuacaguguccacuaagcguucacagcaggcuguaauaccaaacauuggaagcagacccaggauccggaauauuccuagucgcaucucuaucuacuggaccauuguuaaaccaggugauauacugcuaaucaacuccacaggcaaucucauugccccgagaggguacuucaagaucaggagcggaaaaucgucuauaaugcgguccgacgcgcccauuggcaaguguaagucagaaugcaucaccccuaacgguaguaucccaaaugacaaacccuuucagaacgugaaucgcauuacguauggggcauguccucgauacgucaagcaaagcacucugaaacuugccacaggaaugagaaacgugccagagaagcagaccaggggcaucuucggcgcuauugccggguuuauagaaaauggaugggaggguaugguggauggcugguauggguuccggcaccagaacuccgagggacguggccaagcagcugaccugaaaucuacucaggccgcgaucgaucagauuaaugguaaguugaaccgccucaucgggaaaacaaaugaaaaguuccaccagaucgagaaggaauuuagcgaggucgaaggcaggauucaagaccuggagaaauacguugaggauaccaagauagacuuauggucauauaacgccgaacugcucguggcacuugagaaccagcauacgaucgaucugaccgacagugaaaugaauaaauuguucgagaagacuaaaaagcagcuaagagaaaacgcugaggauaugggaaauggcugcuuuaagauuuaccacaaaugugacaacgccugcaucggguccauucggaauggaacauaugaucaugacguauaccgagacgaggcucugaacaaucgcuuccagaucaaggguguggaacucaaaagcggcuacaaggauuggauacuguggaucucuuuugccauuucaugcuuccuucugugugucgcauugcucggguuuaucaugugggccugccaaaaaggaaacauuagauguaauaucugcauauga

SEQ ID NO: 139736 - RNA, 1701 nt, Artificial Sequence
  derived and/or modified CDS sequence (opt3) from hemagglutinin__InfluenzaA__AHL99333
augaagaccaucauugcccugagcuacauacucugccuuguguucgcucaggagcugcccggcaacgacgauuccacagcaacuuuguguuuagggcaccaugccgucccuaauggaacgaucguuaaaaccauuacaaacgaccaaaucgaagugacuaaugcgaccgagcugguacagucuucaaguacaggugaaauuugcaacagcccacaccagauccuagauggcgagaauuguacccucauagacgcucugcuuggggauccgcagugcgacggauuucaaaacaagaaaugggaucuguucguggaaagauccaaggcccauucuaauuguuaucccuacgacgucccugauuaugcaucguugaggucacucguggccagcaguggcacucuggaguuuaacaaugaguccuucaacuggacagguguuacccagaaugggacgucuagcgcuugcauccggcgcuccaacaauucauuuuucagucgacugaacuggcucacucacuuaaauuuuaaauacccagcacugaacgugaccaugcccaacaaugaacaguucgacaaacuuuauauuuggggaguccaucacccuggcacagauaaggaccagaucuuuuuguacgcccaagcuagcggccguauuacugugucuaccaagagaucccagcaggccguaaucccaaacauagggucaaggccccggguucgcaauauuccuagcagagugaguaucuauuggacaauugucaagccaggagauauccugcuaaucaacucuaccgguaaucucauugcgccgaggggcuacuucaaaauacgguccggaaagagcucgaucaugcgcucugacgcacccauugggaaauguaacuccgccugcaucacgccuaauggcucaauaccaaacgacaagcccuuucagaaugugaaccgaauuacuuacggugcuuguccuagauaugugaagcaaaauacacugaaacuugccaccgggaugaggaacgucccagagaagcagacucggggaaucuucggcgcaaucgcuggcuuuauugaaaaugggugggagggaaugguugaugguugguacggcuuccgucaccagaacagugaggggcgcggacaagccgcggaccugaaaagcacacaggccgcaaucgaucagauuaauggcaaguugaacagacucauagguaaaaccaacgaaaaguuccaucagaucgagaaagaauuuuccgagguggaagggaggauucaagaccuggagaaguauguagaggauacgaagaucgacuuauggucuuacaaugcugaacugcucguggcccuugagaaccagcacaccaucgaucugacagacagcgaaaugaauaaauuguucgagaagacuaaaaagcagcuacgggaaaacgcugaggauaugggcaauggaugcuuuaaaauuuaucauaagugugacaacgccugcauaggcucaauccgaaaugggaccuacgaucacaacgucuaucgcgacgaggcacugaauaacagauuccagauuaagggaguggaacucaaaagugguuacaaggacuggauccuguggauuuccuuugccaucagcugcuuccuucuguguguugcuuugcucggcuuuauaaugugggcgugccaaaaagggaauaucagguguaacauuugcaucuga

SEQ ID NO: 139737 - RNA, 1701 nt, Artificial Sequence
  derived and/or modified CDS sequence (opt3) from hemagglutinin__InfluenzaA__AHL99356
augaaggccauccuggugguccuccuuuacaccuucgcuacagcaaacgccgacacucugugcauuggcuaucacgcgaauaacagcacggauaccguugacacaguguuggagaagaauguaacugugacccauuccgucaacuuacuggaagauaagcacaaugggaaacuauguaagcucagaggaguggcuccccugcaucuugguaaaugcaacauagccggcuggauccuggggaauccugagugugaaucuuugucaacagcaaguagcugguccuacauuguugagaccucuucgucagacaacggaacuugcuauccaggcgauuuuaucaauuacgaagaacucagggagcagcugagcaguguguccucuuucgaacgguuugagauuuucccgaagacaagcuccuggcccaaccacgacucaaauaagggugucaccgccgcuuguccucaugcaggggccaaaaguuuuuauaagaaccugaucuggcucgugaaaaagggaaauagcuacccaaaauuaucuaaguccuauauaaacgauaagggcaaagaaguacugguucuuuggggcauccaccaccccucaacgacugcugaccaacagagcuuguaccagaaugccgaugcguacguguucgucgggaccaguaaguauucuaaaaaguuuaaaccugagauugcaauccgcccaaaggugcgagaccaggagggacguaugaacuacuauuggacacugauugaacccggugauaaaaucacuuucgaggccaccggcaaccuaguggucccuagauacgcuuuugccauggaaaggaaugcaggguccggaauaauuaucagcgacacaccaguucaugauugcaacaccacgugucaaacuccggagggcgcuauuaauacaucgcuccccuuccagaacauccacccuaucaccauugguaagugcccaaaguaugugaaaucuacuaagcugcggcuugccacagggcugcgcaauguacccuccauacagucaagaggauuguuuggcgcgaucgccggcuucauugaagggggauggaccgguaugguggacggcugguacggguaucaucaccagaacgagcaaggaaguggcuacgcagcugaccucaaaagcacgcagaaugccaucgauaagauaaccaacaaagucaauuccgugauugagaagaugaacacacaguuuacugcuguugguaaggaguucaaucaccuggagaaaaggaucgaaaacuuaaauaagaaaguggacgauggguuccuggacaucuggaccuacaacgccgagcuccuuguccuguuggaaaaugagcggacacuagauuaucaugacucuaacgugaagaaccuguacgagaaaguacgcaaucagcucaagaacaaugcaaaggaaauuggcaacggauguuuugaguucuaucacaaaugcgauaauacuuguauggaaagcguuaagaacggcaccuacgacuauccuaaauacucagaggaagccaagcugaaucgagagaaaaucgauggggugaaacuugagaguacaagaauuuaucaaauacuggcuaucuacuccaccgucgcgagcucuuuggugcucgucgugucacugggagcaauuaguuuuuggaugugcagcaacgguuccuuacagugcaggaucuguaucuga

SEQ ID NO: 139738 - RNA, 1701 nt, Artificial Sequence; identical to SEQ ID NO: 137931
  derived and/or modified CDS sequence (opt3) from hemagglutinin__InfluenzaA__AHL99367

SEQ ID NO: 139739 - RNA, 1701 nt, Artificial Sequence
  derived and/or modified CDS sequence (opt3) from hemagglutinin__InfluenzaA__AHL99379
augaaggccauccugguggucaugcucuacaccuucgcuacagcaaacgccgacacucuuugcauuggcuaucacgcgaauaacagcacggauaccguugacacagugcuggagaaaaauguaacugugacccauuccgucaacuuguuagaagauaagcacaaugggaaacuguguaagcuaagaggaguggcuccccuccaucuggguaaaugcaacauagccggcuggauccuugggaauccugagugugaaucucugucaacagcaaguagcugguccuacauuguugagaccucuggaucggacaacggcacuugcuauccaggugauuuuaucgacuacgaagaguugagggagcagcucucaagcgugaguuccuucgaacgguuugagauuuucccgaagacaucuagcuggcccaaucacgauuccaacaagggggucaccgccgcuuguccucaugcaggagccaaaggcuuuuauaagaaucugaucuggcuggugaaaaagggcaacucauacccaaaacucaguauaagcuauaucaaugacaaggggaaggaaguauuaguucugugggguauucaccaccccucuacgacugcugaucaacagucccuuuaccagaacgccgacaccuacguguucgucggaacaucacgcuauagcaaaaaguuuaaaccugagaucgcgauucgaccaaaggugcgugaucaggagggcagaaugaauuacuauuggacuuugguggaacccggggacaaaaucaccuucgaggcaacaggaaaccuggucguuccuagguacgccuuugcuauggaacggaacgccggcagugguauaauuaucucugauaccccagugcaugacugcaauacgacuugucaaacaccgaagggggcaauuaacaccucccuacccuuccagaauauccacccuaucacuauuggaaaaugcccaaaguauguaaagagcacaaaacuccgccuggcuaccggccuuagaaacgugcccucgauacagucuaggggccuguuuggggccaucgcgggauucauugaggguggcuggacggggauggucgacggaugguacggcuaucaucaccagaaugaacaagguuccggguacgccgcagauuugaagucaacccagaacgcuaucgacaaaauaacaaauaaggugaacaguguuauugagaaaaugaauacucaguuuaccgccgugggcaaggaguucaaccaccucgaaaagcggaucgagaaucugaacaaaaaggucgaugacggauucuuagauaucuggacauacaaugcugaacugcucgugcuucuggagaacgaacgcacuuuggacuaucaugauagcaauguuaaaaaccuauacgagaagguacgaaaccagcugaaaaauaacgccaaggagauuggcaauggguguuuugaguucuaucacaagugcgacaacaccuguauggaauccgugaaaaauggaacauacgauuauccuaaguacucugaagaggcaaaacucaacagagaaaagaucgacggugucaaacuggagagcaccaggauuuaucaaauacuugccaucuacucaacugcugcgaguucccugguguuggucgugagccucggcgcaauuucuuuuuggaugugcucaaaugggagucugcagugccggaucuguaucuga

SEQ ID NO: 139740 - RNA, 1701 nt, Artificial Sequence; identical to SEQ ID NO: 139732
  derived and/or modified CDS sequence (opt3) from hemagglutinin__InfluenzaA__AHL99390

SEQ ID NO: 139741 - RNA, 1701 nt, Artificial Sequence; identical to SEQ ID NO: 137906
  derived and/or modified CDS sequence (opt3) from hemagglutinin__InfluenzaA__AHL99402

SEQ ID NO: 139742 - RNA, 1701 nt, Artificial Sequence
  derived and/or modified CDS sequence (opt3) from hemagglutinin__InfluenzaA__AHL99426
augaagaccaucauugcccugagcuacauacucugccuuguguucgcucagaaacugcccggcaacgacaauuccacagcaacuuuguguuuagggcaccaugccgucccuaacggaacgaucguuaagaccauuacaaaugauagaaucgaggugacuaacgcgaccgaacugguacaaaauucuucaauuggugagaucugcgacaguccacaccagauacuagauggcgaaaacuguacacucaucgacgcucugcuuggggauccgcagugcgacggauuucagaauaaaaagugggaucuguucguggagaggagcaaagccuauuccaacuguuaccccuaugacgucccugauuacgcaucuuugcggucgcucguggccucaagcggcacccuggaauuuaauaacgagaguuucaauuggacugguguuacacaaaacgggaccuccucugcuugcauucgccgaagcaauuccucauuuuucagucgucugaacuggcucacgcauuuaaauuuuaaguauccagcacugaacgugacuaugcccaacaaugagcaguucgacaaacuuuacaucuggggaguccaccauccuggcaccgauaaagaccagaucuuuuuguaugcccagagcucuggcagaauuacaguguccacuaagaggucacaacaggcuguaauaccaaacauugggagccggccccgcaucagaaauauuccuaguaggaucucuaucuacuggaccauuguuaaaccaggagauauacugcuaaucaacuccacagguaaucucauugccccgcggggcuacuucaagauccgcagcgggaaaucgucuaugaugcgauccgacgcgcccauaggaaaguguaagucagaaugcauuaccccuaacggcaguaucccaaaugacaaacccuuucagaacgugaauagaaucacguauggugcauguccuagguacgucaagcagagcacucugaaacuugccacagggaugcggaacgugccagagaagcaaacccguggaauuuucggcgcuaucgccggcuuuauugaaaaugggugggagggaaugguggaugguugguauggcuuccgccaccagaacuccgaggggagaggacaggcagcugaccugaaaucuacucaagccgcgauagaucagaucaauggcaaguugaacaggcucauugguaaaacaaaugaaaaguuccaccagaucgagaaggaauuuagcgaggucgaagggcggauccaggaccuggagaaauacguugaggauaccaagauugacuuauggucauauaacgccgaacugcucguggcacuugagaaccaacauacgauagaucugaccgacagugaaaugaauaaauuguucgagaagacaaagaagcagcuacgagaaaacgcugaggauaugggcaauggaugcuuuaagaucuaccacaaaugugacaacgccugcauuggcuccauccgcaaugggacuuaugaucaugacguauacagagacgaggcucugaacaauagguuccagauuaagggaguggaacucaaaagcgguuacaaggauuggauccuguggauaucuuuugccaucucaugcuuccuucugugugucgcauugcucggcuuuauuaugugggccugccagaaagggaacauccgguguaauauuugcaucuga

SEQ ID NO: 139743 - RNA, 1701 nt, Artificial Sequence
  derived and/or modified CDS sequence (opt3) from hemagglutinin__InfluenzaA__AHL99438
augaagaccaucauugcccugagcuacauacucugccuuguguucgcucagaaacugcccggcaacgacaauuccacagcaacuuuguguuuagggcaccaugccgucccuaacggaacgaucguuaagaccauuacaaaugauagaaucgaggugacuaacgcgaccgaacugguacaaaauucuucaauuggugagaucugcgacaguccacaccagauacuagauggcgaaaacuguacacucaucgacgcucugcuuggggauccgcagugcgacggauuucagaauaaaaagugggaucuguucguggagaggagcaaagccuauuccaacuguuaccccuaugacgucccugauuacgcaucuuugcggucgcucguggccucaagcggcacccuggaauuuaauaacgagaguuucaauuggacugguguuacacaaaacgggaccuccucugcuugcauucgccgaagcaauuccucauuuuucagucgucugaacuggcucacgcauuuaaauuuuaaguauccagcacugaacgugacuaugcccaacaaugagcaguucgacaaacuuuacaucuggggaguccaccauccuggcaccgauaaagaccagaucuuuuuguaugcccagagcucuggcagaauuacaguguccacuaagaggucacaacaggcuguaauaccaaacauugggagccggccccgcaucagaaauauuccuaguaggaucucuaucuacuggaccauuguuaaaccaggagauauacugcuaaucaacuccacagguaaucucauugccccgcggggcuacuucaagauccagagcgggaaaucgucuauaaugcgcuccgacgcgcccauuggaaaguguaagucagaaugcaucaccccuaacggcaguaucccaaaugacaaacccuuucagaacgugaaucgaauuacguauggugcauguccuagauacgucaagcaaagcacucugaaacuugccacagggaugaggaacgugccagagaagcagacccggggaaucuucggcgcuauugccggcuuuauagaaaaugggugggagggaaugguggaugguugguauggcuuccgucaccagaacuccgaggggcgcggacaagcagcugaccugaaaucuacucaggccgcgaucgaucagauuaauggcaaguugaacagacucaucgguaaaacaaaugaaaaguuccaccagaucgagaaggaauuuagcgaggucgaagggaggauucaagaccuggagaaauacguugaggauaccaagauagacuuauggucauauaacgccgaacugcucguggcacuugagaaccagcauacgaucgaucugaccgacagugaaaugaauaaauuguucgagaagacaaagaagcagcuacgggaaaacgcugaggauaugggcaauggaugcuuuaagauuuaccacaaaugugacaacgccugcaucggcuccauucgaaaugggacuuaugaucaugacguauaccgcgacgaggcucugaacaauagauuccagaucaagggaguggaacucaaaagcgguuacaaggauuggauacuguggaucucuuuugccauuucaugcuuccuucugugugucgcauugcucggcuuuaucaugugggccugccaaaaagggaacauuagguguaauaucugcauauga

SEQ ID NO: 139744 - RNA, 1701 nt, Artificial Sequence; identical to SEQ ID NO: 138042
  derived and/or modified CDS sequence (opt3) from hemagglutinin__InfluenzaA__AHL99450

SEQ ID NO: 139745 - RNA, 1701 nt, Artificial Sequence; identical to SEQ ID NO: 138515
  derived and/or modified CDS sequence (opt3) from hemagglutinin__InfluenzaA__AHL99462

SEQ ID NO: 139746 - RNA, 1701 nt, Artificial Sequence; identical to SEQ ID NO: 138045
  derived and/or modified CDS sequence (opt3) from hemagglutinin__InfluenzaA__AHL99474

SEQ ID NO: 139747 - RNA, 1701 nt, Artificial Sequence; identical to SEQ ID NO: 138071
  derived and/or modified CDS sequence (opt3) from hemagglutinin__InfluenzaA__AHL99486

SEQ ID NO: 139748 - RNA, 1701 nt, Artificial Sequence; identical to SEQ ID NO: 138042
  derived and/or modified CDS sequence (opt3) from hemagglutinin__InfluenzaA__AHL99498

SEQ ID NO: 139749 - RNA, 1701 nt, Artificial Sequence; identical to SEQ ID NO: 137906
  derived and/or modified CDS sequence (opt3) from hemagglutinin__InfluenzaA__AHL99510

SEQ ID NO: 139750 - RNA, 1701 nt, Artificial Sequence; identical to SEQ ID NO: 137906
  derived and/or modified CDS sequence (opt3) from hemagglutinin__InfluenzaA__AHL99522

SEQ ID NO: 139751 - RNA, 1701 nt, Artificial Sequence; identical to SEQ ID NO: 137931
  derived and/or modified CDS sequence (opt3) from hemagglutinin__InfluenzaA__AHL99534

SEQ ID NO: 139752 - RNA, 1701 nt, Artificial Sequence; identical to SEQ ID NO: 137906
  derived and/or modified CDS sequence (opt3) from hemagglutinin__InfluenzaA__AHL99546

SEQ ID NO: 139753 - RNA, 1701 nt, Artificial Sequence; identical to SEQ ID NO: 137906
  derived and/or modified CDS sequence (opt3) from hemagglutinin__InfluenzaA__AHL99558

SEQ ID NO: 139754 - RNA, 1701 nt, Artificial Sequence
  derived and/or modified CDS sequence (opt3) from hemagglutinin__InfluenzaA__AHL99570
augaagaccaucauugcccugagcuacauacucugccuuguguucgcucagaaacugcccggcaacgacaauuccacagcaacuuuguguuuagggcaccaugccgucccuaacggaacgaucguuaagaccauuacaaaugauagaaucgaggugacuaacgcgaccgaacugguacaaaauucuucaauuggugagaucugcgacaguccacaccagauacuagauggcgaaaacuguacacucaucgacgcucugcuuggggauccgcagugcgacggauuucagaauaaaaagugggaucuguucguggagaggagcaaagccuauuccucuuguuaccccuaugacgucccugauuacgcaucguugcggucacucguggccagcaguggcacccuggaauuuaacaaugaguccuucaacuggacugguguuacacaaaaugggaccucuagcgcuugcauucgccgauccaacucaaguuucuuuagccgucugaauuggcucacgcauuuaaacuuuaaguauccagcacugaaugugacuaugcccaacaacgagcaguucgacaaacuuuacaucuggggaguccaccauccuggcaccgauaaagaccagaucuuuuuguaugcccagucuuccggcagaauuacagugucaacuaagaggagccaacaggcuguaauaccaaauauugggagucggccccgcaucagaaacauuccuucuaggaucuccaucuacuggaccauuguuaaaccaggagauauacugcuaaucaauagcacagguaaccucauugccccgcggggcuacuucaagauccgcucggggaaaucuuccauaaugcgaucagacgcgcccauuggaaaguguaagagugaaugcaucaccccuaauggcagcaucccaaacgacaaacccuuucagaaugugaacagaauuacguauggugcauguccuagguacaucaagcaguccacucugaaacuugccacagggaugcggaaugucccagagaagcaaacccguggaauuuucggcgcuauagccggcuuuaucgaaaacgggugggagggaaugguggaugguugguauggcuuccgccaccaaaauucugaggggagaggacaggcagcugaccugaaaagcacucaggccgcgauugaucagaucaacggcaaguugaauaggcucaucgguaaaacaaacgaaaaguuccaccagauugagaaggaauuuucagagguggaagggcggauacaggaccuggagaaauacgucgaggauaccaagaucgacuuauggaguuauaaugccgaacugcucguugcacuugagaaccaacauacgauugaucugaccgacuccgaaaugaacaaauuguucgagaagacaaagaagcagcuacgagaaaaugcugaggauaugggcaacggaugcuuuaagaucuaccacaaaugugacaaugccugcauuggcagcauccgcaacgggacuuaugaucaugacguguacagagacgaggcucugaauaacagguuccagauaaagggaguagaacucaaaucugguuacaaggauuggauccuguggauuucauuugccaucaguugcuuccuucuguguguggcauugcucggcuuuauuaugugggccugccagaaagggaauauccgguguaacauaugcauuuga

SEQ ID NO: 139755 - RNA, 1701 nt, Artificial Sequence; identical to SEQ ID NO: 137906
  derived and/or modified CDS sequence (opt3) from hemagglutinin__InfluenzaA__AHL99582

SEQ ID NO: 139756 - RNA, 1701 nt, Artificial Sequence
  derived and/or modified CDS sequence (opt3) from hemagglutinin__InfluenzaA__AHL99594
augaaggccauccugguggucaugcucuacaccuucgcuacagcaaacgccgacacucuuugcauuggcuaucacgcgaauaacagcacggauaccguugacacagugcuggagaaaaauguaacugugacccauuccgucaacuuguuagaagauaagcacaaugggaaacuguguaagcuaagaggaguggcuccccuccaucuggguaaaugcaacauagccggcuggauccuugggaauccugagugugaaucucugucaacagcaaguagcugguccuacauuguugagaccucuggaucggacaacggcacuugcuauccaggugauuuuaucgacuacgaagaguugagggagcagcucucaagcgugaguuccuucgaacgguuugagauuuucccgaagacaucuagcuggcccaaucacgauuccaacaagggggucaccgccgcuuguccucgcgcaggagccaaaggcuuuuauaagaaucugaucuggcuggugaaaaagggcaacucauacccaaaacucaguauaagcuauaucaaugacaaggggaaggaaguauuaguucugugggguauucaucaccccucuacgacugcugaucaacagucccuuuaccagaacgccgacaccuacguguucgucggaacaucacgauauagcaaaaaguuuaaaccugagaucgcgauucguccaaaggugagagaucaggagggcaggaugaauuacuauuggacuuugguggaacccggggacaaaaucaccuucgaggcaacaggaaaccuggucguuccucgguacgccuuugcuauggaacgcaacgccggcagugguauaauuaucucugauaccccagugcacgacugcaauacgacuugucaaacaccgaagggggcaauuaacaccucccuacccuuccagaauauccauccuaucacuauuggaaaaugcccaaaguauguaaagagcacaaaacucagacuggcuaccggccuuaggaacgugcccucgauacagucucggggccuguuuggggccaucgcgggauucauugaggguggcuggacggggauggucgacggaugguacggcuaucaccaucagaaugaacaagguuccggguacgccgcagauuugaagucaacccagaacgcuaucgacaaaauaacaaauaaggugaacaguguuauugagaaaaugaauacucaguuuaccgccgugggcaaggaguucaaccaccucgaaaagcgcaucgagaaucugaacaaaaaggucgaugacggauucuuagauaucuggacauacaaugcugaacugcucgugcuucuggagaacgaacgaacuuuggacuaucacgauagcaauguuaaaaaccuauacgagaagguaagaaaccagcugaaaaauaacgccaaggagauuggcaauggguguuuugaguucuaucauaagugcgacaacaccuguauggaauccgugaaaaauggaacauacgauuauccuaaguacucugaagaggcaaaacucaacagggaagagaucgacggugucaagcuggagagcacccggauuuaucaaauacuugccaucuacucaacugcugcgaguucccugguguuggucgugagccucggcgcaauuucuuuuuggaugugcucaaaugggagucugcagugccguaucuguaucuga

SEQ ID NO: 139757 - RNA, 1701 nt, Artificial Sequence; identical to SEQ ID NO: 138515
  derived and/or modified CDS sequence (opt3) from hemagglutinin__InfluenzaA__AHL99605

SEQ ID NO: 139758 - RNA, 1701 nt, Artificial Sequence; identical to SEQ ID NO: 138045
  derived and/or modified CDS sequence (opt3) from hemagglutinin__InfluenzaA__AHL99617

SEQ ID NO: 139759 - RNA, 1701 nt, Artificial Sequence; identical to SEQ ID NO: 137906
  derived and/or modified CDS sequence (opt3) from hemagglutinin__InfluenzaA__AHL99629

SEQ ID NO: 139760 - RNA, 1701 nt, Artificial Sequence
  derived and/or modified CDS sequence (opt3) from hemagglutinin__InfluenzaA__AHL99641
augaagaccaucauugcccugagcuacauacucugccuuguguucgcucagaaacugcccggcaacgacaauuccacagcaacuuuguguuuagggcaccaugccgucccuaacggaacgaucguuaagaccauuacaaaugauagaaucgaggugacuaacgcgaccgaacugguacaaaauucuucaauuggugagaucugcgacaguccacaccagauacuagauggcgaaaacuguacacucaucgacgcucugcuuggggauccgcagugcgacggauuucagaauaaaaagugggaucuguucguggagaggagcaaagccuauuccaacuguuaccccuaugacgucccugauuacgcaucuuugcggucgcucguggccucaagcggcacccuggaauuuaauaacgagaguuucaauuggacugguguuacacaaaacgggaccuccucugcuugcauucgccgaagcaauuccucauuuuucagucgucugaacuggcucacgcauuuaaauuuuaaguauccagcacugaacgugacuaugcccaacaaugagcaguucgacaaacuuuacaucuggggaguccaccauccuggcaccgauaaagaccagaucuuuuuguaugcccagagcucuggcagaauuacaguguccacuaagaggucacaacaggcuguaguuccaaacauagggagccggccccgcauuagaaauaucccuaguaggauuucuaucuacuggaccaucgugaaaccaggagauauucugcuaauaaacuccacagguaaucucaucgccccgcggggcuacuucaagauucgcagcgggaaaucgucuaucaugcgauccgacgcgcccauaggaaaguguaagucagaaugcauuaccccuaacggcaguaucccaaaugacaaacccuuucagaacgucaauagaaucacguauggugcauguccuagguacgugaagcagagcacucugaaacuugccacagggaugcggaacgugccagagaagcaaacccguggaauuuucggcgcuaucgccggcuuuauugaaaaugggugggagggaauggucgaugguugguauggcuuccgccaccagaacuccgaggggagaggacaggcagcugaccugaaaucuacucaagccgcgauagaucagaucaauggcaaguugaacaggcucauugguaaaacaaaugaaaaguuccaccagaucgagaaggaauuuagcgagguugaagggcggauccaggaccuggagaaauacguggaggauaccaagauugacuuauggucauauaacgccgaacugcucguagcacuugagaaccaacauacgauagaucugaccgacagugaaaugaauaaauuguucgagaagacaaagaagcagcuacgagaaaacgcugaggauaugggcaauggaugcuuuaagaucuaccacaaaugugacaacgccugcauuggcuccauccgcaaugggacuuauaaccaugauguguacagagacgaggcucugaauaacagguuccagauuaagggagucgaacucaaaagcgguuacaaggacuggauccuguggauaucuuuugccaugucaugcuuccuucuguguguggcauugcucggcuuuaucaugugggccugccagaaagggaauauucgguguaacaucugcauuuga

SEQ ID NO: 139761 - RNA, 1701 nt, Artificial Sequence
  derived and/or modified CDS sequence (opt3) from hemagglutinin__InfluenzaA__AHL99665
augaagaccaucauugcccugagcuacauacucugccuuguguucgcucagaaacugcccggcaacgacaauuccacagcaacuuuguguuuagggcaccaugccgucccuaacggaacgaucguuaagaccauuacaaaugauagaaucgaggugacuaacgcgaccgaacugguacaaaauucuucaauuggugagaucugcgacaguccacaccagauacuagauggcgaaaacuguacacucaucgacgcucugcuuggggauccgcagugcgacggauuucagaauaaaaagugggaucuguucguggagaggagcaaagccuauuccaacuguuaccccuaugacgucccugauuacgcaucuuugcggucgcucguggccucaagcggcacccuggaauuuaauaacgagaguuucaauuggacugguguuacacaaaacgggaccuccucugcuugcauucgccgaagcaauuccucauuuuucagucgucugaacuggcucacgcauuuaaauuuuaaguauccagcacugaacgugacuaugcccaacaaugagcaguucgacaaacuuuacaucuggggaguccaccauccuggcaccgauaaagaccagaucuuuuuguaugcccagagcucuggcagaauuacaguguccacuaagaggucacaacaggcuguaauaccaaacauugggagccggccccgcaucagaaauauuccuaguaggaucucuaucuacuggaccauuguuaaaccaggagauauacugcuaaucaacuccacagguaaucucauugccccgcggggcuacuucaagauccgcagcgggaaaucgucuauaaugcgauccgacgcgcccauuggaaaguguaagucagaaugcaucaccccuaacggcaguaucccaaaugacaaacccuuucagaacgugaauagaauuacguauggugcauguccuagguacaucaagcagagcacucugaaacuugccacagggaugcggaacgucccagagaagcaaacccguggaauuuucggcgcuauagccggcuuuaucgaaaaugggugggagggaaugguggaugguugguauggcuuccgccaccagaacuccgaggggagaggacaggcagcugaccugaaaucuacucaagccgcgauugaucagaucaauggcaaguugaacaggcucaucgguaaaacaaaugaaaaguuccaccagauugagaaggaauuuagcgagguggaagggcggauacaggaccuggagaaauacgucgaggauaccaagaucgacuuauggucauauaacgccgaacugcucguugcacuugagaaccaacauacgauugaucugaccgacagugaaaugaauaaauuguucgagaagacaaagaagcagcuacgagaaaacgcugaggauaugggcaauggaugcuuuaagaucuaccacaaaugugacaacgccugcauuggcuccauccgcaaugggacuuaugaucaugacguguacagagacgaggcucugaacaauagguuccagauaaagggaguagaacucaaaagcgguuacaaggauuggauccuguggauuucuuuugccaucucaugcuuccuucuguguguggcauugcucggcuuuauuaugugggccugccagaaagggaacauccgguguaauauaugcauuuga

SEQ ID NO: 139762 - RNA, 1701 nt, Artificial Sequence; identical to SEQ ID NO: 137906
  derived and/or modified CDS sequence (opt3) from hemagglutinin__InfluenzaA__AHL99677

SEQ ID NO: 139763 - RNA, 1701 nt, Artificial Sequence; identical to SEQ ID NO: 137906
  derived and/or modified CDS sequence (opt3) from hemagglutinin__InfluenzaA__AHL99689

SEQ ID NO: 139764 - RNA, 1701 nt, Artificial Sequence
  derived and/or modified CDS sequence (opt3) from hemagglutinin__InfluenzaA__AHL99701
augaagaccaucauugcccugagcuacauacucugccuuguguucgcucagaaacugcccggcaacgacaauuccacagcaacuuuguguuuagggcaccaugccgucccuaacggaacgaucguuaagaccauuacaaaugauagaaucgaggugacuaacgcgaccgaacugguacaaaauucuucaauuggugagaucugcgacaguccacaccagauacuagauggcgaaaacuguacacucaucgacgcucugcuuggggauccgcagugcgacggauuucagaauaaaaagugggaucuguucguggagaggagcaaagccuauuccaacuguuaccccuaugacgucccugauuacgcaucuuugcggucgcucguggccucaagcggcacccuggaauuuaauaacgagaguuucaauugggcugguguuacucaaaacgggacauccucugcaugcauucgcggaagcaauuccucauuuuucagucgacugaacuggcucacccauuuaaauuuuaaguauccagcccugaacgugacgaugcccaacaaugagcaguucgacaaacuuuacaucuggggcguccaccauccuggcacugauaaagaccagaucuuuuuguaugcucagagcucugggcguauuaccguguccacaaagagaucacaacaggccguaacuccaaacauaggaagcaggccccggauucgcaauaucccuaguagaauuucuaucuacuggaccaucguuaaaccaggugauauucugcuaauaaacuccacaggcaaucucaucgcgccgaggggguacuucaagauucggagcggaaaaucgucuaucaugcgcuccgacgcacccauaggcaaguguaagucagaaugcauuaccccuaacgguaguaucccaaaugacaaacccuuucagaacgugaaucgaaucacguauggggccuguccuagauacgucaagcagagcacucugaaacuugcuacaggaaugaggaacgugccagagaagcaaacccggggcauuuucggcgccaucgcaggguuuauugaaaauggaugggaggguaugauggauggcugguauggguuccgucaccagaacuccgagggacgcggccaggcugccgaccugaaaucuacucaagcggccauagaucagaucaaugguaaguugaacagacucauugggaaaacaaaugaaaaguuccaccagaucgagaaggaauuuagcgagguggaaggcaggauccaggaccuggagaaauacgucgaggauaccaagauugacuuauggucauauaacgcagaacugcucguugcucuugagaaccaacauacgauagaucugaccgacagugaaaugaauaaauuguucgagaagacaaagaagcagcuacgggaaaacgccgaggauaugggaaauggcugcuuuaagaucuaccacaaaugugacaacgcuugcauuggguccauccgaaauggaacuuaugaucaugacguguaccgcgacgaggcccugaacaauagauuccagauuaaggguguagaacucaaaagcggcuacaaggauuggauccuguggauaucuuuugcaaucucaugcuuccuucuguguguggccuugcucggguuuauuaugugggcuugccagaaaggaaacaucagguguaauauuugcaucuga

SEQ ID NO: 139765 - RNA, 1701 nt, Artificial Sequence
  derived and/or modified CDS sequence (opt3) from hemagglutinin__InfluenzaA__AHL99713
augaagaccaucauugcccugagcuacauacucugccuuguguucgcucagaaacugcccggcaacgacaauuccacagcaacuuuguguuuagggcaccaugccgucccuaacggaacgaucguuaagaccauuacaaaugauagaaucgaggugacuaacgcgaccgaacugguacaaaauucuucaauuggugagaucugcgacaguccacaccagauacuagauggcgaaaacuguacacucaucgacgcucugcuuggggauccgcagugcgacggauuucagaauaaaaagugggaucuguucguggagaggagcaaagccuauuccaacuguuaccccuaugacgucccugauuacaccucuuugcggucgcucguggcaucaagcggcacucuggaauuuaauaacgagaguuucaauuggacagguguuacccaaaacgggacguccucugccugcauucgccgaagcaauuccucauuuuucagucgucugaacuggcucacucauuuaaauuuuaaguauccagcucugaacgugaccaugcccaacaaugagcaguucgacaaguuguacaucuggggaguccaccauccuggcacagauaaagaccagauuuuucuuuaugcacagagcucuggcagaaucacuguguccaccaagaggucacaacaggccguaauaccaaacauugggagccggccccgcaucagaaauauuccuaguaggaucucuaucuacuggacaauuguuaaaccaggagauauacugcuaaucaacuccaccgguaaucucauugcuccgcggggcuacuucaagauccgcagcgggaaaucgucuauaaugcgauccgacgcccccauuggaaaguguaagucagaaugcaucacgccuaacggcaguaucccaaaugacaaacccuuucagaacgugaauagaauuacuuauggugcguguccuagguacgucaagcagagcacacugaaacuugcaaccgggaugcggaacgugccagagaagcaaacucguggaaucuucggcgccauugcuggcuuuauagaaaaugggugggagggaaugguggaugguugguauggcuuccgccaccagaacuccgaggggagaggacaggccgcagaccugaaaucuacacaagcugccaucgaucagauuaauggcaaguugaacaggcucaucgguaaaaccaaugaaaaguuccaccagaucgagaaggaauuuagcgaggucgaagggcggauucaggaccuggagaaauacguugaggauacgaagauagacuuauggucauauaacgcggaacugcucguggcccuugagaaccaacauaccaucgaucugacagacagugaaaugaauaaauuguucgagaagacuaaaaagcagcuacgagaaaacgcagaggauaugggcaauggaugcuuuaagauuuaccacaaaugugacaacgcuugcaucggcuccauucgcaaugggaccuaugaucaugacguauacagagacgaggcccugaacaauagguuccagaucaagggaguggaacucaaaagcgguuacaaggauuggauacuguggaucucuuuugcuauuacaugcuuccuucugugugucgccuugcucggcuuuaucaugugggcaugccagaaagggaacauucgguguaauaucugcauauga

SEQ ID NO: 139766 - RNA, 1701 nt, Artificial Sequence; identical to SEQ ID NO: 137906
  derived and/or modified CDS sequence (opt3) from hemagglutinin__InfluenzaA__AHL99725

SEQ ID NO: 139767 - RNA, 1701 nt, Artificial Sequence; identical to SEQ ID NO: 138108
  derived and/or modified CDS sequence (opt3) from hemagglutinin__InfluenzaA__AHL99737

SEQ ID NO: 139768 - RNA, 1701 nt, Artificial Sequence; identical to SEQ ID NO: 137906
  derived and/or modified CDS sequence (opt3) from hemagglutinin__InfluenzaA__AHL99748

SEQ ID NO: 139769 - RNA, 1701 nt, Artificial Sequence; identical to SEQ ID NO: 137906
  derived and/or modified CDS sequence (opt3) from hemagglutinin__InfluenzaA__AHL99760

SEQ ID NO: 139770 - RNA, 1701 nt, Artificial Sequence; identical to SEQ ID NO: 137916
  derived and/or modified CDS sequence (opt3) from hemagglutinin__InfluenzaA__AHL99772

SEQ ID NO: 139771 - RNA, 1701 nt, Artificial Sequence; identical to SEQ ID NO: 137931
  derived and/or modified CDS sequence (opt3) from hemagglutinin__InfluenzaA__AHL99784

SEQ ID NO: 139772 - RNA, 1701 nt, Artificial Sequence; identical to SEQ ID NO: 138071
  derived and/or modified CDS sequence (opt3) from hemagglutinin__InfluenzaA__AHL99796

SEQ ID NO: 139773 - RNA, 1701 nt, Artificial Sequence; identical to SEQ ID NO: 137906
  derived and/or modified CDS sequence (opt3) from hemagglutinin__InfluenzaA__AHL99808

SEQ ID NO: 139774 - RNA, 1701 nt, Artificial Sequence
  derived and/or modified CDS sequence (opt3) from hemagglutinin__InfluenzaA__AHL99820
augaagaccaucauugcccugagcuacauacucugccuuguguucgcucagaaacugcccggcaacgacaauuccacagcaacuuuguguuuagggcaccaugccgucccuaacggaacgaucguuaagaccauuacaaaugauagaaucgaggugacuaacgcgaccgaacugguacaaaauucuucaauuggugagaucugcgacaguccacaccagauacuagauggcgaaaacuguacacucaucgacgcucugcuuggggauccgcagugcgacggauuucagaauaaaaagugggaucuguucguggagaggagcaaagccuauuccaacuguuaccccuaugacgucccugauuacgcaucuuugcggucgcucguggccucaagcggcacccuggaauuuaauaacgagaguuucaauuggacugguguuacacaaaacgggaccuccucugcuugcauucgccgaagcaauuccucauuuuucagucgucugaacuggcucacgcauuuaaauuuuaaguauccagcacugaacgugacuaugcccaacaaugagcaguucgacaaacuuuacaucuggggaguccaccauccuggcaccgauaaagaccagaucuuuuuguaugcccagagcucuggcagaauuacaguguccacuaagaggucacaacaggcuguaauaccaaacauugggagccggccccgcaucagaaauauuccuaguaggaucucuaucuacuggaccauuguuaaaccaggagauauacugcuaaucaacuccacagguaaucucauugccccgcggggcuacuucaagauccgcagcgggaaaucgucuauaaugcgauccgacgcgcccauuggaaaguguaagucagaaugcaucaccccuaacggcaguaucccaaaugacaaacccuuucagaacgugaauagaauuacguauggugcauguccuagguacgucaagcagagcacucugaaacuugccacagggaugcggaacgugccagagaagcaaacccguggaaucuucggcgcuauugccggcuuuauagaaaaugggugggagggaaugguggaugguugguauggcuuccgccaccagaacuccgacgggagaggacaggcagcugaucugaaaucuacucaagccgcgaucgaccagauuaauggcaaguugaacaggcucaucgguaaaacaaaugagaaguuccaccagaucgaaaaggaguuuagcgaagucgaggggcggauucaggaucuggaaaaauacguugaggacaccaagauagauuuauggucauauaacgccgagcugcucguggcacuugaaaaccaacauacgaucgaccugaccgauagugagaugaauaaauuguucgaaaagacaaagaagcagcuacgagagaacgcugaagacaugggcaauggaugcuuuaagauuuaccacaaaugugauaacgccugcaucggcuccauucgcaaugggacuuaugaccaugacguauacagagaugaggcucugaacaauagguuccagaucaagggaguggagcucaaaagcgguuacaaggacuggauacuguggaucucuuuugccauuucaugcuuccuucugugugucguguugcucggcuuuaucaugugggcaugccagaaagggaacauucgguguaauaucugcauauga

SEQ ID NO: 139775 - RNA, 1701 nt, Artificial Sequence; identical to SEQ ID NO: 137906
  derived and/or modified CDS sequence (opt3) from hemagglutinin__InfluenzaA__AHL99832

SEQ ID NO: 139776 - RNA, 1701 nt, Artificial Sequence; identical to SEQ ID NO: 137931
  derived and/or modified CDS sequence (opt3) from hemagglutinin__InfluenzaA__AHL99844

SEQ ID NO: 139777 - RNA, 1701 nt, Artificial Sequence; identical to SEQ ID NO: 137883
  derived and/or modified CDS sequence (opt3) from hemagglutinin__InfluenzaA__AHL99856

SEQ ID NO: 139778 - RNA, 1701 nt, Artificial Sequence
  derived and/or modified CDS sequence (opt3) from hemagglutinin__InfluenzaA__AHL99868
augaagaccaucauugcccugagcuacauacucugccuuguguucgcucaggagcugcccggcaacgacgauuccacagcaacuuuguguuuagggcaccaugccgucccuaauggaacgaucguuaaaaccauuacaaacgaccaaaucgaagugacuaaugcgaccgagcugguacagucuucaaguacaggugaaauuugcaacagcccacaccagauccuagauggcgagaauuguacccucauagacgcucugcuuggggauccgcagugcgacggauuucaaaacaagaaaugggaucuguucguggaaagauccaaggcccauucuaauuguuaucccuacgacgucccugauuaugcaucguugaggucacucguggccagcaguggcacucuggaguuuaacaaugaguccuucaacuggacagguguuacccagaaugggacgucuagcgcuugcauccggcgcuccaacaauucauuuuucagucgacugaacuggcucacucacuuaaauuuuaaauacccagcacugaacgugaccaugcccaacaaugaacaguucgacaagcuguauauuuggggaguccaucacccuggcacagauaaggaccagaucuuuuuguacgcccaagcuagcggccguauuacugugucuaccaaaaagucccagcaggccguaaucccaaacauagggucaagacccaggguucggaauauuccuagccgcgugaguaucuauuggacaauugucaaaccaggagauauccugcuaaucaacucuaccgguaaucucauugcgccgagaggcuacuucaagauaagguccgggaaaagcucgaucaugcggucugacgcacccauuggaaaguguaacuccgccugcaucacgccuaauggcucaauaccaaacgacaagcccuuucagaaugugaaccgcauuacuuacggugcuuguccucgauaugugaaacaaaauacacugaaacuugccaccgggaugagaaacgucccagagaagcagacuaggggaaucuucggcgcaaucgcuggcuuuauugaaaaugggugggagggaaugguugaugguugguacggcuuccggcaccagaacagugaggggcguggacaagccgcggaccuuaagagcacacaggccgcaaucgaucagauuaauggcaaauugaaccgccucauagguaagaccaacgaaaaauuccaucagaucgagaaggaauuuuccgagguggaagggaggauucaagaccuggagaaguauguagaggauacgaaaaucgacuuauggucuuacaaugcugaacugcucguggcccuugagaaccagcacaccaucgaucugacagacagcgaaaugaauaaguuguucgagaaaacuaagaaacagcuaagagaaaacgcugaggauaugggcaauggaugcuuuaagauuuaucauaagugugacaacgccugcauaggcucaauccggaaugggaccuacgaucacgacgucuaucgagacgaggcacugaacaaucgcuuccagauuaaaggaguggaacucaagagugguuacaaagauuggauccuguggauuuccuuugccaucagcugcuuccuucuguguguugcuuugcucggcuuuauaaugugggcgugccaaaaggggaacaucagauguaauauuugcaucuga

SEQ ID NO: 139779 - RNA, 1701 nt, Artificial Sequence; identical to SEQ ID NO: 138045
  derived and/or modified CDS sequence (opt3) from hemagglutinin__InfluenzaA__AHL99880

SEQ ID NO: 139780 - RNA, 1701 nt, Artificial Sequence; identical to SEQ ID NO: 137906
  derived and/or modified CDS sequence (opt3) from hemagglutinin__InfluenzaA__AHL99892

SEQ ID NO: 139781 - RNA, 1701 nt, Artificial Sequence; identical to SEQ ID NO: 138042
  derived and/or modified CDS sequence (opt3) from hemagglutinin__InfluenzaA__AHL99904

SEQ ID NO: 139782 - RNA, 1701 nt, Artificial Sequence
  derived and/or modified CDS sequence (opt3) from hemagglutinin__InfluenzaA__AHL99916
augaagaccaucauugcccugagcuacauacucugccuuguguucgcucagaaacugcccggcaacgacaauuccacagcaacuuuguguuuagggcaccaugccgucccuaacggaacgaucguuaagaccauuacaaaugauagaaucgaggugacuaacgcgaccgaacugguacaaaauucuucaauuggugagaucugcgacaguccacaccagauacuagauggcgaaaacuguacacucaucgacgcucugcuuggggauccgcagugcgacggauuucagaauaaaaagugggaucuguucguggagaggagcaaagccuauuccaacuguuaccccuaugacgucccugauuacgcaucuuugcggucgcucguggccucaagcggcacccuggaauuuaauaacgagaguuucaauugggcugguguuacucaaaacgggacauccucugcaugcauucgcggaagcaauuccucauuuuucagucgacugaacuggcucacccauuuaaauuuuaaguauccagcccugaacgugacgaugcccaacaaugagcaguucgacaaguuguacaucuggggcguccaccauccuggcacugauaaagaccagauuuuucuuuaugcucagagcucugggcguaucaccguguccacaaagagaucacaacaggccguaauaccaaacauuggaagcaggccccggauccgcaauauuccuaguagaaucucuaucuacuggacuauuguuaaaccaggugauauacugcuaaucaacuccaccggcaaucucauugcgccgaggggguacuucaagaugcggagcggaaaaucgucuaucaugcgcuccgacgcacccauaggcaaguguaagucagaaugcauuacaccuaacgguaguaucccaaaugacaaacccuuucagaacgugaaucgaaucaccuauggggccuguccuagauacgucaagcagagcacgcugaaacuugcuacuggaaugaggaacgugccagagaagcaaacacggggcauuuucggcgccaucgcaggguuuauugaaaauggaugggaggguaugauggauggcugguauggguuccgucaccagaacuccgagggacgcggccaggcugccgaccugaaaucuacccaagcggccauagaucagaucaaugguaaguugaacagacucauugggaaaacuaaugaaaaguuccaccagaucgagaaggaauuuagcgagguggaaggcaggauccaggaccuggagaaauacgucgaggauacaaagauugacuuauggucauauaacgcagaacugcucguugcucuugagaaccaacauaccauagaucugacggacagugaaaugaauaaauuguucgagaagaccaaaaagcagcuacgggaaaacgccgaggauaugggaaauggcugcuuuaagaucuaccacaaaugugacaacgcuugcauuggguccauccgaaauggaacauaugaucaugacguguaccgcgacgaggcccugaacaauagauuccagauuaaggguguagaacucaaaagcggcuacaaggauuggauccuguggauaucuuuugcaaucucaugcuuccuucuguguguggccuugcucggguuuauuaugugggcuugccagaaaggaaacaucagguguaauauuugcaucuga

SEQ ID NO: 139783 - RNA, 1701 nt, Artificial Sequence; identical to SEQ ID NO: 137931
  derived and/or modified CDS sequence (opt3) from hemagglutinin__InfluenzaA__AHL99928

SEQ ID NO: 139784 - RNA, 1701 nt, Artificial Sequence
  derived and/or modified CDS sequence (opt3) from hemagglutinin__InfluenzaA__AHL99940
augaagaccaucauugcccugagcuacauacucugccuuguguucgcucagaaacugcccggcaacgacaauuccacagcaacuuuguguuuagggcaccaugccgucccuaacggaacgaucguuaagaccauuacaaaugauagaaucgaggugacuaacgcgaccgaacugguacaaaauucuucaauuggugagaucugcgacaguccacaccagauacuagauggcgaaaacuguacacucaucgacgcucugcuuggggauccgcagugcgacggauuucagaauaaaaagugggaucuguucguggagaggagcaaagccuauuccaacuguuaccccuaugacgucccugauuacgcaucuuugcggucgcucguggccucaagcggcacccuggaauuuaauaacgagaguuucaauuggacugguguuacacaaaacgggaccuccucugcuugcauucgccgaagcaauuccucauuuuucagucgucugaacuggcucacgcauuuaaauuuuaaguauccagcacugaacgugacuaugcccaacaaugagcaguucgacaaacuuuacaucuggggaguccaccauccuggcaccgauaaagaccagaucuuuuuguaugcccagagcucuggcagaauuacaguguccacuaagaggucacaacaggcuguaauaccaaacauugggagccggccccgcaucagaaauauuccuaguaggaucucuaucuacuggaccauuguuaaaccaggagauauacugcuaaucaacuccacagguaaucucauugccccgcggggcuacuucaagauccgcagcgggaaaucgucuauaaugcgauccgacgcgcccauuggaaaguguaagucagaaugcaucaccccuaacggcaguaucccaaaugacaaacccuuucagaacgugaauagaauuacguauggugcauguccuagguacgucaagcagagcacucugaaacuugccacagggaugcggaacgugccagagaagcaaacccguggaaucuucggcgcuauugccggcuuuauagaaaaugggugggagggaaugguggaugguugguauggcuuccgccaccagaacuccgaggggagaggacaggcagcugaccugaaaucuacucaagccgcgaucgaucagauuaauggcaaguugaacaggcucaucgguaaaacaaaugaaaaguuccaccagaucgagaaggaauuuagcggggucgagggccggauucaggaccuggaaaaauacguugaggauaccaagauagacuuauggucauauaacgccgagcugcucguggcacuugaaaaccaacauacgaucgaucugaccgacagugagaugaauaaauuguucgaaaagacaaagaagcagcuacgagagaacgcugaagauaugggaaauggcugcuuuaagauuuaccacaaaugugacaacgccugcaucggguccauucgcaauggaacuuaugaucaugacguauacagagacgaggcucugaacaauagguuccagaucaaggguguggagcucaaaagcggcuacaaggauuggauacuguggaucucuuuugccauuucaugcuuccuucugugugucgcauugcucggguuuaucaugugggccugccagaaaggaaacauucgguguaauaucugcauauga

SEQ ID NO: 139785 - RNA, 1701 nt, Artificial Sequence; identical to SEQ ID NO: 137906
  derived and/or modified CDS sequence (opt3) from hemagglutinin__InfluenzaA__AHL99952

SEQ ID NO: 139786 - RNA, 1701 nt, Artificial Sequence; identical to SEQ ID NO: 137931
  derived and/or modified CDS sequence (opt3) from hemagglutinin__InfluenzaA__AHL99964

SEQ ID NO: 139787 - RNA, 1701 nt, Artificial Sequence; identical to SEQ ID NO: 137931
  derived and/or modified CDS sequence (opt3) from hemagglutinin__InfluenzaA__AHL99976

SEQ ID NO: 139788 - RNA, 1701 nt, Artificial Sequence; identical to SEQ ID NO: 137931
  derived and/or modified CDS sequence (opt3) from hemagglutinin__InfluenzaA__AHL99988

SEQ ID NO: 139789 - RNA, 1701 nt, Artificial Sequence; identical to SEQ ID NO: 137906
  derived and/or modified CDS sequence (opt3) from hemagglutinin__InfluenzaA__AHM00001

SEQ ID NO: 139790 - RNA, 1701 nt, Artificial Sequence; identical to SEQ ID NO: 137906
  derived and/or modified CDS sequence (opt3) from hemagglutinin__InfluenzaA__AHM00013

SEQ ID NO: 139791 - RNA, 1701 nt, Artificial Sequence; identical to SEQ ID NO: 137916
  derived and/or modified CDS sequence (opt3) from hemagglutinin__InfluenzaA__AHM00025

SEQ ID NO: 139792 - RNA, 1701 nt, Artificial Sequence; identical to SEQ ID NO: 137931
  derived and/or modified CDS sequence (opt3) from hemagglutinin__InfluenzaA__AHM00037

SEQ ID NO: 139793 - RNA, 1701 nt, Artificial Sequence; identical to SEQ ID NO: 137931
  derived and/or modified CDS sequence (opt3) from hemagglutinin__InfluenzaA__AHM00061

SEQ ID NO: 139794 - RNA, 1701 nt, Artificial Sequence; identical to SEQ ID NO: 137906
  derived and/or modified CDS sequence (opt3) from hemagglutinin__InfluenzaA__AHM00073

SEQ ID NO: 139795 - RNA, 1701 nt, Artificial Sequence; identical to SEQ ID NO: 137906
  derived and/or modified CDS sequence (opt3) from hemagglutinin__InfluenzaA__AHM00085

SEQ ID NO: 139796 - RNA, 1701 nt, Artificial Sequence
  derived and/or modified CDS sequence (opt3) from hemagglutinin__InfluenzaA__AHM00097
augaaggccauccuggugguccuccuuuacaccuucgcuacagcaaacgccgacacucugugcauuggcuaucacgcgaauaacagcacggauaccguugacacaguguuggagaaaaauguaacugugacccauuccgucaacuuacuggaagauaagcacaaugggaaacuauguaagcucagaggaguggcuccccugcaucuugguaaaugcaacauagccggcuggauccuggggaauccugagugugaaucuuugucaacagcaaguagcugguccuacauuguugagaccucuucgucagacaacggaacuugcuauccaggcgauuuuaucgacuacgaagaacucagggagcagcugagcaguguguccucuuucgaacgguuugagauuuucccgaagacaagcuccuggcccaaucacgauucaaacaagggugucaccgccgcuuguccucaugcaggggccaaaggauuuuauaagaaucugaucuggcucgugaaaaagggcaacaguuacccaaaauuaagcaauucuuauauaaacgacaagggcaaggaaguacugguucuuugggggauccaccaccccuccacgacugcugaucaacagucauuguaccagaaugccgacaccuacguguucgucggaacaagccgcuauaguaaaaaguuuaaaccugagauugcgauccgaccaaaggugcgugaucaggaggguagaaugaacuacuauuggacucugguggaacccggcgacaaaauuaccuucgaggcaacagggaaccuagucguuccuagguacgccuuugcuauggaacggaaugccggaucuggcaucauaauuuccgauaccacggugcaugacugcaacacuacaugucaaaccccaaagggugcaaucaauacuagccucccguuccagaacauucaccccaucacaaucgggaaaugcccuaaguauguaaagucgaccaaacugcgccuugcuacgggacugagaaaugugccaucuauucaguccaggggcuuguuuggcgccauagcgggguucaucgagggagguuggaccggcauggucgacgggugguacggauaucaucaccagaacgaacaaggcucagguuacgccgcagaucucaagaguacacagaaugcuauugacaaaaucacuaacaaggugaauagcguuauagagaaaaugaacacccaguuuacagccguggggaaggaguucaaucaccuggaaaagcggauugagaacuuaaauaaaaaggucgaugacggcuuccuggauaucuggacuuacaacgcugaacuccuugugcuguuggagaaugaacgcacccuagacuaucaugauuccaacguuaaaaaccuguacgagaagguacgaaaucagcucaaaaacaaugccaaggagaucggaaacggcuguuuugaguucuaucacaagugcgacaauauguguauggagucugugaaaaacgggacauacgauuaucccaaguacagcgaagaggcaaaacugaauagagaaaagauugacggagucaaacuugagucaaccaggaucuaucaaauucuggccauauacaguacuguggcuuccagcuugguccucgugguuucucugggugcgaucucauuuuggaugugcaguaacggcagcuuacagugccggauuuguaucuga

SEQ ID NO: 139797 - RNA, 1701 nt, Artificial Sequence; identical to SEQ ID NO: 137931
  derived and/or modified CDS sequence (opt3) from hemagglutinin__InfluenzaA__AHM00108

SEQ ID NO: 139798 - RNA, 1701 nt, Artificial Sequence; identical to SEQ ID NO: 137931
  derived and/or modified CDS sequence (opt3) from hemagglutinin__InfluenzaA__AHM00120

SEQ ID NO: 139799 - RNA, 1701 nt, Artificial Sequence
  derived and/or modified CDS sequence (opt3) from hemagglutinin__InfluenzaA__AHM00132
augaagaccaucauugcccugagcuacauacucugccuuguguucgcucaggagcugcccggcaacgacgauuccacagcaacuuuguguuuagggcaccaugccgucccuaauggaacgaucguuaaaaccauuacaaacgaccaaaucgaagugacuaaugcgaccgagcugguacagucuucaaguacaggugaaauuugcaacagcccacaccagauccuagauggcgagaauuguacccucauagacgcucugcuuggggauccgcagugcgacggauuucaaaacaagaaaugggaucuguucguggaaagauccaaggcccauucuaauuguuaucccuacgacgucccugauuaugcaucguugaggucacucguggccagcaguggcacucuggaguuuaacaaugaguccuucaacuggacagguguuacccagaaugggacgucuagcgcuugcauccggcgcuccaacaauucauuuuucagucgacugaacuggcucacucacuuaaauuuuaaauacccagcacugaacgugaccaugcccaacaaugaacaguucgacaaacuuuauauuuggggaguccaucacccuggcacagauaaggaccagaucagcuuguacgcccaggcuucuggccguauuacuguguccaccaagagaucacaacaggccguaaucccaaacauagggagcaggccccggguucgcaauauuccuaguagagugucuaucuauuggacaauugucaagccaggagauauccugcuaaucaacuccaccgguaaucucauugcgccgaggggcuacuuuaaaauacggagcgggaagucgucuaucaugcgcuccgacgcacccauuggaaaauguaacucagccugcaucacgccuaauggcaguauaccaaacgacaagcccuuccagaaugugaaccgaauuacuuacggugcuuguccuagauaugugaagcaaaauacacugaaacuugccaccgggaugaggaacgucccagagaagcagacucggggaaucuuuggcgcaaucgcuggcuucauugaaaaugggugggagggaaugguugaugguugguacggcuuucgucaccagaacagcgaggggcgcggacaagccgcggaccugaaauccacacaggccgcaaucgaucagauuaauggcaaguugaacagacucauagguaaaaccaacgaaaaguuccaucagaucgagaaagaguucucugaaguggaagggaggauucaagaccuggagaaguauguagaggauacgaagaucgacuuauggagcuacaaugcugaacugcucguggcccuugagaaccagcacaccaucgaucugacagacucagaaaugaauaaauuguuugagaagacuaaaaagcagcuacgggaaaacgcugaggauaugggcaauggaugcuucaaaauuuaucauaagugugacaacgccugcauaggcaguauccgaaaugggaccuacgaucacgacgucuaucgcgacgaggcacugaacaauagauuucagauuaagggaguggaacucaaauccgguuacaaggauuggauccuguggauuagcuucgccaucucuugcuuucuucuguguguugcuuugcucggcuucauaaugugggcgugccaaaaagggaacaucagguguaauauuugcaucuga

SEQ ID NO: 139800 - RNA, 1701 nt, Artificial Sequence; identical to SEQ ID NO: 137906
  derived and/or modified CDS sequence (opt3) from hemagglutinin__InfluenzaA__AHM00144

SEQ ID NO: 139801 - RNA, 1701 nt, Artificial Sequence; identical to SEQ ID NO: 137931
  derived and/or modified CDS sequence (opt3) from hemagglutinin__InfluenzaA__AHM00156

SEQ ID NO: 139802 - RNA, 1701 nt, Artificial Sequence; identical to SEQ ID NO: 137906
  derived and/or modified CDS sequence (opt3) from hemagglutinin__InfluenzaA__AHM00168

SEQ ID NO: 139803 - RNA, 1701 nt, Artificial Sequence
  derived and/or modified CDS sequence (opt3) from hemagglutinin__InfluenzaA__AHM00180
augaagaccaucauugcccugagcuacauacucugccuuguguucgcucagaaacugcccggcaacgacaauuccacagcaacuuuguguuuagggcaccaugccgucccuaacggaacgaucguuaagaccauuacaaaugauagaaucgaggugacuaacgcgaccgaacugguacaaaauucuucaauuggugagaucugcgacaacccacaccagauacuagauggcgaaaauuguacacucaucgacgcucugcuuggggauccgcagugcgacggauuucagaacaaaaagugggaucuguucguggagaggaguaaagccuauagcaauuguuaccccuaugacgucccugauuacgcauccuugcggucucucguggccucgucaggcacccuggaauuuaacaaugagagcuucaacuggacugguguuacacaaaaugggaccaguuccgcuugcauucgccgaucuaacagcuccuuuuucucacgucugaauuggcucacgcauuuaaacuuuaaguauccagcacugaacgugacuaugcccaauaacgagcaguucgacaaacuuuacaucuggggaguccaccauccuggcaccgauaaagaccagaucuuuuuguaugcccagaguagcggcagaauuacagugucuacuaagaggucccaacaggcuguaauaccaaauauugggucacggccccgcaucagaaacauuccuagcaggaucaguaucuacuggaccauuguuaaaccaggagauauacugcuaaucaauucuacagguaaccucauugccccgcggggcuacuucaagauccgcuccgggaaaagcucgauaaugcgaucugacgcgcccauuggaaaguguaaguccgaaugcaucaccccuaauggcucaaucccaaacgacaaacccuuucagaaugugaacagaauuacguauggugcauguccuagguacgucaagcagaguacucugaaacuugccacagggaugcggaaugugccagagaagcaaacccguggaaucuucggcgcuauugccggcuuuauagaaaacgggugggagggaaugguggaugguugguauggcuuccgccaccagaauagcgaggggagaggacaggcagcugaccugaaauccacucaagccgcgaucgaucagauuaacggcaaguugaauaggcucaucgguaaaacaaacgaaaaguuccaccagaucgagaaggaauuuucugaggucgaagggcggauucaggaccuggagaaauacguugaggauaccaagauagacuuauggagcuauaacgccgaacugcucguggcacuugagaaucaacauacgaucgaucugaccgacucagaaaugaacaaauuguucgagaagacaaagaagcagcuacgagaaaaugcugaggauaugggcaacggaugcuuuaagauuuaccacaaaugugacaaugccugcaucggcaguauucgcaacgggacuuaugaucauaauguauacagagacgaggcucugaacaauagguuccagaucaagggaguggaacucaaauccgguuacaaggacuggauacuguggaucagcuuugccauuucuugcuuccuucugugugucgcauugcucggcuuuaucaugugggccugccagaaagggaacauucgguguaauaucugcauauga

SEQ ID NO: 139804 - RNA, 1701 nt, Artificial Sequence; identical to SEQ ID NO: 137883
  derived and/or modified CDS sequence (opt3) from hemagglutinin__InfluenzaA__AHM00192

SEQ ID NO: 139805 - RNA, 1701 nt, Artificial Sequence; identical to SEQ ID NO: 137931
  derived and/or modified CDS sequence (opt3) from hemagglutinin__InfluenzaA__AHM00204

SEQ ID NO: 139806 - RNA, 1701 nt, Artificial Sequence; identical to SEQ ID NO: 137931
  derived and/or modified CDS sequence (opt3) from hemagglutinin__InfluenzaA__AHM00216

SEQ ID NO: 139807 - RNA, 1701 nt, Artificial Sequence; identical to SEQ ID NO: 137906
  derived and/or modified CDS sequence (opt3) from hemagglutinin__InfluenzaA__AHM00228

SEQ ID NO: 139808 - RNA, 1701 nt, Artificial Sequence; identical to SEQ ID NO: 137906
  derived and/or modified CDS sequence (opt3) from hemagglutinin__InfluenzaA__AHM00240

SEQ ID NO: 139809 - RNA, 1701 nt, Artificial Sequence; identical to SEQ ID NO: 137906
  derived and/or modified CDS sequence (opt3) from hemagglutinin__InfluenzaA__AHM00252

SEQ ID NO: 139810 - RNA, 1701 nt, Artificial Sequence; identical to SEQ ID NO: 137906
  derived and/or modified CDS sequence (opt3) from hemagglutinin__InfluenzaA__AHM00264

SEQ ID NO: 139811 - RNA, 1701 nt, Artificial Sequence; identical to SEQ ID NO: 137883
  derived and/or modified CDS sequence (opt3) from hemagglutinin__InfluenzaA__AHM00276

SEQ ID NO: 139812 - RNA, 1701 nt, Artificial Sequence; identical to SEQ ID NO: 137906
  derived and/or modified CDS sequence (opt3) from hemagglutinin__InfluenzaA__AHM00288

SEQ ID NO: 139813 - RNA, 1701 nt, Artificial Sequence; identical to SEQ ID NO: 137906
  derived and/or modified CDS sequence (opt3) from hemagglutinin__InfluenzaA__AHM00300

SEQ ID NO: 139814 - RNA, 1701 nt, Artificial Sequence; identical to SEQ ID NO: 137931
  derived and/or modified CDS sequence (opt3) from hemagglutinin__InfluenzaA__AHM00312

SEQ ID NO: 139815 - RNA, 1701 nt, Artificial Sequence; identical to SEQ ID NO: 137883
  derived and/or modified CDS sequence (opt3) from hemagglutinin__InfluenzaA__AHM00324

SEQ ID NO: 139816 - RNA, 1701 nt, Artificial Sequence; identical to SEQ ID NO: 137883
  derived and/or modified CDS sequence (opt3) from hemagglutinin__InfluenzaA__AHM00336

SEQ ID NO: 139817 - RNA, 1701 nt, Artificial Sequence; identical to SEQ ID NO: 137931
  derived and/or modified CDS sequence (opt3) from hemagglutinin__InfluenzaA__AHM00348

SEQ ID NO: 139818 - RNA, 1701 nt, Artificial Sequence
  derived and/or modified CDS sequence (opt3) from hemagglutinin__InfluenzaA__AHM00360
augaagaccaucauugcccugagcuacauacucugccuuguguucgcucagaaacugcccggcaacgacaauuccacagcaacuuuguguuuagggcaccaugccgucccuaacggaacgaucguuaagaccauuacaaaugaucaaaucgaggugacuaacgcgaccgaacugguacaaaauucuucaauuggugagaucugcgacaguccacaccagauacuagauggcgaaaacuguacacucaucgacgcucugcuuggggauccgcagugcgacggauuucagaauaaaaagugggaucuguucguggagagaagcaaagccuauuccaacuguuaccccuaugacgucccugauuacgcaucuuugaggucgcucguggccucaagcggcacccuggaauuuaauaacgagaguuucaauuggacugguguuacacagaacgggaccuccucugcuugcauucggcgcagcaauuccucauuuuucagucgacugaacuggcucacgcauuuaaauuuuaaguauccagcacugaacgugacuaugcccaacaaugagcaguucgacaaacuuuacaucuggggaguccaccauccuggcaccgauaaagaccagaucuuuuuguaugcccaaagcucuggccguauuacaguguccacuaagagaucacagcaggcuguaauaccaaacauugggagcaggccccggauccgcaauauuccuaguagaaucucuaucuacuggaccauuguuaaaccaggagauauacugcuaaucaacuccacagguaaucucauugccccgaggggcuacuucaagauccggagcgggaaaucgucuauaaugcgcuccgacgcgcccauuggaaaguguaagucagaaugcaucaccccuaacggcaguaucccaaaugacaaacccuuucagaacgugaaucgaauuacguauggugcauguccuagauacgucaagcaaagcacucugaaacuugccacagggaugaggaacgugccagagaagcagacccggggaaucuucggcgcuauugccggcuuuauagaaaaugggugggagggaaugguggaugguugguauggcuuccgucaccagaacuccgaggggcgcggacaagcagcugaccugaaaucuacucaggccgcgaucgaucagauuaauggcaaguugaacagacucaucgguaaaacaaaugaaaaguuccaccagaucgagaaggaauuuagcgaggucgaagggaggauucaagaccuggagaaauacguugaggauaccaagauagacuuauggucauauaacgccgaacugcucguggcacuugagaaccagcauacgaucgaucugaccgacagugaaaugaauaaauuguucgagaagacaaagaagcagcuacgggaaaacgcugaggauaugggcaauggaugcuuuaagauuuaccacaaaugugacaacgccugcaucggcuccauucgaaaugggacuuaugaucaugacguauaccgcgacgaggcucugaacaauagauuccagaucaagggaguggaacucaaaagcgguuacaaggauuggauacuguggaucucuuuugccauuucaugcuuccuucugugugucgcauugcucggcuuuaucaugugggccugccaaaaagggaacauuagguguaauaucugcauauga

SEQ ID NO: 139819 - RNA, 1701 nt, Artificial Sequence; identical to SEQ ID NO: 137931
  derived and/or modified CDS sequence (opt3) from hemagglutinin__InfluenzaA__AHM00372

SEQ ID NO: 139820 - RNA, 1701 nt, Artificial Sequence; identical to SEQ ID NO: 137931
  derived and/or modified CDS sequence (opt3) from hemagglutinin__InfluenzaA__AHM00395

SEQ ID NO: 139821 - RNA, 1701 nt, Artificial Sequence; identical to SEQ ID NO: 137906
  derived and/or modified CDS sequence (opt3) from hemagglutinin__InfluenzaA__AHM00407

SEQ ID NO: 139822 - RNA, 1701 nt, Artificial Sequence; identical to SEQ ID NO: 137906
  derived and/or modified CDS sequence (opt3) from hemagglutinin__InfluenzaA__AHM00419

SEQ ID NO: 139823 - RNA, 1701 nt, Artificial Sequence; identical to SEQ ID NO: 137906
  derived and/or modified CDS sequence (opt3) from hemagglutinin__InfluenzaA__AHM00443

SEQ ID NO: 139824 - RNA, 1701 nt, Artificial Sequence; identical to SEQ ID NO: 137931
  derived and/or modified CDS sequence (opt3) from hemagglutinin__InfluenzaA__AHM00455

SEQ ID NO: 139825 - RNA, 1701 nt, Artificial Sequence; identical to SEQ ID NO: 137931
  derived and/or modified CDS sequence (opt3) from hemagglutinin__InfluenzaA__AHM00467

SEQ ID NO: 139826 - RNA, 1701 nt, Artificial Sequence; identical to SEQ ID NO: 137931
  derived and/or modified CDS sequence (opt3) from hemagglutinin__InfluenzaA__AHM00479

SEQ ID NO: 139827 - RNA, 1701 nt, Artificial Sequence; identical to SEQ ID NO: 137931
  derived and/or modified CDS sequence (opt3) from hemagglutinin__InfluenzaA__AHM00491

SEQ ID NO: 139828 - RNA, 1701 nt, Artificial Sequence; identical to SEQ ID NO: 137906
  derived and/or modified CDS sequence (opt3) from hemagglutinin__InfluenzaA__AHM00503

SEQ ID NO: 139829 - RNA, 1701 nt, Artificial Sequence; identical to SEQ ID NO: 137906
  derived and/or modified CDS sequence (opt3) from hemagglutinin__InfluenzaA__AHM00515

SEQ ID NO: 139830 - RNA, 1701 nt, Artificial Sequence
  derived and/or modified CDS sequence (opt3) from hemagglutinin__InfluenzaA__AHM00527
augaagaccaucauugcccugagcuacauacucugccuuguguucgcucagaaacugcccggcaacgacaauuccacagcaacuuuguguuuagggcaccaugccgucccuaacggaacgaucguuaagaccauuacaaaugauagaaucgaggugacuaacgcgaccgaacugguacaaaauucuccaauuggugagaucugcgacucaccgcaccagauacuagauggcgaaaacuguacacucaucgacgcucugcuuggggauccccagugcgacggauuucagaauaaaaagugggaucuguucguggagaggaguaaagccuauagcaacuguuacccuuaugacgucccagauuacgcauccuugcggucucucguggccucgucaggcacccuggaauuuaauaacgagagcuucaauuggacugguguuacacaaaacgggaccaguuccgcuugcauucgccgaucuaauagcuccuuuuucucacgucugaacuggcucacgcauuuaaauuuuaaguaucccgcacugaacgugacuaugccuaacaaugagcaguucgacaaacuuuacaucuggggaguccaccauccaggcaccgauaaagaccagaucuuuuuguaugcccagaguagcggcagaauuacagugucuacuaagaggucccaacaggcuguaauacccaacauugggucacggccucgcaucagaaauauuccaagcaggaucaguaucuacuggaccauuguuaaaccgggagauauacugcuaaucaacucuacagguaaucucauugcgccccggggcuacuucaagauccgcuccgggaaaagcucgauaaugcgaucugacgccccuauuggaaaguguaaguccgaaugcaucaccccaaacggcucaauccccaaugacaaaccuuuucagaacgugaauagaauuacguauggugcauguccaagguacgucaagcagaguacucugaaacuugccacagggaugcggaacgugcccgagaagcaaacccguggaaucuucggcgcuauugccggcuuuauagaaaaugggugggagggaaugguggaugguugguauggcuuccgccaccagaacagcgaggggagaggacaggcagcugaccugaaauccacucaagccgcgaucgaucagauuaauggcaaguugaacaggcucaucgguaaaacaaaugaaaaguuccaccagaucgagaaggaauuuucugaggucgaagggcggauucaggaccuggagaaauacguugaggauaccaagauagacuuauggagcuauaacgccgaacugcucguggcacuugagaaccaacauacgaucgaucugaccgacucagaaaugaauaaauuguucgagaagacaaagaagcagcuacgagaaaacgcugaggauaugggcaauggaugcuuuaagauuuaccacaaaugugacaacgccugcaucggcaguauucgcaaugggacuuaugaucauaacguauacagagacgaggcucugaauaacagguuccagaucaagggaguggaacucaaauccgguuacaaggacuggauacuguggaucagcuuugccauuucuugcuuccuucugugugucgcauugcucggcuuuaucaugugggccugccagaaagggaauauucgguguaacaucugcauauga

SEQ ID NO: 139831 - RNA, 1701 nt, Artificial Sequence; identical to SEQ ID NO: 137883
  derived and/or modified CDS sequence (opt3) from hemagglutinin__InfluenzaA__AHM00539

SEQ ID NO: 139832 - RNA, 1701 nt, Artificial Sequence
  derived and/or modified CDS sequence (opt3) from hemagglutinin__InfluenzaA__AHM00543
augaagaccaucauugcccugagcuacauacucugccuuguguucgcucaggagcugcccggcaacgacgauuccacagcaacuuuguguuuagggcaccaugccgucccuaauggaacgaucguuaaaaccauuacaaacgaccaaaucgaagugacuaaugcgaccgagcugguacagucuucaaguacaggugaaauuugcaacagcccacaccagauccuagauggcgagaauuguacccucauagacgcucugcuuggggauccgcagugcgacggauuucaaaacaagaaaugggaucuguucguggaaagauccaaggcccauucuaauuguuaucccuacgacgucccugauuaugcaucguugaggucacucguggccagcaguggcacuauggaguuuaacaaugaguccuucaacuggacagguguuacccagaaugggacgucuagcgcuugcauccggcgcuccaacaauucauuuuucagucgacugaacuggcugacucaccucaauuuuaaauacccagcauuaaacgugaccaugcccaacaaugaacaguucgacaagcuguauauuuggggaguccaucacccuggcacagauaaggaccagaucuuucuuuacgcccaagcuagcggccguauuacugugucuaccaaaagaucccagcaggccguaaucccaaacauagggucaaggccccggguucgcaauauuccuagcagagugaguaucuauuggacaauugucaagccaggagauaucuugcugaucaacucuaccgguaaucuaauugcgccgaggggcuacuucaaaauacgguccggaaagagcucgaucaugcgcucugacgcacccauugggaaauguaacuccgccugcaucacgccuaauggcucaauaccaaacgacaagcccuuucagaaugugaaccgaauuacuuacggugcuuguccuagauaugugaagcaaaauacacucaaacuggccaccgggaugaggaacgucccagagaagcagacucggggaaucuucggcgcaaucgcuggcuuuauugaaaaugggugggagggaaugguugaugguugguacggcuuccgucaccagaacagugaggggcgcggacaagccgcggaccuuaaaagcacacaggccgcaaucgaucagauuaauggcaagcugaacagauugauagguaaaaccaacgaaaaguuccaucagaucgagaaagaauuuuccgagguggaagggaggauucaagaccucgagaaguauguagaggauacgaagaucgaccuguggucuuacaaugcugaauuacugguggcccucgagaaccagcacaccaucgaucuuacagacagcgaaaugaauaaacuguucgagaagacuaaaaagcaguugcgggaaaacgcugaggauaugggcaauggaugcuuuaaaauuuaucauaagugugacaacgccugcauaggcucaauccgaaaugggaccuacgaucacgacgucuaucgcgacgaggcacuaaacaauagauuccagauuaagggaguggaacugaaaagugguuacaaggauuggauccucuggauuuccuuugccaucagcugcuuccugcuuuguguugcucuguugggcuuuauaaugugggcgugccaaaaagggaacaucagguguaauauuugcaucuga

SEQ ID NO: 139833 - RNA, 1701 nt, Artificial Sequence; identical to SEQ ID NO: 137906
  derived and/or modified CDS sequence (opt3) from hemagglutinin__InfluenzaA__AHM00555

SEQ ID NO: 139834 - RNA, 1701 nt, Artificial Sequence
  derived and/or modified CDS sequence (opt3) from hemagglutinin__InfluenzaA__AHM00567
augaagaccaucauugcccugagcuacauacucugccuuguguucgcucagaaacugcccggcaacgacaauuccacagcaacuuuguguuuagggcaccaugccgucccuaacggaacgaucguuaagaccauuacaaaugauagaaucgaggugacuaacgcgaccgaacugguacaaaauucuucaauuggugagaucugcgacaguccacaccagauacuagauggcgaaaacuguacacucaucgacgcucugcuuggggauccgcagugcgacggauuucagaauaaaaagugggaucuguucguggagaggagcaaagccuauuccaacuguuaccccuaugacgucccugauuacgcaucuuugcggucgcucguggccucaagcggcacccuggaauuuaauaacgagaguuucaauuggacugguguuacacaaaacgggaccuccucugcuugcauucgcaagagcaauuccucauuuuucagucgacugaacuggcucacgcauuuaaauuuuaaguauccagcacugaacgugacuaugcccaacaaugagcaguucgacaaacuuuacaucuggggaguccaccauccuggcaccgauaaggaccagauuuuucuuuaugcccagagcucuggccguaucacaguguccacuaaaagaucacaacaggcuguaauaccaaacauugggagcaggccccggauccgcaauauuccuaguagaaucucuaucuacuggaccauuguuaagccaggagauauacugcuaaucaacuccacagguaaucucauugccccgaggggcuacuucaaaauccggagcgggaagucgucuauaaugcgcuccgacgcgcccauuggaaaguguaaaucagaaugcaucaccccuaacggcaguaucccaaaugacaagcccuuucagaacgugaaucgaauuacguauggugcauguccuagauacgucaaacagagcacucugaaguuggccacagggaugaggaacgugccagagaaacaaacccggggaaucuucggcgcuauugccggcuuuauagaaaaugggugggagggaaugguggaugguugguauggcuuccgucaccagaacuccgaggggcgcggacaggcagcugaccugaagucuacucaagccgcgaucgaucagauuaauggcaaauugaacagacucaucgguaagacaaaugaaaaguuccaccagaucgagaaagaauuuagcgaggucgaagggaggauucaggaccuggagaaguacguugaggauaccaaaauagacuuauggucauauaacgccgaacugcucguggcacuugagaaccaacauacgaucgaucugaccgacagugaaaugaauaaguuguucgagaaaacaaagaagcagcuacgggaaaacgcugaggauaugggcaauggaugcuuuaaaauuuaccacaagugugacaacgccugcaucggcuccauucgaaaugggacuuaugaucaugacguauaccgcgacgaggcucugaacaauagauuccagaucaaaggaguggaacucaagagcgguuacaaagauuggauacuguggaucucuuuugccauuucaugcuuccuucugugugucgcauugcucggcuuuaucaugugggccugccagaaggggaacauuagguguaauaucugcauauga

SEQ ID NO: 139835 - RNA, 1701 nt, Artificial Sequence; identical to SEQ ID NO: 137906
  derived and/or modified CDS sequence (opt3) from hemagglutinin__InfluenzaA__AHM00579

SEQ ID NO: 139836 - RNA, 1701 nt, Artificial Sequence; identical to SEQ ID NO: 137931
  derived and/or modified CDS sequence (opt3) from hemagglutinin__InfluenzaA__AHM00591

SEQ ID NO: 139837 - RNA, 1701 nt, Artificial Sequence; identical to SEQ ID NO: 137906
  derived and/or modified CDS sequence (opt3) from hemagglutinin__InfluenzaA__AHM00603

SEQ ID NO: 139838 - RNA, 1701 nt, Artificial Sequence; identical to SEQ ID NO: 137906
  derived and/or modified CDS sequence (opt3) from hemagglutinin__InfluenzaA__AHM00615

SEQ ID NO: 139839 - RNA, 1701 nt, Artificial Sequence
  derived and/or modified CDS sequence (opt3) from hemagglutinin__InfluenzaA__AHM00627
augaagaccacaaucgcccugagcuacauucucugccuuguguucgcucagaaacugcccggcaacgacaauuccacugcaacguuguguuuagggcaccaugccgucccuaacggaaccauaguuaagacaaucacuaaugauagaauugaggugaccaacgcgacagaacugguacaaaauucuucaaucggugagauuugcgacaguccacaccagauccuagauggcgaaaacuguacccucauagacgcucugcuuggggauccgcagugcgacggauuucagaauaaaaagugggaucuguucguggagaggagcaaagccuauuccaacuguuaccccuaugacgucccugauuacgcaucuuugcggucgcucguggccucaagcggcacucuggaauuuaauaacgagaguuucaauuggacagguguuacccaaaacgggacguccucugcuugcauccgccgaagcaauuccucauuuuucagucgucugaacuggcucacucauuuaaauuuuaaguauccagcacugaacgugaccaugcccaacaaugagcaguucgacaaacuuuacauuuggggaguccaccauccuggcacagauaaggaccagaucuuuuuguaugcccagagcucuggcagaauuacuguguccaccaagaggucacaacaggcuguaaucccaaacauagggagccggccccgcauuagaaauaucccuaguaggauuucuaucuacuggacaaucguuaaaccaggagauauucugcuaauaaacuccaccgguaaucucaucgccccgcggggcuacuucaagauucgcagcgggaaaucgucuaucaugcgauccgacgcgcccauaggaaaguguaagucagaaugcauuacgccuaacggcaguaucccaaaugacaaacccuuucagaacgugaauagaaucacuuauggugcauguccuagguacgucaagcagagcacacugaaacuugccaccgggaugcggaacgugccagagaagcaaacucguggaauuuucggcgcuaucgccggcuuuauugaaaaugggugggagggaaugguggaugguugguauggcuuccgccaccagaacuccgaggggagaggacaggcagcugaccugaaaucuacacaagccgcgauagaucagaucaauggcaaguugaacaggcucauugguaaaaccaaugaaaaguuccaccagaucgagaaggaauuuagcgaggucgaagggcggauccaggaccuggagaaauacguugaggauacgaagauugacuuauggucauauaacgccgaacugcucguggcacuugagaaccaacauaccauagaucugacagacagugaaaugaauaaauuguucgagaagacuaaaaagcagcuacgagaaaacgcugaggauaugggcaauggaugcuuuaagaucuaccacaaaugugacaacgccugcauuggcuccauccgcaaugggaccuaugaucauaacguauacagagacgaggcucugaauaacagguuccagauuaagggaguggaacucaaaagcgguuacaaggacuggauccuguggauaucuuuugccaucucaugcuuccuucugugugucgcauugcucggcuuuauuaugugggccugccagaaagggaauauccgguguaacauuugcaucuga

SEQ ID NO: 139840 - RNA, 1701 nt, Artificial Sequence; identical to SEQ ID NO: 137906
  derived and/or modified CDS sequence (opt3) from hemagglutinin__InfluenzaA__AHM00639

SEQ ID NO: 139841 - RNA, 1701 nt, Artificial Sequence; identical to SEQ ID NO: 137883
  derived and/or modified CDS sequence (opt3) from hemagglutinin__InfluenzaA__AHM00651

SEQ ID NO: 139842 - RNA, 1701 nt, Artificial Sequence; identical to SEQ ID NO: 138042
  derived and/or modified CDS sequence (opt3) from hemagglutinin__InfluenzaA__AHM00663

SEQ ID NO: 139843 - RNA, 1701 nt, Artificial Sequence; identical to SEQ ID NO: 137931
  derived and/or modified CDS sequence (opt3) from hemagglutinin__InfluenzaA__AHM00675

SEQ ID NO: 139844 - RNA, 1701 nt, Artificial Sequence; identical to SEQ ID NO: 138993
  derived and/or modified CDS sequence (opt3) from hemagglutinin__InfluenzaA__AHM00687

SEQ ID NO: 139845 - RNA, 1701 nt, Artificial Sequence
  derived and/or modified CDS sequence (opt3) from hemagglutinin__InfluenzaA__AHM00698
augaagaccaucauugcccugagcuacauacucugccuuguguucgcucaggagcugcccggcaacgacgauuccacagcaacuuuguguuuagggcaccaugccgucccuaauggaacgaucguuaaaaccauuacaaacgaccaaaucgaagugacuaaugcgaccgagcugguacagucuucaaguacaggugaaauuugcaacagcccacaccagauccuagauggcgagaauuguacccucauagacgcucugcuuggggauccgcagugcgacggauuucaaaacaagaaaugggaucuguucguggaaagauccaaggcccauucuaauuguuaucccuacgacgucccugauuaugcaucguugaggucacucguggccagcaguggcacucuggaguuuaacaaugaguccuucaacuggacagguguuacccagaaugggacgucuagcgcuugcacucggcgcuccaacaauucauuuuucagucgacugaacuggcucacccacuuaaauuuuaaauacccagcacugaacgugacaaugcccaacaaugaacaguucgacaaguuguauaucuggggaguccaucacccuggcacugauaaggaccagauuuuucuuuacgcccaagcuagcggccguaucaccgugucuacaaaaagaucccagcaggccguaauuccaaacaucgggucaaggccccggguucgcaauauaccuagcagagugaguauuuauuggaccaucgucaagccaggagauauucugcuaaucaacucuacggguaaucucaucgcgccgaggggcuacuucaaaauucgguccggaaagagcucgauaaugcgcucugacgcacccaucgggaaauguaacuccgccugcauuacuccuaauggcucaaucccaaacgacaagcccuuucagaaugugaaccgaauaacauacggugcuuguccuagauaugugaagcaaaauacccugaaacuugccacugggaugaggaacgucccagagaagcagacacggggaauuuucggcgcaaucgcuggcuuuaucgaaaaugggugggagggaaugguugaugguugguacggcuuccgucaccagaacagugaggggcgcggacaagccgcggaccugaaaagcacccaggccgcaauugaucagaucaauggcaaguugaacagacucauugguaaaacgaacgaaaaguuccaucagauagagaaagaauuuuccgagguggaagggaggauccaagaccuggagaaguauguagaggauaccaagauugacuuauggucuuacaaugcugaacugcucguggcccuugagaaccagcacacaaucgaucugacugacagcgaaaugaauaaauuguucgagaagaccaaaaagcagcuacgggaaaacgcugaggauaugggcaauggaugcuuuaaaaucuaucauaagugugacaacgccugcauuggcucaauacgaaaugggacauacgaucacgacgucuaucgcgacgaggcacugaacaauagauuccagaucaagggaguggaacucaaaagugguuacaaggauuggauucuguggaucuccuuugccauuagcugcuuccuucuguguguugcuuugcucggcuuuaucaugugggcgugccaaaaagggaacauaagguguaauaucugcauuuga

SEQ ID NO: 139846 - RNA, 1701 nt, Artificial Sequence; identical to SEQ ID NO: 137906
  derived and/or modified CDS sequence (opt3) from hemagglutinin__InfluenzaA__AHM00710

SEQ ID NO: 139847 - RNA, 1701 nt, Artificial Sequence; identical to SEQ ID NO: 137906
  derived and/or modified CDS sequence (opt3) from hemagglutinin__InfluenzaA__AHM00722

SEQ ID NO: 139848 - RNA, 1701 nt, Artificial Sequence; identical to SEQ ID NO: 137906
  derived and/or modified CDS sequence (opt3) from hemagglutinin__InfluenzaA__AHM00734

SEQ ID NO: 139849 - RNA, 1701 nt, Artificial Sequence; identical to SEQ ID NO: 138041
  derived and/or modified CDS sequence (opt3) from hemagglutinin__InfluenzaA__AHM00746

SEQ ID NO: 139850 - RNA, 1701 nt, Artificial Sequence; identical to SEQ ID NO: 137906
  derived and/or modified CDS sequence (opt3) from hemagglutinin__InfluenzaA__AHM00758

SEQ ID NO: 139851 - RNA, 1701 nt, Artificial Sequence; identical to SEQ ID NO: 138074
  derived and/or modified CDS sequence (opt3) from hemagglutinin__InfluenzaA__AHM00770

SEQ ID NO: 139852 - RNA, 1701 nt, Artificial Sequence; identical to SEQ ID NO: 137883
  derived and/or modified CDS sequence (opt3) from hemagglutinin__InfluenzaA__AHM00782

SEQ ID NO: 139853 - RNA, 1701 nt, Artificial Sequence
  derived and/or modified CDS sequence (opt3) from hemagglutinin__InfluenzaA__AHM00794
augaagaccaucauugcccugagcuacauacucugccuuguguucacacagaaacugcccggcaacgacaauuccacugcuacguuguguuuagggcaccaugcagucccuaacggaaccaucguuaagacaauuacuaaugauagaaucgaggugaccaacgccacagaacugguacaaaauucuucaauuggugagaucugcgacaguccacaccagauacuagauggcgaaaacuguacccucaucgacgcgcugcuuggggauccgcagugcgacggauuucagaauaaaaagugggaucuguucguggagaggagcaaggcuuauuccaacuguuaccccuaugacgucccugauuacgccucuuugcggucgcucguggcaucaagcggcacucuggaauuuaauaacgagaguuucaauuggacagguguuacccaaaacgggacguccucugccugcauucgccgaagcaauuccucauuuuucagucgucugaacuggcucacucauuuaaauuuuaaguauccagcucugaacgugaccaugcccaacaaugagcaguucgacaaacuuuacaucuggggaguccaccauccuggcacagauaaagaccagaucuuuuuguaugcacagagcucuggcagaauuacuguguccaccaagaggucacaacaggccguaauaccaaacauugggagccggccccgcaucagaaauauuccuaguaggaucucuaucuacuggacaauuguuaaaccaggagauauacugcuaaucaacuccaccgguaaucucauugcuccgcggggcuacuucaagauccgcagcgggaaaucgucuauaaugcgauccgacgcccccauuggaaaguguaagucagaaugcaucacgccuaacggcaguaucccaaaugacaaacccuuucagaacgugaauagaauuacuuauggugcguguccuagguacgucaagcagagcacacugaaacuugcaaccgggaugcggaacgugccagagaagcaaacucguggaaucuucggcgccauugcuggcuuuauagaaaaugggugggagggaaugguggaugguugguauggcuuccgccaccagaacuccgaggggagaggacaggccgcagaccugaaaucuacacaagcugccaucgaucagauuaauggcaaguugaacaggcucaucgguaaaaccaaugaaaaguuccaccagaucgagaaggaauuuagcgaggucgaagggcggauucaggaccuggagaaauacguugaggauacgaagauagacuuauggucauauaacgcggaacugcucguggcccuugagaaccaacauaccaucgaucugacagacagugaaaugaauaaauuguucgagaagacuaaaaagcagcuacgagaaaacgcagaggauaugggcaauggaugcuuuaagauuuaccacaaaugugacaacgcuugcaucggcuccauucgcaaugggaccuaugaucaugacguauacagagacgaggcccugaacaauagguuccagaucaagggaguggaacucaaaagcgguuacaaggauuggauacuguggaucucuuuugcuauuucaugcuuccuucugugugucgccuugcucggcuuuaucaugugggcaugccagaaagggaacauucgguguaauaucugcauauga

SEQ ID NO: 139854 - RNA, 1701 nt, Artificial Sequence; identical to SEQ ID NO: 138074
  derived and/or modified CDS sequence (opt3) from hemagglutinin__InfluenzaA__AHM00806

SEQ ID NO: 139855 - RNA, 1701 nt, Artificial Sequence
  derived and/or modified CDS sequence (opt3) from hemagglutinin__InfluenzaA__AHM00818
augaagaccaucauugcccugagcuacauacucugccuuguguucgcucagaaacugcccggcaacgacaauuccacagcaacuuuguguuuagggcaccaugccgucccuaacggaacgaucguuaagaccauuacaaaugauagaaucgaggugacuaacgcgaccgaacugguacaaaauucuucaauuggugagaucugcgacaguccacaccagauacuagauggcgaaaacuguacacucaucgacgcucugcuuggggauccgcagugcgacggauuucagaauaaaaagugggaucuguucguggagaggagcaaagccuauuccaacuguuaccccuaugacgucccugauuacgcaucuuugcggucgcucguggccucaagcggcacccuggaauuuaauaacgagaauuucaacuggacugguguuacacaaaaugggaccaguuccgcuugcauucgccgaucuaacagcuccuuuuucucacgucugaauuggcucacgcauuuaaacuuuaaguauccagcacugaacgugacuaugcccaauaacgagcaguucgacaaacuuuacaucuggggaguccaccauccuggcaccgauaaagaccagaucuuuuuguaugcccagaguagcggcagaauuacagugucuacuaagaggucccaacaggcuguaauaccaaauauugggucacggccccgcaucagaaacauuccuagcaggaucaguaucuacuggaccauuguuaaaccaggagauauacugcuaaucaauucuacagguaaccucauugccccgcggggcuacuucaagauccgcuccgggaaaagcucgauaaugcgaucugacgcgcccauuggaaaguguaaguccgaaugcaucaccccuaauggcucaaucccaaacgacaaacccuuucagaaugugaacagaauuacguauggugcauguccuagguacgucaagcagaguacucugaaacuugccacagggaugcggaaugugccagagaagcaaacccguggaaucuucggcgcuauugccggcuuuauagaaaacgggugggagggaaugguggaugguugguauggcuuccgccaccagaauagcgaggggagaggacaggcagcugaccugaaauccacucaagccgcgaucgaucagauuaacggcaaguugaauaggcucaucgguaaaacaaacgaaaaguuccaccagaucgagaaggaauuuucugaggucgaagggcggauucaggaccuggagaaauacguugaggauaccaagauagacuuauggagcuauaacgccgaacugcucguggcacuugagaaucaacauacgaucgaucugaccgacucagaaaugaacaaauuguucgagaagacaaagaagcagcuacgagaaaaugcugaggauaugggcaacggaugcuuuaagauuuaccacaaaugugacaaugccugcaucggcaguauucgcaacgggacuuaugaucaugacguauacagagacgaggcucugaauaacagguuccagaucaagggaguggaacucaaauccgguuacaaggauuggauacuguggaucagcuuugccauuucuugcuuccuucugugugucgcauugcucggcuuuaucaugugggccugccagaaagggaauauucgguguaacaucugcauauga

SEQ ID NO: 139856 - RNA, 1701 nt, Artificial Sequence; identical to SEQ ID NO: 137931
  derived and/or modified CDS sequence (opt3) from hemagglutinin__InfluenzaA__AHM00830

SEQ ID NO: 139857 - RNA, 1701 nt, Artificial Sequence; identical to SEQ ID NO: 137931
  derived and/or modified CDS sequence (opt3) from hemagglutinin__InfluenzaA__AHM00842

SEQ ID NO: 139858 - RNA, 1701 nt, Artificial Sequence; identical to SEQ ID NO: 139834
  derived and/or modified CDS sequence (opt3) from hemagglutinin__InfluenzaA__AHM00854

SEQ ID NO: 139859 - RNA, 1701 nt, Artificial Sequence; identical to SEQ ID NO: 139834
  derived and/or modified CDS sequence (opt3) from hemagglutinin__InfluenzaA__AHM00866

SEQ ID NO: 139860 - RNA, 1701 nt, Artificial Sequence; identical to SEQ ID NO: 137906
  derived and/or modified CDS sequence (opt3) from hemagglutinin__InfluenzaA__AHM00878

SEQ ID NO: 139861 - RNA, 1701 nt, Artificial Sequence; identical to SEQ ID NO: 137883
  derived and/or modified CDS sequence (opt3) from hemagglutinin__InfluenzaA__AHM00890

SEQ ID NO: 139862 - RNA, 1701 nt, Artificial Sequence; identical to SEQ ID NO: 137916
  derived and/or modified CDS sequence (opt3) from hemagglutinin__InfluenzaA__AHM00902

SEQ ID NO: 139863 - RNA, 1701 nt, Artificial Sequence; identical to SEQ ID NO: 137906
  derived and/or modified CDS sequence (opt3) from hemagglutinin__InfluenzaA__AHM00914

SEQ ID NO: 139864 - RNA, 1701 nt, Artificial Sequence; identical to SEQ ID NO: 137906
  derived and/or modified CDS sequence (opt3) from hemagglutinin__InfluenzaA__AHM00926

SEQ ID NO: 139865 - RNA, 1701 nt, Artificial Sequence; identical to SEQ ID NO: 137883
  derived and/or modified CDS sequence (opt3) from hemagglutinin__InfluenzaA__AHM00938

SEQ ID NO: 139866 - RNA, 1701 nt, Artificial Sequence
  derived and/or modified CDS sequence (opt3) from hemagglutinin__InfluenzaA__AHM00950
augaagaccaucauugcccugagcuacauacucugccuuguguucgcucagaaacugcccggcaacgacaauuccacagcaacuuuguguuuagggcaccaugccgucccuaacggaacgaucguuaagaccauuacaaaugauagaaucgaggugacuaacgcgaccgaacugguacaaaauucuucaauuggugagaucugcgacaguccacaccagauacuagauggcgaaaacuguacacucaucgacgcucugcuuggggauccgcagugcgacggauuucagaauaaaaagugggaucuguucguggagaggagcaaagccuauuccaacuguuaccccuaugacgucccugauuacgugucuuugcggucgcucguugcaucaagcggcacccuggaauuuaauaacgagaguuucaauuggacuggugugacacaaaacgggaccuccucugccugcauucgccgaagcaauuccucauuuuucagucgucugaacuggcucacgcauuuaaauuuuaaguauccagcucugaacgucacuaugcccaacaaugagcaguucgacaaacuuuacaucuggggagugcaccauccuggcaccgauaaagaccagaucuuuuuguaugcacagagcucuggcagaauuacaguauccacuaagaggucacaacaggccguuauaccaaacauugggagccggccccgcaucagaaauauuccuaguaggaucucuaucuacuggaccauugugaaaccaggagauauacugcuaaucaacuccacagguaaucucauugcuccgcggggcuacuucaagauccgcagcgggaaaucgucuauaaugcgauccgacgcccccauuggaaaguguaagucagaaugcaucaccccuaacggcaguaucccaaaugacaaacccuuucagaacgucaauagaauuacguauggugcguguccuagguacgugaagcagagcacucugaaacuugcaacagggaugcggaacgugccagagaagcaaacccguggaaucuucggcgccauugcuggcuuuauagaaaaugggugggagggaauggucgaugguugguauggcuuccgccaccagaacuccgaggggagaggacaggccgcagaccugaaaucuacucaagcugccaucgaucagauuaauggcaaguugaacaggcucaucgguaaaacaaaugaaaaguuccaccagaucgagaaggaauuuagcgagguugaagggcggauucaggaccuggagaaauacguggaggauaccaagauagacuuauggucauauaacgcggaacugcucguagcccuugagaaccaacauacgaucgaucugaccgacagugaaaugaauaaauuguucgagaagacaaagaagcagcuacgagaaaacgcagaggauaugggcaauggaugcuuuaagauuuaccacaaaugugacaacgcuugcaucggcuccauucgcaaugggacuuaugaucauaacguguacagagacgaggcccugaauaacagguuccagaucaagggagucgaacucaaaagcgguuacaaggacuggauacuguggaucucuuuugcuaugucaugcuuccuucuguguguggccuugcucggcuuuauuaugugggcaugccagaaagggaauauccgguguaacauuugcaucuga

SEQ ID NO: 139867 - RNA, 1701 nt, Artificial Sequence; identical to SEQ ID NO: 137883
  derived and/or modified CDS sequence (opt3) from hemagglutinin__InfluenzaA__AHM00962

SEQ ID NO: 139868 - RNA, 1701 nt, Artificial Sequence
  derived and/or modified CDS sequence (opt3) from hemagglutinin__InfluenzaA__AHM00974
augaagaccaucauugcccugagcuacauacucugccuuguguucgcucaggagcugcccggcaacgacgauuccacagcaacuuuguguuuagggcaccaugccgucccuaauggaacgaucguuaaaaccauuacaaacgaccaaaucgaagugacuaaugcgaccgagcugguacagucuucaaguacaggugaaauuugcaacagcccacaccagauccuagauggcgagaauuguacccucauagacgcucugcuuggggauccgcagugcgacggauuucaaaacaagaaaugggaucuguucguggaaagauccaaggcccauucuaauuguuaucccuacgacgucccugauuaugcaucguugaggucacucguggccagcaguggcacucuggaguuuaacaaugaguccuucaacuggacagguguuacccagaaugggacgucuagcgcuugcauccggcgcuccaacaauucauuuuucagucgacugaacuggcucacucacuuaaauuuuaaauacccagcacugaacgugaccaugcccaacaaugaacaguucgacaaacuuuauauuuggggaguccaucacccuggcacagauaaggaccagaucuuuuuguacgcccaagcuagcggcgggauuacugugucuaccaagcguucccagcaggccguaaucccaaacauaggaucaagacccaggguucggaauauuccuagccgcgugaguaucuauuggacaauugucaagccaggugauauccugcuaaucaacucuaccggcaaucucauugcgccgagaggguacuucaaaauaagguccggaaagagcucgaucaugcggucugacgcacccauuggcaaauguaacuccgccugcaucacgccuaaugguucaauaccaaacgacaagcccuuucagaaugugaaccgcauuacuuacggggcuuguccucgauaugugaagcaaaauacacugaaacuugccaccggaaugagaaacgucccagagaagcagacuaggggcaucuucggcgcaaucgcuggguuuauugaaaauggaugggaggguaugguugauggcugguacggguuccggcaccagaacagugagggacguggccaagccgcggaccugaaaagcacacaggccgcaaucgaucagauuaaugguaaguugaaccgccucauagggaaaaccaacgaaaaguuccaucagaucgagaaagaauuuuccgagguggaaggcaggauucaagaccuggagaaguauguagaggauacgaagaucgacuuauggucuuacaaugcugaacugcucguggcccuugagaaccagcacaccaucgaucugacagacagcgaaaugaauaaauuguucgagaagacuaaaaagcagcuaagagaaaacgcugaggauaugggaaauggcugcuuuaaaauuuaucauaagugugacaacgccugcauagggucaauccggaauggaaccuacgaucacgacgucuaucgagacgaggcacugaacaaucgcuuccagauuaaggguguggaacucaaaaguggcuacaaggauuggauccuguggauuuccuuugccaucagcugcuuccuucuguguguugcuuugcucggguuuauaaugugggcgugccaaaaaggaaacaucagauguaauauuugcaucuga

SEQ ID NO: 139869 - RNA, 1683 nt, Artificial Sequence
  derived and/or modified CDS sequence (opt3) from hemagglutinin__InfluenzaA__AHM24224
augaacacccagauccugguguucgcccucauugcuauaauccccacaaaugcagacaagauuugccuuggccaccaugccgucagcaacgggacuaaaguuaauacgcugaccgagagaggaguggaaguagugaacgcgacagagacugucgaaaggaccaauaucccucggauuuguuccaaggguaaacgcacaguggauuugggccaaugcggguuacugggaaccaucacuggcccaccgcagugugaccaguuucuagaguucucugcugaucucauaaucgaacgacgugaggguucagacguuugcuaccccgggaaguuugugaaagaggaagcccugagacagauucuuagggagaguggaggcaucgauaaggaagcaaugggcuucacauauagcgggauucggaccaacggagccacguccgcuugucgcagaucugguucgucauuuuacgcagagaugaaguggcuguugagcaauacugacaacgccgcuuucccucaaaugaccaaaaguuauaagaauacaaggaaauccccagcccucaucgucuggggcauacaccauucugugagcacugcggagcagaccaagcuguacggguccggaaacaaacugguaacaguuggcucaaguaauuaucagcagagcuuugugcccucuccuggugcacggccacaagucaacgggcucuccggacgcauugauuuccacugguuaaugcugaaucccaacgacaccgugacguuuucauucaauggcgccuuuaucgcuccugaucgagccagcuuccuuagaggcaagaguauggggauucagucuggagugcaggucgacgcaaacugcgaaggugauuguuaccauuccggcgggacuaucaucagcaacuugccauuucagaauauugacucgagggcuguuggaaagugcccgcgguaugugaaacaacguucucugcuacucgccacaggcaugaagaacguacccgagauaccuaaaggucgcgggcuguucggcgcgaucgccggauucauugaaaauggcugggaggggcuuaucgauggaugguacgguuuuagacaccagaacgcacagggcgaagggaccgcugccgacuacaaguccacucaaucagcuauagaccagauuacaggaaaacugaauagguugaucgagaagaccaaccagcaguucgagcucaucgauaaugaauuuaacgagguggaaaaacaaauuggcaaugucaucaacuggacgcgggacaguauuaccgagguguggagcuauaaugccgaacuguuaguugcaauggagaaccagcacacaauagaucuggccgacuccgagauggauaagcucuacgaacgagugaagcgccagcuuagagagaaugcugaagaggacgguacuggguguuucgaaaucuuucauaaaugcgaugacgauuguauggcgucuauuaggaacaauaccuaugaccacagcaaguaccgggaggaggcaaugcagaaccgcauccaaaucgauccagucaaacugucaaguggcuauaaggacgugauuuugugguucuccuuuggagccagcugcuucauacuacuggcuaucguaaugggccucguuuuuauuugcgugaaaaacgggaauaugagauguacaaucugcauuuga

SEQ ID NO: 139870 - RNA, 1683 nt, Artificial Sequence; identical to SEQ ID NO: 138036
  derived and/or modified CDS sequence (opt3) from hemagglutinin__InfluenzaA__AHM24236

SEQ ID NO: 139871 - RNA, 1683 nt, Artificial Sequence; identical to SEQ ID NO: 138036
  derived and/or modified CDS sequence (opt3) from hemagglutinin__InfluenzaA__AHM24248

SEQ ID NO: 139872 - RNA, 1701 nt, Artificial Sequence
  derived and/or modified CDS sequence (opt3) from hemagglutinin__InfluenzaA__AHM98309
augaaggccauccuggugguccuccuuuacaccuucgcuacagcaaacgccgacacucugugcauuggcuaucacgcgaauaacagcacggauaccguugacacaguguuggagaaaaauguaacugugacccauuccgucaacuuacuggaagauaagcacaaugggaaacuauguaagcucagaggaguggcuccccugcaucuugguaaaugcaacauagccggcuggauccuggggaauccugagugugaaucuuugucaacagcaaguagcugguccuacauuguugagaccucuucgucagacaacggaacuugcuauccaggcgauuuuaucaauuacgaggagcucagggagcagcugagcaguguguccucuuucgaacgguuugaggucuucccgaagacaagcuccuggcccaaccacgacucaaauaagggugugaccgccgcuuguccucaugcaggggccaaaaguuuuuauaagaaccugauuuggcucguuaaaaagggaaauagcuacccaaaauuaucuaaguccuauaucaacgauaagggcaaagaaguacuggugcuuuggggcauacaccaccccucaacgacugcugaccaacagagcuuguaccagaaugccgaugcguacgucuucguggggaccagucgcuauucuaagaaauuuaagccugagaucgcaauucgaccaaaagugcgugaccaggagggaagaaugaacuacuauuggacacuggucgaacccggugauaagaucacuuucgaggccaccggcaaccuaguugugccuagguacgcuuuugccauggaacggaaugcaggguccggaauuaucauaagcgacacaccaguacaugauugcaacaccacgugucaaacuccgaaaggcgcuauuaauacaucgcuccccuuccagaacauccacccuauuaccaucgguaagugcccaaaguaugugaaaucuacuaagcugcgccuugccacagggcugagaaauguccccuccauccagucaaggggauuguuuggcgcgauugccggcuucauagaagggggauggaccgguaugguggacggcugguacggguaucaucaccagaacgaacaaggaaguggcuacgcagcugaccucaaaagcacgcagaaugccaucgauaagauuaccaacaaaguuaauuccgugaucgagaagaugaacacacaguuuacugcugucgguaaggaguucaaucaccuggaaaaacggauagagaacuuaaauaagaaaguggacgauggguuccuggacauuuggaccuacaacgccgaacuccuuguacuguuggagaaugaacgcacacuagauuaucaugacucuaacguuaagaaccuguacgagaaagugcgaaaucagcucaagaacaaugcaaaggagaucggcaacggauguuuugaguucuaucacaaaugcgauaauacuuguauggaaagcgucaagaacggcaccuacgacuauccuaaauacucagaagaggccaagcugaauagagaagagaucgauggggugaaacuugagaguacaaggauuuaucaaauccuggcuauuuacuccaccgucgcgagcucuuuggugcucguugugucacugggagcaauaaguuuuuggaugugcagcaacgguuccuuacagugccggaucuguauuuga

SEQ ID NO: 139873 - RNA, 1710 nt, Artificial Sequence
  derived and/or modified CDS sequence (opt3) from hemagglutinin__InfluenzaA__AHM98339
augaaggccauccuggugguccuccuuuacaccuucgcuacagcaaacgccgacacucugugcauuggcuaucacgcgaauaacagcacggauaccguugacacaguguuggagaaaaauguaacugugacccauuccgucaacuuacuggaagauaagcacaaugggaaacuauguaagcucagaggaguggcuccccugcaucuugguaaaugcaacauagccggcuggauccuggggaauccugagugugaaucuuugucaacagcaaguagcugguccuacauuguugagaccucuucgucagacaacggaacuugcuauccaggcgauuuuaucgacuacgaggagcucagggagcagcugagcaguguguccucuuucgaacgguuugagauuuucccgaagacaagcuccuggcccaaucacgauucaaacaagggugucaccgccgcuuguccucaugcaggggccaaaaguuuuuauaagaaucugaucuggcucgugaaaaagggaaacagcuacccaaaauuaucuaaguccuauauaaaugacaagggcaaagaaguacugguucuuuggggcauccaccaccccucaacgacugcugaucaacagagcuuguaccagaacgccgacgcguacguguucgucgggaccagucgcuauucuaagaaauuuaagccugagauugcaauccgaccaaaagugcgugaucaggagggaagaaugaauuacuauuggacacugguggaacccggugacaagauuacuuucgaggccaccggcaaccuagucguuccuagguacgcuuuugccauggaacggaacgcaggguccggaaucauaauuagcgauacaccagugcaugacugcaauaccacgugucaaacuccgaaaggcgcuaucaacacaucgcucaccucucugcccuuccagaauauucacccuaucacuaucgguaagugcccaaaguauguaaaauccacaaaacuucgccuggccaccggguugagaaacgugcccucaauucagaguaggggacucuuuggcgcgauagccggcuucaucgaagggggauggacggguauggucgacggcugguacggguaucaucaccagaaugaacaaggaagcggcuacgcagcugaucugaaguccacccagaacgccauugacaagaucacaaauaaagugaacucuguuauagagaagaugaauacucaguuuaccgcuguggguaaggaguucaaccacuuagaaaaacggauugagaaucugaacaagaaagucgaugacggguuccucgauaucuggacauacaaugccgaacuucugguguugcuagagaacgaacgcacucuggacuaucaugauagcaauguaaagaaccucuacgagaaaguucgaaaccagcugaagaauaacgcaaaggagaucggcaauggauguuuugaguucuaucacaaaugcgacaacaccuguauggaaucagugaagaauggcacauacgauuauccuaaauacagugaagaggccaaacuuaacagagaagagauugacggggucaagcuggaguccaccaggaucuaucaaauuuuggcuauauacagcacuguggcgucuucacucguccuggugguuaguuuaggagcaaucagcuuuuggaugugcuccaaugguucucugcagugccggauuuguaucuga

SEQ ID NO: 139874 - RNA, 1701 nt, Artificial Sequence
  derived and/or modified CDS sequence (opt3) from hemagglutinin__InfluenzaA__AHM98350
augaaggccauccugguggucaugcucuacaccuucgcuacagcaaacgccgacacucuuugcauuggcuaucacgcgaauaacagcacggauaccguugacacagugcuggagaaaaauguaacugugacccauuccgucaacuuguuagaagauaagcacaaugggaaacuguguaagcuaagaggaguggcuccccuccaucuggguaaaugcaacauagccggcuggauccuugggaauccugagugugaaucucugucaacagcaaguagcugguccuacauuguugagaccucuucgucagacaacggaacuugcuauccaggcgauuuuaucgacuacgaagaguugagggagcagcucagcaguguguccucuuucgaacgguuugagauuuucccgaagacaagcuccuggcccaaucacgaugccaacaagggugucaccgcugcauguccucaugccggggcuaaaggauuuuauaagaaucugaucuggcuggugaaaaagggcaacucauacccaaaacucaguaagagcuauauaaaugacaagggcaaagaaguauuaguucugugggggauccaccaccccucuacgacugccgaucaacagucccuuuaccagaacgcggacaccuacguguucgucggaacaucacgcuauagcaagaaauuuaagccugagauugcaauccgaccaaaagugcgugaucaggaggguagaaugaauuacuauuggacuuugguggaacccggcgacaagauuaccuucgaggccacagggaaccuggucguuccuagguacgcuuuugccauggaacggaacgcaggaaguggcaucauaauuucugauaccccagugcaugacugcaauacgacuugucaaacaccgaaaggugcuaucaacaccucccuacccuuccagaauauucacccuaucacuaucgggaagugcccaaaguauguaaaaagcacaaagcuccgccuggccaccggacuuagaaacgugcccucgauucagucuaggggccuguuuggcgcgauagccggguucaucgagggagguuggacgggcauggucgacgggugguacggauaucaucaccagaaugaacaaggcuccgguuacgcagcugauuugaaaucaacccagaacgccauugacaagaucacaaauaaagugaacaguguuauagagaagaugaauacucaguuuaccgcuguggggaaggaguucaaccaccucgaaaaacggauugagaaucugaacaagaaagucgaugacggcuucuuagauaucuggacauacaaugccgaacugcucgugcuucuggagaacgaacgcacuuuggacuaucaugauagcaauguaaagaaccuauacgagaaaguucgaaaccagcugaagaauaacgcaaaggagaucggaaauggcuguuuugaguucuaucacaaaugcgacaacaccuguauggaauccgugaagaaugggacauacgauuauccuaaauacucugaagaggccaagcucaacagagaagagauugacggagucaaacuggagagcaccaggaucuaucaaauucuugcuauauacucaacuguggcgaguucccuggucuuggugguuagccucggugcaaucucuuuuuggaugugcucaaauggcagucugcagugccggauuuguaucuga

SEQ ID NO: 139875 - RNA, 1701 nt, Artificial Sequence; identical to SEQ ID NO: 134502
  derived and/or modified CDS sequence (opt3) from hemagglutinin__InfluenzaA__AHM98361

SEQ ID NO: 139876 - RNA, 1701 nt, Artificial Sequence; identical to SEQ ID NO: 134915
  derived and/or modified CDS sequence (opt3) from hemagglutinin__InfluenzaA__AHM98372

SEQ ID NO: 139877 - RNA, 1701 nt, Artificial Sequence; identical to SEQ ID NO: 134915
  derived and/or modified CDS sequence (opt3) from hemagglutinin__InfluenzaA__AHM98383

SEQ ID NO: 139878 - RNA, 1701 nt, Artificial Sequence; identical to SEQ ID NO: 134872
  derived and/or modified CDS sequence (opt3) from hemagglutinin__InfluenzaA__AHM98394

SEQ ID NO: 139879 - RNA, 1701 nt, Artificial Sequence
  derived and/or modified CDS sequence (opt3) from hemagglutinin__InfluenzaA__AHM98405
augaaggccauccuggugguccuccuuuacaccuucgcuacagcaaacgccgacacucugugcauuggcuaucacgcgaauaacagcacggauaccguugacacaguguuggagaaaaauguaacugugacccauuccgucaacuuacuggaagauaagcacaaugggaaacuauguaagcucagaggaguggcuccccugcaucuugguaaaugcaacauagccggcuggauccuggggaauccugagugugaaucuuugucaacagcaaguagcugguccuacauuguugagaccucuucgucagacaacggaacuugcuauccaggcgauuuuaucgacuacgaggaacucagggagcagcugagcaguguguccucuuucaagcgguuugaaauuuucccgaagacaagcuccuggcccaaucacgauucaaacaaaggugucaccgccgcuuguccucaugcaggggccaagggauuuuauaaaaaucugaucuggcucgugaagaaaggcaacaguuacccaaaguuaagcaagucuuauauaaaugacaaaggcaaggagguacugguucuuugggggauccaccaccccuccacgacugcugaucaacagucauuguaccagaacgccgacaccuacguguucgucggaacaagccgcuauaguaaaaaguuuaaaccugaaauugcgauccgaccaaaggugcgugaucaggaggguagaaugaauuacuauuggacucugguggagcccggcgacaaaauuaccuucgaagcaacagggaaccuagucguuccuagguacgccuuugcuauggagcggaacgccggaucuggcaucauaauuuccgauaccccagugcaugacugcaauacgacuugucaaacaccgaagggugcaaucaacaccagccuccccuuccagaauauucacccuaucacuaucgggaagugcccaaaauauguaaagucgacaaaacugcgccuugcuaccggacugagaaacgugcccucuauucaguccaggggcuuguuuggcgccauagcgggguucaucgaaggagguuggacgggcauggucgacgggugguacggauaucaucaccagaaugagcaaggcucagguuacgccgcagaucucaagaguacccagaacgcuauugacaaaaucacaaauaaggugaacagcguuauagaaaagaugaauacucaguuuaccgccguggggaaagaguucaaccaccuggagaagcggauugaaaauuuaaacaaaaaggucgaugacggcuuccuggauaucuggacauacaaugcugagcuccuugugcuguuggaaaacgagcgcacucuagacuaucaugauuccaauguaaagaaccuguacgaaaagguucgaaaccagcucaagaauaacgccaaagagaucggaaauggcuguuuugaguucuaucacaagugcgacaacaccuguauggaaucugugaaaaaugggacauacgauuauccuaaguacagcgaggaagcaaaacugaacagagaggaaauugacggagucaaacuugagucaaccaggaucuaucaaauucuggccauauacaguacuguggcuuccagcuugguccucgugguuucucugggugcgaucucauuuuggaugugcaguaauggcagcuuacagugccggauuuguaucuga

SEQ ID NO: 139880 - RNA, 1701 nt, Artificial Sequence; identical to SEQ ID NO: 139879
  derived and/or modified CDS sequence (opt3) from hemagglutinin__InfluenzaA__AHM98416

SEQ ID NO: 139881 - RNA, 1701 nt, Artificial Sequence; identical to SEQ ID NO: 134872
  derived and/or modified CDS sequence (opt3) from hemagglutinin__InfluenzaA__AHM98427

SEQ ID NO: 139882 - RNA, 1701 nt, Artificial Sequence; identical to SEQ ID NO: 135090
  derived and/or modified CDS sequence (opt3) from hemagglutinin__InfluenzaA__AHM98438

SEQ ID NO: 139883 - RNA, 1701 nt, Artificial Sequence; identical to SEQ ID NO: 136234
  derived and/or modified CDS sequence (opt3) from hemagglutinin__InfluenzaA__AHM98449

SEQ ID NO: 139884 - RNA, 1701 nt, Artificial Sequence
  derived and/or modified CDS sequence (opt3) from hemagglutinin__InfluenzaA__AHM98460
augaaggccauccuggugguccuccuuugcaccuucgcuacagcaaacgccgacacucuguguauuggcuaccacgcgaauaacagcacggauaccguugacacaguguuggagaaaaauguaacugugacccauuccgucaacuuacuggaagauaagcacaaugggaaacuaugcaagcucagaggaguggcuccccugcaucuugguaaauguaacauagccggcuggauccuggggaauccugagugcgaaucuuugucaacagcaaguagcugguccuauauuguugagaccucuucgucagacaacggaacuuguuacccaggcgauuuuaucgacuaugaagaacucagggagcagcugagcaguguguccucuuucgaacgguuugagauuuucccgaagacaagcuccuggcccaaucacgauucaaacaagggugucaccgccgcuugcccucaugcaggggccaaaggauuuuacaagaaucugaucuggcucgugaaaaagggcaacaguuauccaaaauuaagcaagucuuacauaaaugacaagggcaaagaaguacugguucuuugggggauccaccaccccuccacgacugcugaucaacagucauuguaucagaacgccgacaccuacguguucgucggaacaagccgcuacaguaagaaauuuaagccugagauugcgauccgaccaaaagugcgugaucaggaggguagaaugaauuauuacuggacucugguggaacccggcgacaagauuaccuucgaggcaacagggaaccuagucguuccuagguaugccuuugcuauggaacggaacgccggaucuggcaucauaauuuccgauaccacggugcaugacuguaauacuacaugccaaaccccaaaaggugcaaucaacacuagccucccguuccagaauauucaccccaucacaaucgggaaguguccuaaguacguaaaaucgaccaagcugcgccuugcuacgggacugagaaacgugccaucuauucaguccaggggcuuguuuggcgccauagcgggguucaucgagggagguuggaccggcauggucgacgggugguauggauaccaucaccagaaugaacaaggcucagguuaugccgcagaucucaaaaguacacagaacgcuauugacaagaucacuaauaaagugaacagcguuauagagaagaugaauacccaguuuacagccguggggaaggaguucaaccaccuggaaaaacggauugagaauuuaaacaagaaagucgaugacggcuuccuggauaucuggacuuacaaugcugaacuccuugugcuguuggagaacgaacgcacccuagacuaccaugauuccaauguaaagaaccuguaugagaaaguucgaaaccagcucaagaauaacgccaaggagaucggaaauggcugcuuugaguucuaccacaaaugugacaacacaugcauggagucugugaagaaugggaccuaugauuaccccaaauauagcgaagaggcaaagcugaacagagaaaagauugacggagucaaacuugagucaacuaggaucuaccaaauucuggccauauauaguacgguggcuuccagcuugguccucgugguuucucugggugcgaucucauuuuggaugugcaguaauggcagcuuacagugucggauuugcaucuga

SEQ ID NO: 139885 - RNA, 1701 nt, Artificial Sequence; identical to SEQ ID NO: 134915
  derived and/or modified CDS sequence (opt3) from hemagglutinin__InfluenzaA__AHM98471

SEQ ID NO: 139886 - RNA, 1701 nt, Artificial Sequence
  derived and/or modified CDS sequence (opt3) from hemagglutinin__InfluenzaA__AHM98482
augaaggccauccuggugguccuccuuuacaccuucgcuacagcaaacgccgacacucugugcauuggcuaucacgcgaauaacagcacggauaccguugacacaguguuggagaaaaauguaacugugacccauuccgucaacuuacuggaagauaagcacaaugggaaacuauguaagcucagaggaguggcuccccugcaucuugguaaaugcaacauagccggcuggauccuggggaauccugagugugaaucuuugucaacagcaaguagcugguccuacauuguugagaccucuucgucagacaacggaacuugcuauccaggcgauuuuaucgacuacgaggaacucagggagcagcugagcaguguguccucuuucgaacgguuugagauuuucccgaagacaagcuccuggcccaaucacgauucaaacaagggugucaccgccgcuuguccucaugcaggggccaaaggauuuuauaagaaucugaucuggcucgugaaaaagggcaacaguuacccaaaauuaagcaagucuuauauaaaugacaagggcaaagaaguacugguucuuugggggauccaccaccccuccacgacugcugaucaacagucauuguaccagaacgccgacaccuacguguucgucggaacaagccgcuauaguaagaaauuuaagccugagauugcgauccgaccaaaagugcgugaucaggaggguagaaugaauuacuauuggacucugguggaacccggcgacaagauuaccuucgaggcaacagggaaccuagucguuccuagguacgccuuugcuauggaacggaacgccggaucuggcaucauaauuuccgauaccccagugcaugacugcaauacgacuugucaaacaccgaaaggugcaaucaacaccagccuccccuuccagaauauucacccuaucacuaucgggaagugcccaaaguauguaaaaucgacaaagcugcgccuugcuaccggacugagaaacgugcccucuauucaguccaggggcuuguuuggcgccauagcgggguucaucgagggagguuggacgggcauggucgacgggugguacggauaucaucaccagaaugaacaaggcucagguuacgccgcagaucucaaaaguacccagaacgcuauugacaagaucacaaauaaagugaacagcguuauagauaagaugaauacucaguuuaccgccguggggaaggaguucaaccaccuggagaaacggauugaaaauuuaaacaagaaagucgacgauggcuuccuggacaucuggacauacaaugcugagcuccuugugcuguuggaaaacgagcgcacucuagauuaucaugacuccaauguaaagaaccuguacgaaaaaguucgaaaccagcucaagaauaacgccaaggagaucggaaauggcuguuuugaguucuaucacaaaugcgauaacaccuguauggaaucugugaagaaugggacauacgacuauccuaaauacagcgaggaagcaaagcugaacagagaggaaauugauggagucaaacuugagucaaccaggaucuaucaaauucuggccauauacaguacuguggcuuccagcuugguccucgugguuucucugggugcgaucucauuuuggaugugcaguaauggcagcuuacagugccggauuuguaucuga

SEQ ID NO: 139887 - RNA, 1701 nt, Artificial Sequence
  derived and/or modified CDS sequence (opt3) from hemagglutinin__InfluenzaA__AHM98493
augaaggccauccuggugguccuccuuuacaccuucgcuacagcaaacgccgacacucugugcauuggcuaucacgcgaauaacagcacggauaccguugacacaguguuggagaaaaauguaacugugacccauuccgucaacuuacuggaagauaagcacaaugggaaacuauguaagcucagaggaguggcuccccugcaucuugguaaaugcaacauagccggcuggauccuggggaauccugagugugaaucuuugucaacagcaaguagcugguccuacauuguugagaccucuucgucagacaacggaacuugcuauccaggcgauuuuaucaauuacgaggagcucagggagcagcugagcaguguguccucuuucgaacgguuugagauuuucccgaagacaagcuccuggcccaaccacgacucaaauaagggugucaccgccgcuuguccucaugcaggggccaaaaguuuuuauaagaaccugaucuggcucgugaaaaagggaaauagcuacccaaaauuaucuaaguccuauauaaacgauaagggcaaagaaguacugguucuuuggggcauccaccaccccucaacgagcgcugaccaacagaguuuguaccagaaugccgaugcguacguguucgucgggacuucuaaguauuccaaaaaguuuaaaccugagauugcagugcgcccaaaggugcgagaccaggagggacguaugaacuacuauuggacccuggucgaacccggugauaaaaucacauucgaggccacuggcaaccuacucguuccuagauacgcuuuugccauggaaaggaaugcagggagcggaauuaucauaucggacaccccagugcaugauugcaacacaaccugucaaacgccgaagggcgcuauuaauacuucucugcccuuccagaacauccacccuauuacaaucgguaaguauccaaaauacguaaaguccaccaaacuucggcuggccacuggguugcgcaaugugcccucaauccagaguagaggacucuuuggcgcgauugccggcuucauagaagggggauggacagguauggucgacggcugguauggguaccaucaccagaacgaacaaggaagcggcuacgcagcugaccugaaguccacccagaaugccaucgauaaaauuacgaacaagguaaauucuguuaucgagaagaugaacacccaguuuacagcuguggguaaagaguucaaucacuuagaaaagaggauagagaaccugaauaaaaaggucgacgauggguuccucgacauuuggacuuauaacgccgaacuucugguguugcuagagaaugaacggacccuggauuaccaugacagcaacgugaaaaaccucuaugagaagguucgcucacagcugaagaauaacgcaaaagagaucggcaauggaugcuuugaguucuaccacaagugugauaacacaugcauggaaagugugaaaaauggcacuuaugacuacccuaaguauuccgaagaggccaaacuuaaccgagaagagaucgauggggucaagcuggagagcaccagaauuuaccaaaucuuggcuauuuacucuacaguggcgucaagucucguccuggugguuagcuuaggagcaauauccuuuuggauguguucuaaugguucgcugcagugcaggaucugcauuuga

SEQ ID NO: 139888 - RNA, 1701 nt, Artificial Sequence
  derived and/or modified CDS sequence (opt3) from hemagglutinin__InfluenzaA__AHM98504
augaaggccauccuggugguccuccuuuacaccuucgcuacagcaaacgccgacacucugugcauuggcuaucacgcgaauaacagcacggauaccguugacacaguguuggagaagaauguaacugugacccauuccgucaacuuacuggaagauaagcacaaugggaaacuauguaagcucagaggaguggcuccccugcaucuugguaaaugcaacauagccggcuggauccuggggaauccugagugugaaucuuugucaacagcaaguagcugguccuacauuguugagaccucuucgucagacaacggaacuugcuauccaggcgauuuuaucaauuacgaggagcucagggagcagcugagcaguguguccucuuucgaacgguuugagauuuucccgaagacaagcuccuggcccaaccacgacucaaauaagggugucaccgccgcuuguccucaugcaggggccaaaaguuuuuauaagaaccugaucuggcucgugaaaaagggaaauagcuacccaaaauuaucuaaguccuauauaaacgauaagggcaaagaaguacugguucuuuggggcauccaccaccccucaacgacugcugaccaacagagcuuguaccagaaugccgaugcguacguguucgucgggaccagucgcuauucuaagaaauuuaagccugagauugcaauccgaccaaaagugcgugaccaggagggaagaaugaacuacuauuggacacugguggaacccggugauaagauuacuuucgaggccaccggcaaccuagucguuccuagguacgcuuuugccauggaacggaaugcaggguccggaaucauaauuagcgacacaccagugcaugauugcaacaccacgugucaaacuccgaaaggcgcuaucaauacaucgcuccccuuccagaacauucacccuaucaccaucgguaagugcccaaaguauguaaaaucuacuaagcugcgccuugccacagggcugagaaaugugcccuccauucagucaaggggauuguuuggcgcgauagccggcuucaucgaagggggauggaccgguauggucgacggcugguacggguaucaucaccagaacgaacaaggaaguggcuacgcagcugaccucaaaagcacgcagaaugccauugauaagaucaccaacaaaguuaauuccgugauagagaagaugaacacacaguuuacugcuguggguaaggaguucaaucaccuggaaaaacggauugagaacuuaaauaagaaagucgacgauggguuccuggacaucuggaccuacaacgccgaacuccuugugcuguuggagaaugaacgcacacuagauuaucaugacucuaacguaaagaaccuguacgagaaaguucgaaaucagcucaagaacaaugcaaaggagaucggcaacggauguuuugaguucuaucacaaaugcgauaauacuuguauggaaagcgugaagaacggcaccuacgacuauccuaaauacucaaaggaagccaaacugaauagagaggaaauugauggggucaaacuugagaguacaaggaucuaucaaauucuggcuauauacuccaccguggcgagcucuuugguccucgugguuucacugggagcaaucaguuuuuggaugugcagcaacgguuccuuacagugccggauuuguaucuga

SEQ ID NO: 139889 - RNA, 1701 nt, Artificial Sequence; identical to SEQ ID NO: 134502
  derived and/or modified CDS sequence (opt3) from hemagglutinin__InfluenzaA__AHM98515

SEQ ID NO: 139890 - RNA, 1701 nt, Artificial Sequence
  derived and/or modified CDS sequence (opt3) from hemagglutinin__InfluenzaA__AHM98526
augaaggccauccuggugguccuccuucacaccuucgcuacagcaaacgccgacacucugugcauuggcuaccaugcgaauaacagcacggauaccguugacacaguguuggagaagaauguaacugugacccacuccgucaacuuacuggaagauaagcauaaugggaaacuauguaagcucagaggaguggcuccccugcaccuugguaaaugcaacauagccggcuggauccuggggaauccugagugugaaucuuugucaacagcaaguagcugguccuauauuguugagaccucuucgucagacaacggaacuugcuacccaggcgauuuuaucgacuaugaagaacucagggagcagcugagcaguguguccucuuucgaacgguuugagauuuucccgaagacaagcuccuggcccaaucaugauucaaacaagggugucaccgccgcuuguccucacgcaggggccaaaggauuuuacaagaaucugaucuggcucgugaaaaagggcaacaguuauccaaaauuaagcaagucuuacauaaaugacaagggcaaagaaguacugguucuuugggggauccaccaucccuccacgacugcugaucaacagucauuguaucagaacgccgacaccuacguguucgucggaacaagccgcuacaguaagaaauuuaagccugagauugcgauccgaccaaaagugcgugaucaggaggguagaaugaauuauuacuggacucugguggaacccggcgacaagauuaccuucgaggcaacagggaaccuagucguuccuagguaugccuuugcuauggaacggaacgccggaucuggcaucauaauuuccgauaccccagugcacgacugcaauacgacuugucaaacaccgaaaggugcaaucaacaccagccuccccuuccagaauauucauccuaucacuaucgggaagugcccaaaguacguaaaaucgacaaagcugcgccuugcuaccggacugagaaacgugcccucuauucaguccaggggcuuguuuggcgccauagcgggguucaucgagggagguuggacgggcauggucgacgggugguauggauaccaccaccagaaugaacaaggcucagguuaugccgcagaucuccggaguacccagaacgcuauugacaaaaucacaaauaaggugaacagcguuauagagaaaaugaauacucaguuuaccgccguggggaaggaguucaaccaucuggaaaagcgcauugagaauuuaaacaaaaaggucgaugacggcuuccuggauaucuggacauacaaugcugaacuccuuauccuguuggagaacgaacgaacucuagacuaccacgauuccaaugugaaaaaccuguaugagaagguaagaaaccagcucaaaaauaacgccaaggagauuggaaauggcuguuuugaguucuaccauaagugcgacaacaccuguauggagucuguuaaaaaugggacauaugauuacccuaaguauagcgaagaggcaaaacugaacagggaagagaucgacggagugaaacuugagucaacccggauuuaccaaauacuggccaucuauaguacugucgcuuccagcuuggugcucgucgugucucugggugcgauuucauuuuggaugugcaguaauggcagcuuacagugccguaucuguaucuga

SEQ ID NO: 139891 - RNA, 1701 nt, Artificial Sequence; identical to SEQ ID NO: 134502
  derived and/or modified CDS sequence (opt3) from hemagglutinin__InfluenzaA__AHM98537

SEQ ID NO: 139892 - RNA, 1701 nt, Artificial Sequence
  derived and/or modified CDS sequence (opt3) from hemagglutinin__InfluenzaA__AHM98548
augaaggccauccuggugguccuccuuuacaccuucgcuacagcaaacgccgacacucugugcauuggcuaucacgcgaauaacagcacggauaccguugacacaguguuggagaaaaauguaacugugacccauuccgucaacuuacuggaagauaagcacaaugggaaacuauguaagcucagaggaguggcuccccugcaucuugguaaaugcaacauagccggcuggauccuggggaauccugagugugaaucuuugucaacagcaaguagcugguccuacauuguugagaccucuucgucagacaacggaacuugcuauccaggcgauuuuaucaauuacgaggagcucagggagcagcugagcaguguguccucuuucgaacgguuugagauuuucccgaagacaagcuccuggcccaaccacgacucaaauaagggugucaccgccgcuuguccucaugcaggggccaaaaguuuuuauaagaaccugaucuggcucgugaaaaagggaaauagcuacccaaaauuaucuaaguccuauauaaacgauaagggcaaagaaguacugguucuuuggggcauccaccaccccucaacgacugcugaccaacagagcuuguaccagaaugccgaugcguacguguucgucgggaccagucgcuauucuaagaaauuuaagccugagauugcaauccgaccaaaagugcgugaccaggagggaagaaugaacuacuauuggacacugguggaacccggugauaagauuacuuucgaggccaccggcaaccuagucguuccuagguacgcuuuugccauggaacggaaugcaggguccggaaucauaauuagcgacacaccagugcaugauugcaacaccacgugucaaacuccgaaaggcgcuaucaauacaucgcuccccuuccagaacauucacccuguaaccaucgguaagugcccaaaguaugugaaaucuacuaagcugcgccuugccacagggcugagaaauguccccuccauccagucaaggggauuguuuggcgcgauugccggcuucauagaagggggauggaccgguaugguggacggcugguacggguaucaucaccagaacgaacaaggaaguggcuacgcagcugaccucaaaagcacgcagaaugccaucgauaagauuaccaacaaaguuaauuccgugaucgagaagaugaacacacaguuuacugcugucgguaaggaguucaaucaccuggaaaaacggauagagaacuuaaauaagaaaguggacgauggguuccuggacauuuggaccuacaacgccgaacuccuuguacuguuggagaaugaacgcacacuagauuaucaugacucuaacguuaagaaccuguacgagaaagugcgaaaucagcucaagaacaaugcaaaggagaucggcaacggauguuuugaguucuaucacaaaugcgauaauacuuguauggaaagcgucaagaacggcaccuacgacuauccuaaauacucagaagaggccaagcugaauagagaagagaucgauggggugaaacuugagaguacaaggauuuaucaaauccuggcuauuuacuccaccgucgcgagcucuuuggugcucguugugucacugggagcaauaaguuuuuggaugugcagcaacgguuccuuacagugccggaucuguauuuga

SEQ ID NO: 139893 - RNA, 1701 nt, Artificial Sequence
  derived and/or modified CDS sequence (opt3) from hemagglutinin__InfluenzaA__AHM98559
augaaggccauccuggugguccuccuuuacaccuucgcuacagcaaaagccgacacucugugcauuggcuaucacgcgaacaauagcacggauaccguugacacaguguuggagaagaacguaacugugacccauuccgucaauuuacuggaagauaaacacaacgggaagcuauguaaacucagaggaguggcuccccugcaucuugguaagugcaauauagccggcuggauccuggggaacccugagugugaaucuuugucaacagcaaguagcugguccuacauuguugagaccucuucgucagacaauggaacuugcuauccaggcgauuuuaucaacuacgaggagcucagggagcagcugagcaguguguccucuuucgaacgguuugagauuuucccgaagacaagcuccuggcccaaucacgacucaaacaaaggugucaccgccgcuuguccucaugcaggggccaagaguuuuuauaaaaaucugaucuggcucgugaagaaaggaaacagcuacccaaaguuaucuaaguccuauauaaaugauaaaggcaaggaaguacugguucuuuggggcauccaccaccccucaacgacugcugaccaacagagcuuguaccagaacgccgaugcguacguguucgucgggaccagucgcuauucuaaaaaguuuaaaccugagauugcaauccgaccaaaggugcgugaccaggagggaagaaugaauuacuauuggacacugguggaacccggugauaaaauuacuuucgaggccaccggcaaccuagucguuccuagguacgcuuuugccauggaacggaacgcaggguccggaaucauaauuagcgacacaccagugcaugauugcaauaccacgugucaaacuccgaagggcgcuaucaacacaucgcuccccuuccagaauauucacccuaucaccaucgguaagugcccaaaauauguaaagucuacuaaacugcgccuugccacagggcugagaaacgugcccuccauucagucaaggggauuguuuggcgcgauagccggcuucaucgaagggggauggaccgguauggucgacggcugguacggguaucaucaccagaaugaacaaggaaguggcuacgcagcugaccucaagagcacgcagaacgccauugauaaaaucaccaauaaggugaacuccguuauagagaagaugaauacacaguuuacugcuguggguaaagaguucaaccaccuggaaaagcggauugagaauuuaaacaaaaaggucgacgauggguuccuggacaucuggaccuacaaugccgaacuccuugugcuguuggagaacgaacgcacacuagauuaucaugacucuaauguaaagaaccuguacgagaagguucgaaaccagcucaagaauaacgcaaaagagaucggcaauggauguuuugaguucuaucacaagugcgauaacacuuguauggaaagcgugaaaaauggcaccuacgacuauccuaaguacucagaagaggccaaacugaacagagaagagauugauggggucaaacuugagaguacaaggaucuaucaaauucuggcuauauacuccaccguggcgagcucuuugguccucgugguuucacugggagcaaucaguuuuuggaugugcagcaaugguuccuuacagugccggauuuguaucuga

SEQ ID NO: 139894 - RNA, 1701 nt, Artificial Sequence; identical to SEQ ID NO: 134872
  derived and/or modified CDS sequence (opt3) from hemagglutinin__InfluenzaA__AHM98570

SEQ ID NO: 139895 - RNA, 1701 nt, Artificial Sequence
  derived and/or modified CDS sequence (opt3) from hemagglutinin__InfluenzaA__AHM98581
augaaggccauccuggugguccuccuuuacaccuucgcuacagcaaacgccgacacucugugcauuggcuaucacgcgaauaacagcacggauaccguugacacaguguuggagaaaaauguaacugugacccauuccgucaacuuacuggaagauaagcacaaugggaaacuauguaagcucagaggaguggcuccccugcaucuugguaaaugcaacauagccggcuggauccuggggaauccugagugugaaucuuugucaacagcaaggaguuggagcuacauuguugagaccuccucuucggacaacggaacuugcuauccaggcgauuuuaucgacuacgaggaacuccgggagcagcugucaagcgugaguuccuucaagcgcuuugaaauuuucccgaagacaucuagcuggcccaaucacgauuccaacaaaggugucaccgccgcuuguccucaugcaggggccaagggauuuuauaaaaaucugaucuggcucgugaagaaaggcaacucauacccaaaguuaaguaagagcuauauaaaugacaaaggcaaggagguacugguucuuugggggauccaccaccccucuacgacugcugaucaacaguccuuguaccagaacgccgacaccuacguguucgucggaacaucacgauauagcaaaaaguuuaaaccugaaauugcgauccguccaaaggugagagaucaggaggguaggaugaauuacuauuggacucugguggagcccggcgacaaaauuaccuucgaagcaacagggaaccuagucguuccucgguacgccuuugcuauggagcgcaacgccggaaguggcaucauaauuucugauaccccagugcaugacugcaauacgacuugucaaacaccgaagggugcaaucaacaccucccuccccuuccagaauauucacccuaucacuaucgggaagugcccaaaauauguaaagagcacaaaacugagacuugcuaccggacugaggaacgugcccucgauucagucucggggcuuguuuggcgccauagcgggguucaucgaaggagguuggacgggcauggucgacgggugguacggauaucaucaccagaaugagcaaggcuccgguuacgccgcagaucucaagucaacccagaacgcuauugacaaaaucacaaauaaggugaacaguguuauagaaaagaugaauacucaguuuaccgccguggggaaagaguucaaccaccuggagaagcgcauugaaaauuuaaacaaaaaggucgaugacggcuuccuggauaucuggacauacaaugcugagcuccuugugcuguuggaaaacgagcgaacucuagacuaucaugauagcaauguaaagaaccuguacgaaaagguuagaaaccagcucaagaauaacgccaaagagaucggaaauggcuguuuugaguucuaucacaagugcgacaacaccuguauggaauccgugaaaaaugggacauacgauuauccuaaguacucugaggaagcaaaacugaacagggaggaaauugacggagucaaacuugagagcacccggaucuaucaaauucuggccauauacucaacuguggcuaguuccuugguccucgugguuagccugggugcgaucucuuuuuggaugugcucaaauggcaguuuacagugccguauuuguaucuga

SEQ ID NO: 139896 - RNA, 1701 nt, Artificial Sequence; identical to SEQ ID NO: 134872
  derived and/or modified CDS sequence (opt3) from hemagglutinin__InfluenzaA__AHM98592

SEQ ID NO: 139897 - RNA, 1701 nt, Artificial Sequence; identical to SEQ ID NO: 134915
  derived and/or modified CDS sequence (opt3) from hemagglutinin__InfluenzaA__AHM98603

SEQ ID NO: 139898 - RNA, 1701 nt, Artificial Sequence; identical to SEQ ID NO: 134502
  derived and/or modified CDS sequence (opt3) from hemagglutinin__InfluenzaA__AHM98614

SEQ ID NO: 139899 - RNA, 1701 nt, Artificial Sequence; identical to SEQ ID NO: 139879
  derived and/or modified CDS sequence (opt3) from hemagglutinin__InfluenzaA__AHM98625

SEQ ID NO: 139900 - RNA, 1701 nt, Artificial Sequence; identical to SEQ ID NO: 139879
  derived and/or modified CDS sequence (opt3) from hemagglutinin__InfluenzaA__AHM98636

SEQ ID NO: 139901 - RNA, 1701 nt, Artificial Sequence
  derived and/or modified CDS sequence (opt3) from hemagglutinin__InfluenzaA__AHM98647
augaaggccauccuggugguccuccuuuacaccuucgcuacagcaaaagccgacacucugugcauuggcuaucacgcgaacaauagcacggauaccguugacacaguguuggagaagaacguaacugugacccauuccgucaauuuacuggaagauaaacacaacgggaagcuauguaaacucagaggaguggcuccccugcaucuugguaagugcaauauagccggcuggauccuggggaacccugagugugaaucuuugucaacagcaaguagcugguccuacauuguugagaccucuucgucagacaauggaacuugcuauccaggcgauuuuaucaacuacgaggagcucagggagcagcugagcaguguguccucuuucgaacgguuugagauuuucccgaagacaagcuccuggcccaaucacgacucaaacaaaggugucaccgccgcuuguccucaugcaggggccaagaguuuuuauaaaaaucugaucuggcucgugaagaaaggaaacagcuacccaaaguuaucucaauccuauauaaaugauaagggcaaagaaguacugguucuuuggggcauccaccaccccucaacgacugcugaccagcagagcuuguaccagaacgccgaugcguacguguucgucgggaccagucgcuauucuaagaaauuuaagccugagauugcaauccgaccaaaagugcgugaccaagagggaagaaugaauuacuauuggacacugguggaacccggugauaagauuacuuucgaggccaccggcaaccuagucguuccuagguacgcuuuugccauggaacggaacgcaggguccggaaucauaauuagcgacacaccagugcaugauugcaauaccacgugucagacuccgaaaggcgcuaucaacacaucgcuccccuuccagaauauucacccuaucaccaucgguaagugcccaaaguauguaaaaucuacuaagcugcgccuugccacagggcugagaaacgugcccuccauucagucaaggggauuguuuggcgcgauagccggcuucaucgaagggggauggaccgguauggucgacggcugguacggguaucaucaccaaaaugaacagggaaguggcuacgcagcugaccucaaaagcacgcagaacgccauugauaagaucaccaauaaagugaacuccguuauagagaagaugaauacacaguuuacugcuguggguaaggaguucaaccaccuggaaaaacggauugagaauuuaaacaagaaagucgacgauggguuccuggacaucuggaccuacaaugccgaacuccuugugcuguuggagaacgaacgcacacuagauuaucaugacucuaauguaaagaaccuguacgagaaaguucgaaaccaacucaagaauaacgcaaaggagaucggcaauggauguuuugaguucuaucacaaaugcgauaacacuuguauggaaagcgugaagaauggcaccuacgacuauccuaaauacucagaagaggccaagcugaacagagaagagauugauggggucaaacuugagaguacaaggaucuaucagauucuggcuauauacuccaccguggcgagcucuuugguccucgugguuucacugggagcaaucaguuuuuggaugugcagcaaugguuccuuacagugccggauuuguaucuga

SEQ ID NO: 139902 - RNA, 1701 nt, Artificial Sequence; identical to SEQ ID NO: 134915
  derived and/or modified CDS sequence (opt3) from hemagglutinin__InfluenzaA__AHM98658

SEQ ID NO: 139903 - RNA, 1701 nt, Artificial Sequence; identical to SEQ ID NO: 134872
  derived and/or modified CDS sequence (opt3) from hemagglutinin__InfluenzaA__AHM98669

SEQ ID NO: 139904 - RNA, 1701 nt, Artificial Sequence; identical to SEQ ID NO: 136234
  derived and/or modified CDS sequence (opt3) from hemagglutinin__InfluenzaA__AHM98701

SEQ ID NO: 139905 - RNA, 1701 nt, Artificial Sequence; identical to SEQ ID NO: 136234
  derived and/or modified CDS sequence (opt3) from hemagglutinin__InfluenzaA__AHM98712

SEQ ID NO: 139906 - RNA, 1701 nt, Artificial Sequence
  derived and/or modified CDS sequence (opt3) from hemagglutinin__InfluenzaA__AHM98723
augaaggccauccuggugguccuccuuuacaccuucgcuacagcaaacgccgacacucugugcauuggcuaucacgcgaauaacagcacggauaccguugacacaguguuggagaaaaauguaacugugacccauuccgucaacuuacuggaagauaagcacaaugggaaacuauguaagcucagaggaguggcuccccugcaucuugguaacugcaauauagccggcuggauccuggggaacccugagugugaaucuuugucaacagcaaguagcugguccuacauuguugagaccucuucgucagacaauggaacuugcuauccaggcgauuuuaucaacuacgaggagcucagggagcagcugagcaguguguccucuuucgaacgguuugagauucugccgaaaacaagcuccuggcccaaucacgacucaaacaagggugucaccgccgcuuguccucaagcaggggccaagaguuucuauaaaaaucucaucugguuagugaagaaaggaaacagcuacccaaagcugucuaaauccuauauaaaugauaagggcaaggaaguacuuguuuuguggggcauccaucaccccucaacgagcgcugaccagcagagucuguaccagaacgccgaugcguacguguuugucgggacuucuaaauauuccaagaaauucaagccugagauugcagugcgcccaaaagugcgagaccaagagggacguaugaacuacuauuggacccuaaucgaacccggugauaagauuacauuugaggccacuggcaaucuccuggucccuagauacgcuuucgccauggaaaggaacgcagggagcggaaucauaauuucggacaccccaguucacgauugcaauacaaccugucagacgccgaaaggcgcuaucaacacuucucuucccuuucagaauauucauccuaucacaaucgguaagugcccaaaguaugugaaauccaccaagcugcgguuggccacugggcuccgcaacguacccucaauucagaguagaggacuguucggcgcgauagccggcuuuaucgaagggggauggacagguaugguggacggcugguacggguaucaccaucaaaaugcacagggaagcggcuacgcugccgacuuaaaauccacccagaacgcuauugauaagaucacgaauaaagucaacucugugauagaaaagaugaauacccaguucacagccguugguaaggaguuuaaccaccuggagaaaaggauugaaaaucucaacaagaaaguggacgauggguuccuugacaucuggacuuacaaugcagagcuguugguccuacuggaaaacgagcggacccucgauuaucacgacagcaacgugaagaaucuguacgaaaaaguacgcucacaacuuaagaacaaugccaaggagaucggcaacggauguuucgaguuuuaucauaaaugcgauaauacauguauggaaaguguuaagaacggcacuuacgacuauccucgauacuccgaggaagcuaaacugaauagagaggaaauugauggggugaaguuggagagcaccaggaucuaucagauucucgcgauauacucuacagucgcaucaagucugguguuaaucgucagccugggagccauuuccuucuggaugugcucuaacgguucgcuacagugccggaucuguaucuga

SEQ ID NO: 139907 - RNA, 1701 nt, Artificial Sequence
  derived and/or modified CDS sequence (opt3) from hemagglutinin__InfluenzaA__AHM98734
augaaggccauccuggugguccuccuuuacaccuucgcuacagcaaacgccgacacucugugcauuggcuaucacgcgaauaacagcacggauaccguugacacaguguuggagaaaaauguaacugugacccauuccgucaacuuacuggaagauaagcacaaugggaaacuauguaagcucagaggaguggcuccccugcaucuugguaaaugcaacauagccggcuggauccuggggaauccugagugugaaacauugucuaccgcaucaaguuggagcuacauuguugagacuuccaacucugacaauggaacaugcuauccaggcgauuuuaucgacuacgaagaacucagggagcagcugucgucagugagcaguuucgaacgguuugagauuuucccgaagaccuccucuuggcccaaccacgauagcaauaagggugucacggccgcuuguccucaugcaggguccaaaggauuuuauaagaaccugaucuggcucgugaaaaagggcaauucauacccaaaauuaaguaagagcuauauaaacgacaagggcaaagaaguacugguucuuugggggauccaccaccccucuacuaccgccgaucaacaguccuuguaccagaaugcugacacauacguguucgucggaacuucacgcuauagcaagaaauuuaagccugagauugccauccgaccaaaagugcgugaucaggaggguagaaugaacuacuauuggacccugguggaacccggcgacaagauuacauucgaggcgaccgggaaccuagucguuccuagguacgcauuugccauggaacgggaugcuggaaguggcaucauaauuucugacacgccagugcaugacugcaauacuacaugucaaaccccgaaaggugccaucaacacuucccuccccuuccagaauauucacccuaucacaaucgggaagugcccaaaguauguaaaaagcaccaagcugcgccuugcaacgggacugagaaacgugcccucgauucagucuaggggcuuguuuggcgcuauagccggguucaucgagggagguuggaccggcauggucgaugggugguacggauaucaucaccagaaugaacaaggcuccgguuacgcggccgaccucaaaucaacacagaacgcaauugauaagaucacuaauaaagugaacaguguuauagagaagaugaauacccaguuuacagcuguggggaaggaguucaaccaccuggaaaaacggauugagaauuuaaacaagaaagucgacgauggcuuccuggacaucuggacuuacaaugccgaacuccuugugcuguuggagaacgaacgcacccuagauuaucaugacagcaauguaaagaaccuguacgagaaaguucgaaaccagcucaagaauaacgcuaaggagaucggaaauggcuguuuugaguucuaucacaaaugcgauaacacauguauggaguccgugaagaaugggaccuacgacuauccuaaauacucugaagaggccaagcugaacagagaagagauugauggagucaaacuugagagcacuaggaucuaucaaauucuggcaauauacucaacggccgcuaguuccuuggugcucgucgugagccugggugcgaucucuuuuuggaugugcucaaauggcaguuuacagugccggauuuguaucuga

SEQ ID NO: 139908 - RNA, 1701 nt, Artificial Sequence; identical to SEQ ID NO: 136234
  derived and/or modified CDS sequence (opt3) from hemagglutinin__InfluenzaA__AHM98745

SEQ ID NO: 139909 - RNA, 1701 nt, Artificial Sequence
  derived and/or modified CDS sequence (opt3) from hemagglutinin__InfluenzaA__AHM98756
augaaggccauccuggugguccuccuuuacaccuucgcuacagcaaacgccgacacucugugcauuggcuaucacgcgaauaacagcacggauaccguugacacaguguuggagaaaaauguaacugugacccauuccgucaacuuacuggaagauaagcacaaugggaaacuauguaagcucagaggaguggcuccccugcaucuugguaaaugcaacauagccggcuggauccuggggaauccugagugugaaacauugucuaccgcaucaaguuggagcuacauuguugagacuuccucuucggacaacggaacaugcuauccaggcgauuuuaucgacuacgaggaacucagggagcagcugucaagcgugaguuccuucgaacgguuugagauuuucccgaagaccucuagcuggcccaaucacgauuccaacaagggugucacggccgcuuguccucaugcaggggccaaaggauuuuauaagaaucugaucuggcucgugaaaaagggcaacucauacccaaaauuaaguaagagcuauauaaaugacaagggcaaagaaguacugguucuuugggggauccaccaccccucuacuaccgcugaucaacaguccuuguaccagaacgccgacacauacguguucgucggaacuucacgcuauagcaagaaauuuaagccugagauugcgauccgaccaaaagugcgugaucaggaggguagaaugaauuacuauuggacccugguggaacccggcgacaagauuacauucgaggcaaccgggaaccuagucguuccuagguacgccuuugcuauggaacgggaugccggaaguggcaucauaauuucugacacgccagugcaugacugcaacacuacaugucaaaccccgaaaggugcaaucaauacuucccuccccuuccagaacauucacccuaucacaaucgggaagugcccaaaguauguaaaaagcaccaagcugcgccuugcuacgggacugagaaaugugcccucgauucagucuaggggcuuguuuggcgccauagcgggguucaucgagggagguuggaccggcauggucgaugggugguacggauaucaucaccagaacgaacaaggcuccgguuacgccgcagaccucaaaucaacacagaaugcuauugauaagaucacuaacaaagugaauaguguuauagugaagaugaacacccaguuuacagccgucgggaaggaguucaaucaccuggagaaacggauugaaaacuuaaauaagaaaguggacgauggcuuccuggacaucuggacuuacaacgcugagcuccuuguacuguuggaaaaugagcgcacccuagauuaucaugacagcaacguuaagaaucuguacgaaaaagugcgaaaccagcucaagaacaaugccaaggagaucggaaacggcuguuuugaguucuaucacaaaugcgauaauacauguauggaauccgucaagaacgggaccuacgacuauccuaaauacucugaggaagcaaagcugaauagagaggaaauugauggagugaaacuugagagcacuaggaucuaucaaauucuggccauauacucaacggcugcgaguuccuugguccucgugguuagccugggugcaaucucuuuuuggaugugcucaaacggcaguuuacagugccggauuuguaucuga

SEQ ID NO: 139910 - RNA, 1701 nt, Artificial Sequence; identical to SEQ ID NO: 136234
  derived and/or modified CDS sequence (opt3) from hemagglutinin__InfluenzaA__AHM98767

SEQ ID NO: 139911 - RNA, 1701 nt, Artificial Sequence
  derived and/or modified CDS sequence (opt3) from hemagglutinin__InfluenzaA__AHM98778
augaaggccauccuggugguccuccuuuacaccuucgcuacagcaaacgccgacacucugugcauuggcuaucacgcgaauaacagcacggauaccguugacacaguguuggagaaaaauguaacugugacccauuccgucaacuuacuggaagauaagcacaauagaaaacuauguaagcucagggguguggcuccccugcaucuuggaaaaugcaacauagccgguuggauccugggcaauccugagugugaaucuuugucaacagcaaguagcugguccuacauuguugagaccucuucgucagacaacgggacuugcuauccaggagauuuuaucaauuacgaagaacuccgggagcagcugagcaguguguccucuuucgaacgcuuugagauuuucccgaagacaagcuccuggcccaaccacgacucaaauaagggcgucaccgccgcuuguccucgagcaggggccaaaaguuuuuauaagaaccugaucuggcucgugaaaaaggggaauagcuacccaaaauuaucuaaguccuauauaaacgauaagggaaaagaaguacugguucuuuggggcauccaucaccccucaacgacugcugaccaacagagcuuguaccagaaugccgaugcguacguguucgucggcaccagucguuauucuaagaaauuuaagccugagauugcaaucagaccaaaagugagggaccaggaggggcggaugaacuacuauuggacacugguggaacccggagauaagauuacuuucgaggccaccgguaaccuacucgucccucgcuacgcuuuugccauggaaagaaaugcaggcuccgggaucauaauuagcgacacaccaguucacgauugcaacaccacgugucaaacuccgaaaggagcuaucaauacaucgcugcccuuccagaacauucauccuaucaccaucggcaagugcccaaaguaugugaaaucuacuaagcugaggcuugccacagguuugcggaauguacccuccauucagucacgcgggcucuuuggagcgauagccggcuucaucgagggcggguggaccggaaugguggacgguugguacggcuaucaccaucagaacgaacaagggaguggauacgcagcugaccugaaaagcacgcagaaugccauugauaagaucaccaacaaagucaauuccgugauagagaagaugaacacacaguuuacugcuguuggcaaggaguucaaucacuuagaaaaacgaauugagaaccugaauaagaaaguggacgaugguuuccucgacaucuggaccuacaacgccgaacuucuggucuugcuagagaaugaaagaacacuggauuaucacgacucuaacgugaagaaccucuacgagaaaguaaggaaucagcugaagaacaaugcaaaggagaucgggaacggcuguuuugaguucuaucauaaaugcgauaauacuuguauggagagcguuaagaacggaaccuacgacuauccuaaauacucagaagaggccaaacuuaaucgggaagagauugauggcgugaagcuggagaguacacguaucuaucaaauuuuggcuauauacuccaccgucgcgagcucucucgugcuggucgugucauuaggggcaaucaguuuuuggaugugcagcaacggaucccugcagugccgcauuuguaucuga

SEQ ID NO: 139912 - RNA, 1701 nt, Artificial Sequence; identical to SEQ ID NO: 135098
  derived and/or modified CDS sequence (opt3) from hemagglutinin__InfluenzaA__AHM98798

SEQ ID NO: 139913 - RNA, 1701 nt, Artificial Sequence; identical to SEQ ID NO: 134872
  derived and/or modified CDS sequence (opt3) from hemagglutinin__InfluenzaA__AHM98809

SEQ ID NO: 139914 - RNA, 1701 nt, Artificial Sequence; identical to SEQ ID NO: 134872
  derived and/or modified CDS sequence (opt3) from hemagglutinin__InfluenzaA__AHM98820

SEQ ID NO: 139915 - RNA, 1701 nt, Artificial Sequence; identical to SEQ ID NO: 134872
  derived and/or modified CDS sequence (opt3) from hemagglutinin__InfluenzaA__AHM98831

SEQ ID NO: 139916 - RNA, 1701 nt, Artificial Sequence
  derived and/or modified CDS sequence (opt3) from hemagglutinin__InfluenzaA__AHM98836
augaaggccauccugguggucaugcucuacaccuucgcuacagcaaacgccgacacucuuugcauuggcuaucacgcgaauaacagcacggauaccguugacacagugcuggagaaaaauguaacugugacccauuccgucaacuuguuagaagauaagcacaaugggaaacuguguaagcuaagaggaguggcuccccuccaucuggguaaaugcaacauagccggcuggauccuugggaauccugagugugaaucucugucaacagcaaguagcugguccuacauuguugagaccucuucgucagacaacggaacuugcuauccaggcgauuuuaucgacuacgaagaguugagggagcagcucagcaguguguccucuuucgaacgguuugagauuuucccgaagacaagcuccuggcccaaucacgauucaaacaagggugucaccgccgcuuguccucaugcaggggccaaaggauuuuauaagaaucugaucuggcuggugaaaaagggcaacaguuacccaaaacucagcaagucuuauauaaaugacaagggcaaagaaguauuaguucugugggggauccaccaccccuccacgacugcugaucaacagucacuuuaccagaacgccgacaccuacguguucgucggaacaagccgcuauaguaagaaauuuaagccugagauugcgauccgaccaaaagugcgugaucaggaggguagaaugaauuacuauuggauuuugguggaacccggcgacaagaucacuuucgaggcaaccgggaaccuggucguuccuagguacgccuuugcuauggaacggaacgccggaucuggcauaauuaucuccgauacaccagugcaugacugcaauaccacgugucaaacuccgaaaggugcaauuaacacaagccuacccuuccagaauauccacccuaucaccauugggaagugcccaaaguauguaaaaucgacuaagcuccgccuggcuacaggacuuagaaacgugcccucuauacaguccaggggccuguuuggcgccaucgcgggguucauugagggagguuggaccggcauggucgacgggugguacggauaucaucaccagaaugaacaaggcucagguuacgccgcagauuugaaaaguacgcagaacgcuaucgacaagauaaccaauaaagugaacagcguuauugagaagaugaauacacaguuuacugccguggggaaggaguucaaccaccucgaaaaacggaucgagaaucugaacaagaaagucgaugacggcuucuuagauaucuggaccuacaaugcugaacugcucgugcuucuggagaacgaacgcacauuggacuaucaugauuccaauguaaagaaccuauacgagaaaguucgaaaccagcugaagaauaacgccaaggagauuggaaauggcuguuuugaguucuaucacaaaugcgacaacacuuguauggaaucugugaagaaugggaccuacgauuauccuaaauacagcgaagaggcaaagcucaacagagaagagaucgacggagucaaacuggagucaacaaggauuuaucaaauacuugccaucuacaguaccguggcuuccagccuggucuuggugguuucucucggugcgauuucauuuuggaugugcaguaauggcagccugcagugccggaucuguaucuga

SEQ ID NO: 139917 - RNA, 1701 nt, Artificial Sequence
  derived and/or modified CDS sequence (opt3) from hemagglutinin__InfluenzaA__AHM98847
augaaggccauccugguggucaugcucuacaccuucgcuacagcaaacgccgacacucuuugcauuggcuaucacgcgaauaacagcacggauaccguugacacagugcuggagaaaaauguaacugugacccauuccgucaacuuguuagaagauaagcacgacgggaaacuguguaagcuaagaggaguggcuccccuccaucuggguaaaugcaauauagccggcuggauccuugggaacccugagugugaaucucugucaacagcaaguagcugguccuacauuguugagaccucuucgucagauaauggaacuugcuauccaggcgacuuuaucgauuacgaagaguugagggagcagcucagcaguguguccucuuucgaacgguuugagauuuucccgaagacaagcuccuggcccaaccacgacucaaauaagggugucaccgccgcuuguccucaugcaggggccaaaggauuuuauaagaaccugaucuggcuggugaaaaagggcaauaguuacccaaaacucagcaagucuuauauaaacgauaagggcaaagaaguauuaguucugugggggauccaccaccccuccacgacugcugaccaacagucacuuuaccagaaugccgauaccuacguguucgucggaacaagccgcuauaguaagaaauuuaagccugagauugcgauccgaccaaaagugcgugaccaggaggguagaaugaacuacuauuggacuuugguggaacccggcgauaagauuaccuucgaggcaacagggaaucuggucguuccuagguacgccuuugcuauggaacggaacgccggaucuggcaucauaauuuccgacaccccagugcaugacugcaacacgacuugucaaacaccgaaaggugcaaucaauaccagccuacccuuccagaacauucacccuaucacuaucgggaagugcccaaaguauguaaaaucgacaaagcuccgccuggcuaccggacuuagaaaugugcccucuauucaguccaggggccuguuuggcgccauagcgggguucaucgagggagguuggacgggcauggucgaugggugguacggauaucaucaccagaacgaacaaggcucagguuacgccgcagacuugaaaaguacccagaaugcuauugauaagaucacaaacaaagugaauagcguuauagagaagaugaacacucaguuuaccgccguggggaaggaguucaaucaccucgaaaaacggauugagaaccugaauaagaaagucgacgauggcuucuuagacaucuggacauacaacgcugaacugcucgugcuucuggagaaugaacgcacuuuggauuaucaugacuccaacguaaagaaucuauacgagaaaguucgaaaccagcugaagaacaaugccaaggagaucggaaacggcuguuuugaguucuaucacaaaugcgauaauaccuguauggaaucugugaagaacgggacauacgacuauccuaaauacagcgaagaggcaaagcucaauagagaagagauugauggagucaaacuggagucaaccaggaucuaucaaauucuugccauauacaguacuguggcuuccagccuggucuuggugguuucucucggugcgaucucauuuuggaugugcaguaacggcagccugcagugccggauuuguaucuga

SEQ ID NO: 139918 - RNA, 1701 nt, Artificial Sequence; identical to SEQ ID NO: 134872
  derived and/or modified CDS sequence (opt3) from hemagglutinin__InfluenzaA__AHM98858

SEQ ID NO: 139919 - RNA, 1701 nt, Artificial Sequence; identical to SEQ ID NO: 134915
  derived and/or modified CDS sequence (opt3) from hemagglutinin__InfluenzaA__AHM98877

SEQ ID NO: 139920 - RNA, 1701 nt, Artificial Sequence
  derived and/or modified CDS sequence (opt3) from hemagglutinin__InfluenzaA__AHM98898
augaaggccauccuggugguccuccuuuacaccuucgcuacagcaaacgccgacacucugugcauuggcuaucacgcgaauaacagcacggauaccguugacacaguguuggagaaaaauguaacugugacccauuccgucaacuuacuggaagauaaucacaacgggaagcuauguaaacucagaggaguggcuccccugcaucuugguaagugcaauauagccggcuggauccuggggaacccugagugugaaucuuugucaacagcaaguagcugguccuacauuguugagaccucuucgucagacaauggaacuugcuauccaggcgauuuuaucaacuacgaggagcucagggagcagcugagcaguguguccucuuucgaacgguuugagauuuucccgaaaacaagcuccuggcccaaucacgacucaaacaagggugucaccgccgcuuguccucaugcaggggccaagaguuuuuauaaaaaucugaucuggcucgugaagaaaggaaacagcuacccaaaguuaucuaaauccuauauaaaugauaagggcaaggaaguacugguucuuuggggcauccaccaccccucaacgacugcugaccaacagagcuuguaccagaacgccgaugcguacguguucgucgggaccagucgcuauucuaaaaaguuuaaaccugagauugcaauccgaccaaaggugcgugaccaggagggaagaaugaacuacuauuggacacugguggaacccggugauaaaauuacuuucgaggccaccggcaaucuagucguuccuagguacgcuuuugccauggaacggaacgcaggguccggaaucauaauuagcgacacaccagugcaugauugcaauaccacgugucaaacuccgaagggcgcuaucaacacaucgcuccccuuccagaauauucacccuaucaccaucgguaaaugcccaaaguauguaaagucuacuaaacugcgccuugccacagggcugagaaacgugcccuccauucagucaaggggauuguuuggcgcgauagccggcuucaucgaagggggauggaccgguauggucgacggcugguacggguaucaucaccagaaugaacaaggaaguggcuacgcagcugaccucaagagcacgcagaacgccauugauaaaaucaccaauaaggugaacuccguuauagagaaaaugaauacacaguuuacugcuguggguaaggaguucaaccaccuggaaaagcggauugagaauuuaaacaaaaaggucgacgauggguuccuggacaucuggaccuacaaugccgaacuccuugugcuguuggagaacgaacgcacacuagauuaucaugacucuaacguaaagaaucuguacgagaagguucgaaaccagcucaaaaauaacgcaaaggagaucggcaauggauguuuugaguucuaucacaagugcgauaacacuuguauggaaagcgugaaaaauggcaccuacgacuauccuaaguacucagaagaggccaaacugaacagagaagagauugauggggucaaacuugagaguacaaggaucuaucaaauucuggcuauauacuccaccguggcgagcucuuugguccucgugguuucacugggagcaaucaguuuuuggaugugcagcaaugguuccuuacagugccggauuuguaucuga

SEQ ID NO: 139921 - RNA, 1701 nt, Artificial Sequence; identical to SEQ ID NO: 138498
  derived and/or modified CDS sequence (opt3) from hemagglutinin__InfluenzaA__AHM98909

SEQ ID NO: 139922 - RNA, 1701 nt, Artificial Sequence
  derived and/or modified CDS sequence (opt3) from hemagglutinin__InfluenzaA__AHM98932
augaaggccauccuggugguccuccuuuacaccuucgcuacagcaaacgccgacacucugugcauuggcuaucacgcgaauaacagcacggauaccguugacacaguguuggagaaaaauguaacugugacccauuccgucaacuuacuggaagauaagcacaaugggaaacuauguaagcucggagguguggcuccccugcaucuuggcaaaugcaacauagccggguggauccugggaaauccugagugugaaucuuugucaacagcaaguagcugguccuacauuguugagaccucuucgucagacaacggcacuugcuauccaggugauuuuaucgacuacgaagaacucagagagcagcugagcaguguguccucuuucgaaagguuugagauuuucccgaagacaagcuccuggcccaaucacgauucaaacaagggggucaccgccgcuuguccucaugcaggagccaaaaguuuuuauaagaaucugaucuggcucgugaaaaagggcgacagcuacccaaaauuaucuaaguccuauauaaacgauaagggcaaagaaguacugguucuuugggggauccaccaccccucaacgagcgcugaccaacagaguuuguaccagaaugccgaugcguacguguucgucggaucuucccgguauagcaagaaauuuaagccugagauugcaauccgcccaaaagugcgagaccgugaggguagaaugaacuacuauuggacucugguggaacccggcgauaagauuaccuucgaggccacagggaaucuagucguuccuagguacgcuuuugccauggaacggaacgcaggaucgggcaucauaauuucugacacuccagugcaugacugcaacaccacaugucagaccccgaaaggugcuaucaauacgucccuccccuuccaaaacauucacccuaucacuaucgggaagugcccaaaguauguaaaaucaacaaagcugcgccuugccaccggacugagaaaugugcccaguauucagagcaggggcuuguuuggcgcgauagccggguucaucgagggagguuggacuggcauggucgaugggugguacggauaucaucaccagaacgaacagggcuccgguuacgcagcugaccucaaaucuacacaaaaugccauugaugagaucaccaacaaggugaauagcguuauagagaaaaugaacacgcaguuuaccgcuguggggaaggaguucaaucaccuggagaagcggauugaaaacuuaaauaaaaaggucgacgauggcuuccuggacaucuggacauacaacgccgagcuccuugugcuguuggaaaaugagcgcacucuagauuaucaugacucaaacguaaagaaucuguacgagaagguucgaagucagcucaaaaacaacgcaaaggaaaucggaaauggcuguuuugaguucuaucacaagugcgauaacaccuguauggaauccgugaaaaaugggacauacgacuauccuaaguacagcgaggaagccaaacugaacagagaggagauugauggagucaaacuugaaucuacuaggaucuaucagauucuggcuauauacucaaccguggcgaguagcuugguccucgugguuucccugggugcaaucucuuuuuggaugugcucgaauggcagcuuacaaugccggauuuguaucuga

SEQ ID NO: 139923 - RNA, 1701 nt, Artificial Sequence; identical to SEQ ID NO: 139922
  derived and/or modified CDS sequence (opt3) from hemagglutinin__InfluenzaA__AHM98940

SEQ ID NO: 139924 - RNA, 1701 nt, Artificial Sequence; identical to SEQ ID NO: 139922
  derived and/or modified CDS sequence (opt3) from hemagglutinin__InfluenzaA__AHM98951

SEQ ID NO: 139925 - RNA, 1701 nt, Artificial Sequence
  derived and/or modified CDS sequence (opt3) from hemagglutinin__InfluenzaA__AHM98975
augaaggccauccuggugguccuccuuuacaccuucgcuacagcaaacgccgacacucugugcauuggcuaucacgcgaauaacagcacggauaccguugacacaguguuggagaaaaauguaacugugacccauuccgucaacuuacuggaagauaagcacaaugggaaacuauguaagcucagaggaguggcuccccugcaucuugguaaaugcaacauagccggcuggauccuggggaauccugagugugaaucuuugucaacagcaaguagcugguccuacauuguugagaccucuucgucagacaacggaacuugcuauccaggcgauuuuaucgacuacgaagaacucagggagcagcugagcaguguguccucuuucgaacgguuugagauuuucccgaagacaagcuccuggcccaaucacgaaucaaacaagggugucaccgccgcuuguccucaugcaggggccaaaaguuuuuauaagaaucugaucuggcucgugaaaaagggaaacagcuacccaaaauuaucuaaguccuauauaaaugauaagggcaaagagguacugguucuuuggggcauccaccaccccucaacgagcgcugaccaacagaguuuguaccagaacgccgaugcguacguguucgucgggucuucccgcuauagcaagaaauuuaagccugagauugcaauccgaccaaaagugcgugaccaggaaggaagaaugaauuacuauuggacucugguggagcccggugauaagauuaccuucgaagccacaggcaaccuagucguuccuagguacgcuuuugccauggagcggaacgcagggucgggaaucauaauuucugacacuccagugcaugauugcaauaccacaugucaaaccccgaaaggcgcuaucaacacgucccuccccuuccagaauauucacccuaucacuaucgguaagugcccaaaguauguaaaaucaacaaagcugcgccuugccaccgggcugagaaacgugcccaguauucagagcaggggauuguuuggcgcgauagccggcuucaucgaagggggauggacugguauggucgacggcugguacggguaucaucaccagaaugagcaaggauccggcuacgcagcugaccucaaaucuacacagaacgccauugaugagaucaccaauaaggugaacagcguuauagaaaagaugaauacgcaguuuaccgcuguggguaaggaguucaaccaccuggaaaagcggauugagaauuuaaacaaaaaggucgacgauggguuccuggacaucuggacauacaaugccgaacuccuugugcuguuggagaacgagcgcacucuagauuaucaugacucaaauguuaaaaaccuguacgaaaagguacgaagucagcucaaaaacaaugcaaaggagaucggcaacggauguuuugaguucuaucacaagugcgauaauaccuguauggaguccgugaaaaacggcacauacgacuauccuaaguacagcgaagaggccaaacugaauagagaggaaauugauggggucaaacuugagucuacuaggaucuaucaaauucuggcuauauacucaaccguggcgaguagcuugguccucgugguuucccugggagcaaucucuuuuuggaugugcucgaacgguagcuuacagugccggauuuguaucuga

SEQ ID NO: 139926 - RNA, 1701 nt, Artificial Sequence
  derived and/or modified CDS sequence (opt3) from hemagglutinin__InfluenzaA__AHM98997
augaaggccauccuggugguccuccuuuacaccuucgcuacagcaaacgccgacacucugugcauuggcuaucacgcgaauaacagcacggauaccguugacacaguguuggagaaaaauguaacugugacccauuccgucaacuuacuggaagauaagcacaaugggaaacuauguaagcucagaggaguggcuccccugcaucuugguaaaugcaacauagccggcuggauccuggggaauccugagugugaaucuuugucaacagcaaguagcugguccuacauuguugagaccucuucgucagacaacggaacuugcuauccaggcgauuuuaucgacuacgaagaacucagggagcagcugagcaguguguccucuuucgaacgguuugagauuuucccgaagacaagcuccuggcccaaucacgauucaaacaagggugucaccgccgcuuguccucaugcaggggccaaaaguuuuuauaagaaucugaucuggcucgugaaaaagggagacagcuacccaaaauuaucuaaguccuauauaaacgauaagggcaaagaaguacugguucuuuggggcauccaccaccccucaacgagcgcugaccaacagaguuuguaccagaaugccgaugcguacguguucgucgggucuucccgcuauagcaagaaauuuaagccugagauugcaauccgaccaaaagugcguggacaggaggguagaaugaacuacuauuggacucugguggaacccggcgacaagauuaccuucgaggccacagggaaucuagucguuccuagguacgcuuuugccauggaacggaacgcaggaucgggcaucauaauuucugauacuccagugcaugacugcaacaccacaugucaaaccccgaaaggugcuaucaauacgucccuccccuuccagaacauucacccuaucacuaucgggaagugcccaaaguauguaaaaucaacaaagcugcgccuugccaccggacugagaaaugugcccaguauucagagcaggggcuuguuuggcgcgauagccggguucaucgagggagguuggacuggcauggucgacgggugguacggauaucaucaccagaacgaacaaggcuccgguuacgcagcugaucucaaaucuacacagaaugccauugacgagaucaccaacaaggugaauagcguuauagagaaaaugaacacgcaguuuaccgcuguggggaaggaguucaaucaccuggagaagcggauugaaaacuuaaauaaaaaggucgaugacggcuuccuggauaucuggacauacaacgccgagcuccuugugcuguuggaaaaugagcgcacucuagacuaucaugauucaaacguaaagaaucuguacgagaagguucgaagucagcucaaaaacaacgcaaaggaaaucggaaauggcuguuuugaguucuaucacaagugcgacaacaccuguauggaauccgugaaaaaugggacauacgauuauccuaaguacagcgaggaagccaaacugaacagagaggagauugacggagucaaacuugaaucuacuaggaucuaucaaauucuggcuauauacucaaccguggcgaguagcuugguccucgugguuucccugggugcaaucucuuuuuggaugugcucgaauggcagcuuacagugccggauuuguaucuga

SEQ ID NO: 139927 - RNA, 1701 nt, Artificial Sequence
  derived and/or modified CDS sequence (opt3) from hemagglutinin__InfluenzaA__AHM99019
augaaggccauccuggugguccuccuuuacaccuucgcuacagcaaacgccgacacucugugcauuggcuaucacgcgaauaacagcacggauaccguugacacaguguuggagaaaaauguaacugugacccauuccgucaacuuacuggaagauaagcacaaugggaaacuauguaagcucaaaggaguggcuccccugcaucuugguaagugcaacauagccggcuggauccuggggaauccugagugugaaucuuugucaacagcaaguagcugguccuacauuguugagaccucuucgucagacaacggaacuugcuauccaggcgauuuuaucgacuacgaagaacucagagagcagcugagcaguguguccucuuucgaaagguuugagauuuucccgaagacaagcuccuggcccaaucacgauucaaacaaaggugucaccgccgcuuguccucaugcaggggccaagaguuuuuauaaaaaucugaucuggcucgugaagaaaggagacagcuacccaaaguuaucuaaguccuauauaaacgauaaaggcaaggaaguacugguucuuuggggcauccaccaccccucaacgagcgcugaccaacagaguuuguaccagaaugccgaugcguacguguucgucgggucuucccgguauagcaaaaaguuuaaaccugagauugcaauccgcccaaaggugcgaggacaggagggucguaugaacuacuauuggacucugguggaacccggcgacaaaauuaccuucgaggccacagggaaucuagucguuccuagauacgcuuuugccauggaaaggaacgcaggaucgggcaucauaauuucugauacuccagugcaugacugcaacaccacaugucaaaccccgaagggugcuaucaauacgucccuccccuuccagaacauucacccuaucacuaucgggaagugcccaaaauauguaaagucaacaaaacugcggcuugccaccggacugcgcaaugugcccaguauucagagcagaggcuuguuuggcgcgauagccggguucaucgagggagguuggacuggcauggucgacgggugguacggauaucaucaccagaacgaacaaggcuccgguuacgcagcugaucucaagucuacacagaaugccauugacgagaucaccaacaaagugaauagcguuauagagaagaugaacacgcaguuuaccgcuguggggaaggaguucaaucaccuggagaaaaggauugaaaacuuaaauaagaaagucgaugacggcuuccuggauaucuggacauacaacgccgagcuccuugugcuguuggaaaaugagcggacucuagacuaucaugauucaaacguaaagaaucuguacgagaaaguucgcagucagcucaagaacaacgcaaaggaaaucggaaauggcuguuuugaguucuaucacaaaugcgacaacaccuguauggaauccgugaagaaugggacauacgauuauccuaaauacagcgaggaagccaagcugaaccgagaggagauugacggagucaaacuugaaucuacuagaaucuaucaaauucuggcuauauacucaaccguggcgaguagcuugguccucgugguuucccugggugcaaucucuuuuuggaugugcucgaauggcagcuuacagugcaggauuuguaucuga

SEQ ID NO: 139928 - RNA, 1701 nt, Artificial Sequence; identical to SEQ ID NO: 139927
  derived and/or modified CDS sequence (opt3) from hemagglutinin__InfluenzaA__AHM99031

SEQ ID NO: 139929 - RNA, 1701 nt, Artificial Sequence; identical to SEQ ID NO: 139927
  derived and/or modified CDS sequence (opt3) from hemagglutinin__InfluenzaA__AHM99043

SEQ ID NO: 139930 - RNA, 1701 nt, Artificial Sequence; identical to SEQ ID NO: 139927
  derived and/or modified CDS sequence (opt3) from hemagglutinin__InfluenzaA__AHM99054

SEQ ID NO: 139931 - RNA, 1701 nt, Artificial Sequence; identical to SEQ ID NO: 139927
  derived and/or modified CDS sequence (opt3) from hemagglutinin__InfluenzaA__AHM99065

SEQ ID NO: 139932 - RNA, 1701 nt, Artificial Sequence
  derived and/or modified CDS sequence (opt3) from hemagglutinin__InfluenzaA__AHM99075
augaaggccauccuggugguccuccuuuacaccuucgcuacagcaaacgccgacacucugugcauuggcuaucacgcgaauaacagcacggauaccguugacacaguguuggagaaaaauguaacugugacccauuccgucaacuuacuggaagauaagcacaaugggaaacuauguaagcucagaggaguggcuccccugcaucuugguaaaugcaacauagccggcuggauccuggggaauccugagugugaaucuuugucaacagcaaguagcugguccuacauuguugagaccucuucgucagacaacggaacuugcuauccaggcgauuuuaucgacuacgaggagcucagggagcagcugagcaguguguccucuuucgaacgguuugagauuuucccgaagacaagcuccuggcccaaucacgauucaaacaagggugucaccgccgcuuguccucaugcaggggccaaaaguuuuuauaagaaucugaucuggcucgugaaaaagggagacagcuacccaaaauuaucuaaguccuauauaaacgauaagggcaaagaaguacugguucuuuggggcauccaccaccccucaacgagcgcugaccaacagaguuuguaccagaaugccgaugcguacguguucgucgggucuucccgcuauagcaagaaauuuaagccugagauugcaauccgaccaaaagugcgugaccaggagggaagaaugaacuacuauuggacucugguggaacccggugauaagauuaccuucgaggccacaggcaaucuagucguuccuagguacgcuuuugccauggaacggaacgcagggucgggaaucauaauuucugacacuccagugcaugacugcaacaccacaugucaaaccccgaaaggcgcuaucaauacgucccuccccuuccagaacauucacccuaucacuaucgguaagugcccaaaguauguaaaaucaacaaagcugcgccuugccaccgggcugagaaaugugcccaguauucagagcaggggauuguuuggcgcgauagccggcuucaucgaagggggauggacugguauggucgauggcugguacggguaucaucaccagaacgaacaaggauccggcuacgcagcugaccucaaaucuacacagaaugccauugaugagaucaccaacaaggugaauagcguuauagagaaaaugaacacgcaguuuaccgcuguggguaaggaguucaaucaccuggaaaagcggauugaaaacuuaaauaaaaaggucgacgauggguuccuggacaucuggacauacaacgccgagcuccuugugcuguuggaaaaugagcgcacucuagauuaucaugacucaaacguaaagaaucuguacgagaagguucgaagucagcucaaaaacaacgcaaaggaaaucggcaauggauguuuugaguucuaucacaagugcgauaacaccuguauggaauccgugaaaaauggcacauacgacuauccuaaguacagcgaggaagccaaacugaacagagaggagauugauggggucaaacuugaaucuacuaggaucuaucaaauucuggcuauauacucaaccguggcgaguagcuugguccucgugguuucccugggagcaaucucuuuuuggaugugcucgaaugguagcuuacagugccggauuuguaucuga

SEQ ID NO: 139933 - RNA, 1701 nt, Artificial Sequence
  derived and/or modified CDS sequence (opt3) from hemagglutinin__InfluenzaA__AHN00717
augaaggccauccugcucgugcuucugugcaccuucgcugcaacaaacgccgacacuuuguguauuggcuaccacgcgaauaacagcacggauaccgucgacacaguuuuagagaaaaaugugacuguaacccauuccgugaaccugcuagaagauagacacaaugggaagcucugcaaacugggagguauagcuccccuucaucugggcaaguguaacaucgccgggugguugcucggaaauccugagugcgaacugcuguuuacagucucuucauggaguuauauuguggagaccagcaacuccgacaauggcacuuguuacccaggugauuucaucaacuaugaggaacucagggagcaguuaucuucgguuaguagcuuugaacgguucgagauuuuuccgaaaacaaguuccuggcccaaucacgaaaccaaccgcggggugacggcagccugcccuuacgcuggagcaaauucuuucuaucgaaaccugaucuggcuugucaagaagggcaauagcuacccaaaauuguccaagucauaugugaacaacaaaggcaaggagguacugguucuaugggggauacaucaucccccuacuucaaccgaccaacagagccucuaccagaaugccgaugcuuacguguuugucggaucuuccaaauauaaccguaaguucaagccagagaucgccgcgagacccaaagugaggggucaggcaggccggaugaauuacuauuggacacugauugaaccuggggacacuaucaccuuugaggccacaggaaaccuuguggucccacgcuacgcuuucgccaugaauagaggcccggguucagggauuaucauaagcgaugcacccguucacgacuguaacaccacgugccaaacuccuaagggagcuauuaauacaagucugccauuucagaacauccaccccgugaccauuggcgaauguccuaaauauguaaagucuacuaaauugaggauggccacaggccuccggaauaucccauccauccagagccgcgggcuguucggagcgauugccgguuuuauagagggcggguggaccggaaugaucgauggcugguacgguuaucaccaucagaacgaacaagggucgggcuacgcagcugaccagaagucuacgcagaaugccauugauggaaucaccaacaaagucaauuccgugauaaagaagaugaacacacaguucacugcugugggcaaagaguucaaucacuuagagaagcgaauugaaaaccugaacaaaaagguugacgacggguuucucgauguguggaccuacaaugccgagcuucuggucuugcuagaaaacgagagaacacuggacuuccacgauucaaaugugaaaaaccucuaugaaaagguaaggagucaacugcggaauaacgcaaaggagaucggaaaugguugcuuugaguucuaccauaaaugugacgauacuugcauggaaagcguuaagaacggcaccuaugacuaccccaaauauuccgaggaaucuaaacuuaaucgugaggaaaucgauggggugaagcuggagagcacacgcauuuaccagaucuuggccauuuauucaaccgcugcgaguucccucguccuguuagugagccugggagcaauaucuuuuuggaugugcucaaacggcagucuacaguguagaaucugcauuuga

SEQ ID NO: 139934 - RNA, 1701 nt, Artificial Sequence
  derived and/or modified CDS sequence (opt3) from hemagglutinin__InfluenzaA__AHN00764
augaaggccauccugcucgugcuucugugcaccuucgcugcaacaaacgccgacacuuuguguauuggcuaccacgcgaauaacagcacggauaccgucgacacaguuuuagagaaaaaugugacuguaacccauuccgugaaccugcuagaagauaagcacaaugggaaacucugcaagcugggagguauagcuccccuucaucugggcaaauguaacaucgccgggugguugcucggaaauccugagugcgaacugcuguuuacagucucuucauggaguuauauuguggagaccagcaacuccgacaauggcacuuguuacccaggugauuucaucaacuaugaggaacucagagagcaguuaucuucgguuaguagcuuugaaagguucgagauuuuuccgaagacaaguuccuggcccaaucacgaaaccaaccgcggggugacggcagccugcccuuacgcuggagcaaauucuuucuaucggaaccugaucuggcuugucaagaaaggcaauagcuacccaaaguuguccaaaucauaugugaacaacaagggcaaagagguacugguucuaugggggauacaucaucccccuacuucaaccgaccaacagagccucuaccagaaugccgaugcuuacguguuugucggaucuuccaaguauaaccgaaaguucaaaccagagaucgccgcgcgucccaaggugagaggucaggcaggcaggaugaauuacuauuggacacugauugaaccuggggacacuaucaccuuugaggccacaggaaaccuuguggucccacgguacgcuuucgccaugaaucgcggcccggguucagggauuaucauaagcgaugcacccguucacgacuguaacaccacgugccaaacuccuaaaggagcuauuaauacaagucugccauuucagaacauccaccccgugaccauuggcgaauguccuaaguauguaaaaucuacuaaguugagaauggccacaggccucaggaauaucccauccauccagagccgggggcuguucggagcgauugccgguuuuauagagggcggguggaccggaaugaucgauggcugguacgguuaucaccaucagaacgaacaagggucgggcuacgcagcugaccagaaaucuacgcagaaugccauugauggaaucaccaacaaggucaauuccgugauaaagaaaaugaacacacaguucacugcugugggcaaggaguucaaucacuuagagaaacgcauugaaaaccugaacaagaaaguugacgacggguuucucgauguguggaccuacaaugccgagcuucuggucuugcuagaaaacgagcgaacacuggacuuccacgauucaaaugugaagaaccucuaugaaaagguaagaagucaacugaggaauaacgcaaaagagaucggaaaugguugcuuugaguucuaccauaagugugacgauacuugcauggaaagcguuaaaaacggcaccuaugacuaccccaaguauuccgaggaaucuaaacuuaaucgggaggaaaucgauggggugaagcuggagagcacacguauuuaccagaucuuggccauuuauucaaccgcugcgaguucccucguccuguuagugagccugggagcaauaucuuuuuggaugugcucaaacggcagucuacagugucgcaucugcauuuga

SEQ ID NO: 139935 - RNA, 1683 nt, Artificial Sequence
  derived and/or modified CDS sequence (opt3) from hemagglutinin__InfluenzaA__AHN96323
augaacacccagauccugguguucgcccucauugcuauaauccccacaaaugcagacaagauuugccuuggccaccaugccgucagcaacgggacuaaaguuaauacgcugaccgagagaggaguggaaguagugaacgcgacagagacugucgaaaggaccaauaucccucggauuuguuccaaggguaaacgcacaguggauuugggccaaugcggguuacugggaaccaucacuggcccaccgcagugugaccaguuucuagaguucucugcugaucucauaaucgaacgacgugaggguucagacguuugcuaccccgggaaguuugugaacgaggaagcccugagacagauucuuagggagaguggaggcaucgauaaagaagcaaugggcuucacauauagcgggauucggaccaauggagccacguccgcuugucgcagaucugguucgucauuuuacgcagagaugaaguggcuguugagcaacacugacaaugccgcuuucccucaaaugaccaagaguuauaaaaacacaaggaaguccccagcccucaucgucuggggcauacaccauucugugagcacugcggagcagaccaaacuguacggguccggaaauaagcugguaacaguuggcucaaguaacuaucagcagagcuuugugcccucuccuggugcacggccacaagucaaugggcucuccggacgcauugauuuccacugguuaaugcugaaccccaaugacaccgugacguuuucauucaacggcgccuuuaucgcuccugaucgagccagcuuccuuagaggcaaaaguauggggauucagucuggagugcaggucgacgcaaacugcgaaggugauuguuaccauuccggcgggacuaucaucagcaauuugccauuucagaacauugacucgagggcuguuggaaagugcccgcgguaugugaagcaacguucucugcuacucgccacaggcaugaaaaauguacccgagauaccuaagggucgcgggcuguucggcgcgaucgccggauucauugaaaacggcugggaggggcuuaucgauggaugguacgguuuuagacaccagaaugcacagggcgaagggaccgcugccgacuacaaauccacucaaucagcuauagaccagauuacaggaaagcugaacagguugaucgagaaaaccaaucagcaguucgagcucaucgauaacgaauuuaaugagguggaaaagcaaauuggcaacgucaucaauuggacgcgggacaguauuaccgagguguggagcuauaacgccgaacuguuaguugcaauggagaaucagcacacaauagaucuggccgacuccgagauggauaaacucuacgaacgagugaagcgccagcuuagagagaacgcugaagaggacgguacuggguguuucgaaaucuuucauaagugcgaugacgauuguauggcgucuauuaggaauaacaccuaugaccacagcaaauaccgggaggaggcaaugcagaaccgcauccaaaucgauccagucaagcugucaaguggcuauaaagacgugauuuugugguucuccuuuggagccagcugcuucauacuacuggcuaucguaaugggccucguuuuuauuugcgugaagaaugggaacaugagauguacaaucggaauuuga

SEQ ID NO: 139936 - RNA, 1701 nt, Artificial Sequence; identical to SEQ ID NO: 135030
  derived and/or modified CDS sequence (opt3) from hemagglutinin__InfluenzaA__AHN96442

SEQ ID NO: 139937 - RNA, 1701 nt, Artificial Sequence
  derived and/or modified CDS sequence (opt3) from hemagglutinin__InfluenzaA__AHN96443
augaagaccaucauugcccugagcuacauacucugccuuguguucgcucagaaacugcccggcaacgacaauuccacagcaacuuuguguuuagggcaccaugccgucccuaacggaacgaucguuaagaccauuacaaaugaucaaaucgaggugacuaacgcgaccgaacugguacagucuucaaguacaggugagauuugcaauagcccacaccagauccuagacggcgaaaacuguacccucauagaugcucugcuuggggacccgcagugcgauggauuucaaaauaaaaagugggaccuguucguggagagauccaaagcccauucuaacuguuaucccuacgaugucccugacuauacuucguugaggucacucguggcaagcaguggcacacuggaauuuaauaacgaguccuucaauuggaccgguguuacgcagaacgggacuucuagcgccugcauccggcgcuccaauaacucauuuuucagucgacugaauuggcucacccacuuaaacuuuaaguacccagcucugaacgugacaaugcccaauaacgagcaguucgauaagcuguauauuuggggaguccaucacccuggcacugacaaagaucagaucuuuuuguacgcacaagccagcggccguauuaccgugucuacaaagagaucccagcaggcuguaaucccaaauauagggucaaggccccggguucgcaacauuccuagcagagugaguaucuauuggaccauugucaaaccaggagacauccugcuaaucaauucuacggguaaccucauugccccgaggggcuacuucaagauacgguccgggaaaagcucgaucaugcgcucugaugcgcccauuggaaaguguaauuccgcaugcaucacuccuaacggcucaauaccaaaugacaagcccuuucagaacgugaaucgaauuacauacggugccuguccuagauaugugaaacaaaacacccugaaacuugcuacugggaugaggaaugucccagaaaaacagacacggggaaucuucggcgccaucgcaggcuuuauugagaacgggugggaaggaaugguugacgguugguacggcuuccgucaccagaauagugaggggcgcggacaagcugccgaucuuaagagcacccaggcggccaucgaccagauuaacggcaaauugaacagacucauagguaagacgaaugagaaauuccaucagaucgaaaaggaguuuuccgaaguggaggggaggauucaagaucuggaaaaguauguagaggacaccaaaaucgauuuauggucuuacaacgcagagcugcucguggcucuugaaaaucagcacacaaucgaccugacugauagcgagaugaacaaguuguucgaaaagaccaagaaacagcuacgggagaaugccgaagacaugggcaacggaugcuuuaagauuuaucauaagugugauaaugcuugcauaggcucaauccgaaacgggacauacgaccacgaugucuaucgcgacgaggcccugaauaacagauuccagauuaaaggaguggagcucaagagugguuacaaagacuggauccuguggauuuccuuugcaaucagcugcuuccuucuguguguugccuugcucggcuuuauaaugugggcuugccaaaaggggaauaucagguguaacauuugcaucuga

SEQ ID NO: 139938 - RNA, 1701 nt, Artificial Sequence
  derived and/or modified CDS sequence (opt3) from hemagglutinin__InfluenzaA__AHN96444
augaagaccaucauugcccugagcuacauacucugccuuguguucgcucagaaacugcccggcaacgacaauuccacagcaacuuuguguuuagggcaccaugccgucccuaacggaacgaucguuaagaccauuacaaaugauagaaucgaggugacuaacgcgaccgaacugguacaaaauucuucaauuggugagaucugcgacaguccacaccagauacuagauggcgaaaacuguacacucaucgacgcucugcuuggggauccgcagugcgacggauuucagaauaaaaagugggaucuguucguggagaggagcaaagccuauuccaacuguuaccccuaugacgucccugauuacgcaucuuugcggucgcucguggccucaagcggcacccuggaauuuaauaacgagaguuucaauuggacugguguuacacaaaacgggaccuccucugcuugcauucgccgaagcaauaacuccuuuuucucacgucugaauuggcucacgcauuuaaacuuuaaguauccagcacugaacgugacuaugcccaauaaccagcaguucgacaaacuuuacaucuggggaguccaccauccuggcaccgauaaagaccagaucuuuuuguaugcccaaaguagcggcagaauuacagugucuacuaagaggucccagcaggcuguaauaccaaauauugggucacggccccgcaucagaaacauuccuagcaggaucaguaucuacuggaccauuguuaaaccaggagauauacugcuaaucaauucuacagguaaccucauugccccgcggggcuacuucaagauccgcuccgggaaaagcucgauaaugcgaucugacgcgcccauuggaaaguguaaguccgagugcaucaccccuaauggcucaaucccaaacgacaaacccuuucagaaugugaacagaauuacguauggugcauguccuagguacgucaagcaaaguacucugaaacuugccacagggaugcggaaugugccagaaaagcagacccguggaaucuucggcgcuauugccggcuuuauagagaacgggugggaaggaaugguggaugguugguauggcuuccgccaccagaauagcgaggggagaggacaagcagcugaccugaaauccacucaggccgcgaucgaucagauuaacggcaaguugaauaggcucaucgguaaaacaaacgagaaguuccaccagaucgaaaaggaguuuucugaagucgaggggcggauucaagaccuggaaaaauacguugaggauaccaagauagacuuauggagcuauaacgccgagcugcucguggcacuugaaaaucagcauacgaucgaucugaccgacucagagaugaacaaauuguucgaaaagacaaagaagcagcuacgagagaaugcugaagauaugggcaacggaugcuuuaagauuuaccacaaaugugacaaugccugcaucggcaguauucgcaacgggacuuaugaucaugacguauacagagacgaggcucugaauaacagguuccagaucaagggaauagagcucaaauccgguuacaaggauuggauccuguggauuagcuuugccaucucuugcuuccuucuguguguggcauugcucggcuuuauuaugugggccugccaaaaagggaauauccgguguaacauaugcauuuga

SEQ ID NO: 139939 - RNA, 1701 nt, Artificial Sequence
  derived and/or modified CDS sequence (opt3) from hemagglutinin__InfluenzaA__AHN96445
augaagaccaucauugcccugagcuacauacucugccuuguguucgcucagaaacugcccggcaacgacaauuccacagcaacuuuguguuuagggcaccaugccgucccuaacggaacgaucguuaagaccauuacaaaugauagaaucgaggugacuaacgcgaccgaacugguacaaaauucuucaauuggugagaucugcgacaguccacaccagauacuagauggcgaaaacuguacacucaucgacgcucugcuuggggauccgcagugcgacggauuucagaauaaaaagugggaucuguucguggagaggagcaaagccuauuccaacuguuaccccuaugacgucccugauuacgcaucuuugcggucgcucguggccucaagcggcacccuggaauuuaauaacgagaguuucaauuggacugguguuacacaaaacgggaccuccucugcuugcauucgccgaagcaauaacuccuuuuucucacgucugaauuggcucacgcauuuaaacuuuaaguauccagcacugaacgugacuaugcccaauaaccagcaguucgacaaacuuuacaucuggggaguccaccauccuggcaccgauaaagaccagaucuuuuuguaugcccaaaguagcggcagaauuacagugucuacuaagaggucccagcaggcuguaauaccaaauauugggucacggccccgcaucagaaacauuccuagcaggaucaguaucuacuggaccauuguuaaaccaggagauauacugcuaaucaauucuacagguaaccucauugccccgcggggcuacuucaagauccuguccgggaaaagcucgauaaugcgcucugacgcgcccauuggaaaguguaaguccgagugcaucaccccuaauggcucaaucccaaacgacaaacccuuucagaaugugaaccgaauuacguauggugcauguccuagauacgucaagcaaaguacucuuaaacuggccacagggaugaggaaugugccagaaaagcagacccggggaaucuucggcgcuauugccggcuuuauagagaacgggugggaaggaaugguggaugguugguauggcuuccgucaccagaauagcgaggggcgcggacaagcagcugacuugaaauccacucaggccgcgaucgaucagauuaacggcaagcucaauagacugaucgguaaaacaaacgagaaguuccaccagaucgaaaaggaguuuucugaagucgaggggaggauucaagacuuagaaaaauacguugaggauaccaagauagaccuguggagcuauaacgccgagcuccuuguggcacuggaaaaucagcauacgaucgauuugaccgacucagagaugaacaaacuauucgaaaagacaaagaagcagcugcgggagaaugcugaagauaugggcaacggaugcuuuaagauuuaccacaaaugugacaaugccugcaucggcaguauucgaaacgggacuuaugaucaugacguauaccgcgacgaggcucucaauaacagauuccagaucaagggaguggagcugaaauccgguuacaaggauuggauacuuuggaucagcuuugccauuucuugcuuccuguugugugucgcacuccugggcuuuaucaugugggccugccaaaaagggaauauuagguguaacaucugcauauga

SEQ ID NO: 139940 - RNA, 1701 nt, Artificial Sequence
  derived and/or modified CDS sequence (opt3) from hemagglutinin__InfluenzaA__AHN96447
augaagaccaucauugcccugagcuacauacucugccuuguguucgcucagaaacugcccggcaacgacaauuccacagcaacuuuguguuuagggcaccaugccgucccuaacggaacgaucguuaagaccauuacaaaugauagaaucgaggugacuaacgcgaccgaacugguacaaaauucuucaauuggugagaucugcgacaguccacaccagauacuagauggcgaaaacuguacacucaucgacgcucugcuuggggauccgcagugcgacggauuucagaauaaaaagugggaucuguucguggagaggagcaaagccuauuccaacuguuaccccuaugacgucccugauuacgcaucuuugcggucgcucguggccucaagcggcacccuggaauuuaauaacgagaguuucaauugggcugguguuacucaaaacgggacauccucugcaugcauucgcggaagcaauuccucauuuuucagucgacugaacuggcucacccauuuaaauuuuaaguauccagcccugaacgugacgaugcccaacaaugagcaguucgacaaguuguacaucuggggcguccaccauccuggcacugauaaagaccagauuuuucuuuaugcucagagcucugggcguaucaccguguccacaaagagaucacaacaggccguaauaccaaacauuggaagcaggccccggauccgcaauauuccuaguagaaucucuaucuacuggacuauuguuaaaccaggugauauacugcuaaucaacuccaccggcaaucucauugcgccgaggggguacuucaagauccggagcggaaaaucgucuauaaugcgcuccgacgcacccauuggcaaguguaagucagaaugcaucacaccuaacgguaguaucccaaaugacaaacccuuucagaacgugaaucgaauuaccuauggggccuguccuagauacgucaagcagagcacgcugaaacuugcuacuggaaugaggaacgugccagagaagcaaacacggggcaucuucggcgccauugcaggguuuauagaaaauggaugggaggguaugguggauggcugguauggguuccgucaccagaacuccgagggacgcggccaggcugccgaccugaaaucuacccaagcggccaucgaucagauuaaugguaaguugaacagacucaucgggaaaacuaaugaaaaguuccaccagaucgagaaggaauuuagcgaggucgaaggcaggauucaggaccuggagaaauacguugaggauacaaagauagacuuauggucauauaacgcagaacugcucguggcucuugagaaccaacauaccaucgaucugacggacagugaaaugaauaaauuguucgagaagaccaaaaagcagcuacgggaaaacgccgaggauaugggaaauggcugcuuuaagauuuaccacaaaugugacaacgcuugcaucggguccauucgaaauggaacauaugaucaugacguauaccgcgacgaggcccugaacaauagauuccagaucaaggguguggaacucaaaagcggcuacaaggauuggauacuguggaucucuuuugcaauuucaugcuuccuucugugugucguguugcucggguuuaucaugugggccugccagaaaggaaacauuagguguaauaucugcauauga

SEQ ID NO: 139941 - RNA, 1701 nt, Artificial Sequence
  derived and/or modified CDS sequence (opt3) from hemagglutinin__InfluenzaA__AHV83765
augaaggccauccuggugguccuccuuuacaccuucgcuacagcaaacgccgacacucugugcauuggcuaucacgcgaauaacagcacggauaccguugacacaguguuggagaagaauguaacugugacccauuccgucaacuuacuggaagauaagcacaaugggaaacuauguaagcucagaggaguggcuccccugcaucuugguaaaugcaacauagccggcuggauccuggggaauccugagugugaaucuuugucaacagcaaguagcugguccuacauuguugagaccucuucgucagacaacggaacuugcuauccaggcgauuuuaucaauuacgaagaacucagggagcagcugagcaguguguccucuuucgaacgguuugagauuuucccgaagacaagcuccuggcccaaccacgacucaaauaagggugucaccgccgcuuguccucaugcaggggccaaaaguuuuuauaagaaccugaucuggcucgugaaaaagggaaauagcuacccaaaauuaucucaauccuauauaaacgauaagggcaaggaaguacugguucuuuggggcauccaccaccccucaacgacugcugaccagcagagcuuguaccagaaugccgaugcguacguguucgucgggaccagucgcuauucuaaaaaguuuaaaccugagauugcaauccgaccaaaggugcgugaccaagagggaagaaugaacuacuauuggacacugguggaacccggugauaaaauuacuuucgaggccaccggcaaccuagucguuccuagguacgcuuuuacaauggaacggaaugccggguccggaaucauaauuagcgacaccccagugcaugauugcaacacgacuugucagacaccggagggcgcaaucaauaccucgcuccccuuccagaacauucacccuaucacuaucgguaagugcccaaaauauguaaagucuacaaagcugcgccuugcuaccgggcugagaaaugugcccuccauucagucaaggggauuguuuggcgccauagcgggcuucaucgaagggggauggacggguauggucgacggcugguacggguaucaucaccaaaacgagcagggaaguggcuacgccgcagaccucaaaagcacccagaaugcuauugauaagaucacaaacaaaguuaauuccgugauagagaagaugaacacucaguuuaccgccguggguaaagaguucaaucaccuggagaagcggauugaaaacuuaaauaagaaagucgacgauggguuccuggacaucuggacauacaacgcugagcuccuugugcuguuggaaaaugagcgcacucuagauuaucaugacucuaacguaaagaaccuguacgagaaaguucgaaaucaacucaagaccaacgccaaagaaaucggcaauggauguuuugaguucuaucacaagugcgauaacacauguauggaaagcgugaagaauggcaccuacgacuauccuaaauacucagaggaagcaaagcugaacagagagaaaauugauggggucaaacuugagaguacuaggaucuaucagauucuggccauauacuccacgguggcuagcucuuugguccucgugguuucacugggagcgaucaguuuuuggaugugcagcaaugguuccuuacagugccggauuuguaucuga

SEQ ID NO: 139942 - RNA, 1701 nt, Artificial Sequence; identical to SEQ ID NO: 139069
  derived and/or modified CDS sequence (opt3) from hemagglutinin__InfluenzaA__AHV83766

SEQ ID NO: 139943 - RNA, 1701 nt, Artificial Sequence; identical to SEQ ID NO: 138088
  derived and/or modified CDS sequence (opt3) from hemagglutinin__InfluenzaA__AHV83767

SEQ ID NO: 139944 - RNA, 1701 nt, Artificial Sequence
  derived and/or modified CDS sequence (opt3) from hemagglutinin__InfluenzaA__AHV83768
augaaggccauccuggugguccuccuuuacaccuucacaacugcuaacgcagacacgcugugcauuggcuaucacgccaauaacagcaccgauacaguugacacuguguuggagaagaauguaaccgugacacauuccgucaacuuacuggaagauaagcacaaugggaaacuauguaagcucagaggaguggcgccccugcaucuugguaaaugcaacauagcuggcuggauccuggggaauccugagugugaaucuuugucaaccgccaguagcugguccuacauuguugagacuucuucgucagacaacggaacaugcuauccaggcgauuuuaucaauuacgaagaacucagggagcagcugagcaguguguccucuuucgaacgguuugagauuuucccgaagaccagcuccuggcccaaccacgacucaaauaagggugucacggcagccuguccucaugcuggggcaaaaaguuuuuauaagaaccugaucuggcucgugaaaaagggaaauagcuacccaaaauuaucucaauccuauauaaacgauaagggcaaggaaguacugguucuuuggggcauccaccaccccucaacuaccgccgaccagcagagcuuguaccagaaugcugaugccuacguguucgucgggacaagucgcuauucuaaaaaguuuaaaccugagauugcgauccgaccaaaggugcgugaccaagagggaagaaugaacuacuauuggacucugcuagaacccggugauaaaauuaccuucgaggcaacaggcaaccucguggucccuagguacgccuuuaccauggaacggaaugcuggguccggaaucauaauuagcgacacgccaguucaugauugcaacacuacaugucagaccccggagggcgccaucaauacuucgcugcccuuccagaacauucacccuaucacaaucgguaagugcccaaaauaugugaagucuaccaaacuucgccuggcaacgggguugagaaauguacccuccauucagucaaggggacucuuuggcgcuauagccggcuucaucgaagggggauggaccgguaugguggacggcugguacggguaucaucaccaaaacgagcagggaaguggcuacgcggccgaccugaaaagcacacagaaugcaauugauaagaucacuaacaaagucaauuccgugauagagaagaugaacacccaguuuacagcuguugguaaagaguucaaucacuuagagaagcggauugaaaaccugaauaagaaaguggacgauggguuccucgacaucuggacuuacaacgccgagcuucuggucuugcuagaaaaugagcgcacccuggauuaucaugacucuaacgugaagaaccucuacgagaaaguacgaaaucaacugaagaacaaugcuaaagaaaucggcaacggauguuuugaguucuaucacaagugcgauaauacauguauggacagcguuaagaacggcaccuacgauuauccuaaauacucagaagaggccaaacuuaauagagaaaagauugacggggugaagcuggagaguacuaggaucuaucagauuuuggcaauauacuccacggucgccagcucucucgugcuggucgugucauuaggagcuaucaguuuuuggaugugcagcaacgguucccugcagugccggauuuguaucuga

SEQ ID NO: 139945 - RNA, 1701 nt, Artificial Sequence; identical to SEQ ID NO: 139046
  derived and/or modified CDS sequence (opt3) from hemagglutinin__InfluenzaA__AHV83770

SEQ ID NO: 139946 - RNA, 1701 nt, Artificial Sequence
  derived and/or modified CDS sequence (opt3) from hemagglutinin__InfluenzaA__AHV83771
augaaggccauccuggugguccuccuuuacaccuucgcuacagcaaacgccgacacucugugcauuggcuaucacgcgaauaacagcacggauaccguugacacaguguuggagaaaaauguaacugugacccauuccgucaacuuacuggaagauaagcacaaugggaaacuauguaagcucagaggaguggcuccccugcaucuugguaaaugcaacauagccggcuggauccuggggaauccugagugugaaucuuugucaacagcaaguagcugguccuacauuguugagaccucuucgucagacaacggaacuugcuauccaggcgauuuuaucaauuacgaagaacucagggagcagcugagcaguguguccucuuucgaacgguuugagauuuucccgaagacaagcuccuggcccaaccacgacucaaauaagggugucaccgccgcuuguccucaugcaggggccaaaaguuuuuauaagaaccugaucuggcucgugaaaaagggaaauagcuacccaaaauuaucucaauccuauauaaacgauaagggcaaggaaguacugguucuuuggggcauccaccaccccucaacgacuaccgaccagcagagcuuguaccagaaugcugaugccuacguguucgucgggacaagucgcuauucuaaaaaguuuaaaccugagauugcgauccgaccaaaggugcgugaccaagagggaagaaugaacuacuauuggacucugguggaacccggugauaaaauuaccuucgaggcaacaggcaaccuagucguuccuagguacgccuuuaccauggaacggaaugcuggguccggaaucauaauuagcgacacgccagugcaugauugcaacacuacaugucagaccccggagggcgccaucaauacuucgcuccccuuccagaacauucacccuaucacaaucgguaagugcccaaaauauguaaagucuaccaagcugcgccuugcaacggggcugagaaaugugcccuccauucagucaaggggauuguuuggcgcuauagccggcuucaucgaagggggauggaccgguauggucgacggcugguacggguaucaucaccaaaacgagcagggaaguggcuacgcggccgaccagaaaagcacacagaaugcaauugauaagaucacuaacaaaguuaauuccgugauagagaagaugaacacccaauuuacagcuguggguaaagaguucaaucaccucgagaagcggauugaaaaccugaauaagaaagucgacgauggguucuuagacaucuggacuuacaacgccgagcugcucgugcuucuggaaaaugagcgcaccuuggauuaucaugacucuaacguaaagaaccuauacgagaaaguucgaaaucagcugaagaacaaugcuaaagaaaucggcaacggauguuuugaguucuaucacaagugcgauaauacauguauggaaagcgugaagaacggcaccuacgacuauccuaaauacucagaggaagccaagcucaauagagagaaaauugauggggucaagcuggagaguacuaggaucuaucagauucuugcaauauacuccacgguggccagcucucuggucuuggugguuucacucggagcuaucaguuuuuggaugugcagcaacgguucccugcaaugccggauuuguaucuga

SEQ ID NO: 139947 - RNA, 1701 nt, Artificial Sequence; identical to SEQ ID NO: 138088
  derived and/or modified CDS sequence (opt3) from hemagglutinin__InfluenzaA__AHV83772

SEQ ID NO: 139948 - RNA, 1701 nt, Artificial Sequence; identical to SEQ ID NO: 138088
  derived and/or modified CDS sequence (opt3) from hemagglutinin__InfluenzaA__AHV83773

SEQ ID NO: 139949 - RNA, 1701 nt, Artificial Sequence; identical to SEQ ID NO: 138088
  derived and/or modified CDS sequence (opt3) from hemagglutinin__InfluenzaA__AHV83774

SEQ ID NO: 139950 - RNA, 1701 nt, Artificial Sequence
  derived and/or modified CDS sequence (opt3) from hemagglutinin__InfluenzaA__AHV83775
augaaggccauccuggugguccuccuuuacaccuucgcuacagcaaacgccgacacucugugcauuggcuaucacgcgaauaacagcacggauaccguugacacaguguuggagaagaauguaacugugacccauuccgucaacuuacuggaagauaagcacaaugggaaacuauguaagcucagaggaguggcuccccugcaucuugguaaaugcaacauagccggcuggauccuggggaauccugagugugaaucuuugucaacagcaaguagcugguccuacauuguugagaccucuucgucagacaacggaacuugcuauccaggcgauuuuaucaauuacgaagaacucagggagcagcugagcaguguguccucuuucgaacgguuugagauuuucccgaagacaagcuccuggcccaaccacgacucaaauaagggugucaccgccgcuuguccucaugcaggggccaaaaguuuuuauaagaaccugaucuggcucgugaaaaagggaaauagcuacccaaaauuaucucaauccuauauaaacgauaagggcaaggaaguacugguucuuuggggcauccaccaccccucaacgacugcugaccagcagagcuuguaccagaaugccgaugcguacguguucgucgggaccagucgcuauucuaaaaaguuuaaaccugagauugcaauccgaccaaaggugcgugaccaagagggaagaaugaacuacuauuggacacugguggaacccggugauaaaauuacuuucgaggccaccggcaaccuagucguuccuagguacgcuuuuacaauggaacggaaugccggguccggaaucauaauuagcgacaccccagugcaugauugcaacacgacuugucagacaccggagggcgcaaucaauaccucgcuccccuuccagaacauucacccuaucacuaucgguaagugcccaaaauauguaaagucuacaaagcugcgccuugcuaccgggcugagaaauauucccuccauacagucaaggggauuguuuggcgccaucgcgggcuucauugaagggggauggacggguaugguggacggcugguacggguaucaucaccaaaacgagcagggaaguggcuacgccgcagaccucaaaagcacccagaaugcuaucgauaagauaacaaacaaagucaauuccgugauugagaagaugaacacucaguuuaccgccguugguaaagaguucaaucaccuggagaagcggaucgaaaacuuaaauaagaaaguggacgauggguuccuggacaucuggacauacaacgcugagcuccuuguccuguuggaaaaugagcgcacucuagauuaucaugacucuaacgugaagaaccuguacgagaaaguacgaaaucaacucaagaacaaugccaaagaaauuggcaacggauguuuugaguucuaucacaagugcgauaauaccuguauggaaagcguuaagaacggcacauacgacuauccuaaauacucagaggaagcaaagcugaauagagagaaaaucgauggggugaaacuugagaguaccaggauuuaucagauacuggccaucuacuccacugucgcuagcucuuuggugcucgucgugucacugggagcgauuaguuuuuggaugugcagcaacgguuccuuacagugccggaucuguaucuga

SEQ ID NO: 139951 - RNA, 1701 nt, Artificial Sequence; identical to SEQ ID NO: 138088
  derived and/or modified CDS sequence (opt3) from hemagglutinin__InfluenzaA__AHV83776

SEQ ID NO: 139952 - RNA, 1701 nt, Artificial Sequence
  derived and/or modified CDS sequence (opt3) from hemagglutinin__InfluenzaA__AHV83777
augaaggccauccuggugguccuccuuuacaccuucgcuacagcaaacgccgacacucugugcauuggcuaucacgcgaauaacagcacggauaccguugacacaguguuggagaagaauguaacugugacccauuccgucaacuuacuggaagauaagcacaaugggaaacuauguaagcucagaggaguggcuccccugcaucuugguaaaugcaacauagccggcuggauccuggggaauccugagugugaaucuuugucaacagcaaguagcugguccuacauuguugagaccucuucgucagacaacggaacuugcuauccaggcgauuuuaucaauuacgaagaacucagggagcagcugagcaguguguccucuuucgaacgguuugagauuuucccgaagacaagcuccuggcccaaccacgacucaaauaagggugucaccgccgcuuguccucaugcaggggccaaaaguuuuuauaagaaccugaucuggcucgugaaaaagggaaauagcuacccaaaauuaucucaauccuauauaaacgauaagggcaaggaaguacugguucuuuggggcauccaccaccccucaacgacugcugaccagcagagcuuguaccagaaugccgaugcguacguguucgucgggaccagucgcuauucuaaaaaguuuaaaccugagauugcaauccgaccaaaggugcgugaccaagagggaagaaugaacuacuauuggacacugguggaacccggugauaaaauuacuuucgaggccaccggcaaccuagucguuccuagguacgcuuuuacaauggaacggaaugccggguccggaaucauaauuagcgacaccccagugcaugauugcaacacgacuugucagacaccggagggcgcaaucaauaccucgcuccccuuccagaacauucacccuaucacuaucgguaagugcccaaaauauguaaagucuacaaagcugcgccuugcuaccgggcugagaaauauucccuccauacagucaaggggauuguuuggcgccaucgcgggcuucauugaagggggauggacggguaugguggacggcugguacggguaucaucaccaaaacgagcagggaaguggcuacgccgcagaccucaaaagcacccagaaugcuaucgauaagauaacaaacaaagucaauuccgugauugagaagaugaacacucaguuuaccgccguugguaaagaguucaaucaccuggagaagcggaucgaaaacuuaaauaagaaaguggacgauggguuccuggacaucuggacauacaacgcugagcuccuuguccuguuggaaaaugagcgcacucuagauuaucaugacucuaacgugaagaaccuguacgagaaaguacgaaaucaacucaagaacaaugccaaagaaauuggcaacggauguuuugaguucuaucacaagugcgauaauaccuguauggaaagcguuaagaacggcacauacgacuauccuaaauacucagaggaagcaaagcugaauagagagaaaaucgauggggugaaacuugagaguaccaggauuuaucagauacuggccaucuacuccacugucgcuagcucuuuggugcucgucgugucacugggagcgauuugcuuuuggaugugcaguaacgguagcuuacagugucggaucugcaucuga

SEQ ID NO: 139953 - RNA, 1701 nt, Artificial Sequence
  derived and/or modified CDS sequence (opt3) from hemagglutinin__InfluenzaA__AHV83778
augaaggccauccuggugguccuccuuuacaccuucacaacugcuaacgcagacacgcugugcauuggcuaucacgccaauaacagcaccgauacaguugacacuguguuggagaagaauguaaccgugacacauuccgucaacuuacuggaagauaagcacaaugggaaacuauguaagcucagaggaguggcgccccugcaucuugguaaaugcaacauagcuggcuggauccuggggaauccugagugugaaucuuugucaaccgccaguagcugguccuacauuguugagacuucuucgucagacaacggaacaugcuauccaggcgauuuuaucaauuacgaagaacucagggagcagcugagcaguguguccucuuucgaacgguuugagauuuucccgaagaccagcuccuggcccaaccacgacucaaauaagggugucacggcagccuguccucaugcuggggcaaaaaguuuuuauaagaaccugaucuggcucgugaaaaagggaaauagcuacccaaaauuaucucaauccuauauaaacgauaagggcaaggaaguacugguucuuuggggcauccaccaccccucaacuaccgccgaccagcagagcuuguaccagaaugcugaugccuacguguucgucgggacaagucgcuauucuaaaaaguuuaaaccugagauugcgauccgaccaaaggugcgugaccaagagggaagaaugaacuacuauuggacucugguggaacccggugauaaaauuaccuucgaggcaacaggcaaccuagucguuccuagguacgccuuuaccauggaacggaaugcuggguccggaaucauaauuagcgacacgccaguguaugauugcaacacuacaugucagaccccggagggcgccaucaauacuucgcuccccuuccagaacauucauccuaucacaaucgguaagugcccaaaauacguaaagucuaccaagcugcgccuugcaacggggcugagaaaugugcccuccauucagucaaggggauuguuuggcgcuauagccggcuucaucgaagggggauggaccgguauggucgacggcugguauggguaccaccaucaaaacgagcagggaaguggcuacgcggccgaccucaaaagcacacagaaugcaauugauaagaucacuaacaaaguuaauuccgugauagagaagaugaacacccaguuuacagcuguggguaaagaguucaaucaccuggagaagcggauugaaaacuuaaauaagaaagucgacgauggguuccuggacaucuggacuuauaacgccgagcuccuugugcuguuggaaaaugagcgcacccuagauuaccacgacucuaacguaaagaaccuguaugagaaaguucgaaaucaacucaagaacaaugcuaaagaaaucggcaacggauguuuugaguucuaccauaagugcgauaauacauguauggaaagcgugaagaacggcaccuaugacuacccuaaauauucagaggaagccaagcugaauagagagaaaauugauggggucaaacuugagaguacuaggaucuaccagauucuggcaauauacuccacgguggccagcucuuugguccucgugguuucacugggagcuaucaguuuuuggaugugcagcaacgguuccuuacagugccggauuuguaucuga

SEQ ID NO: 139954 - RNA, 1701 nt, Artificial Sequence
  derived and/or modified CDS sequence (opt3) from hemagglutinin__InfluenzaA__AHV83779
augaaggccauccuggugguccuccuuuacaccuucgcuacaacuaacgcagacacgcugugcauuggcuaucacgccaauaacagcaccgauacaguugacacuguguuggagaagaauguaaccgugacacauuccgucaacuuacuggaagauaagcacaaugggaaacuauguaagcucagaggaguggcgccccugcaucuugguaaaugcaacauagcuggcuggauccuggggaauccugagugugaaucuuugucaaccgccaguagcugguccuacauuguugagacuucuucgucagacaacggaacaugcuauccaggcgauuuuaucaauuacgaagaacucagggagcagcugagcaguguguccucuuucgaacgguuugagauuuucccgaagaccagcuccuggcccaaccacgacucaaauaagggugucacggcagccuguccucaugcuggggcaaaaaguuuuuauaagaaccugaucuggcucgugaaaaagggaaauagcuacccaaaauuaucucaauccuauauaaacgauaagggcaaggaaguacugguucuuuggggcauccaccaccccucaacuaccgccgaccagcagagcuuguaccagaaugcugaugccuacguguucgucgggacaagucgcuauucuaaaaaguuuaaaccugagauugcgauccgaccaaaggugcgugaccaagagggaagaaugaacuacuauuggacucugguggaacccggugauaaaauuaccuucgaggcaacaggcaaccuagucguuccuagguacgccuuuaccauggaacggaaugcuggguccggaaucauaauuagcgacacgccagugcaugauugcaacacuacaugucagaccccggagggcgccaucaauacuucgcuccccuuccagaacauucacccuaucacaaucgguaagugcccaaaauauguaaagucuaccaagcugcgccuugcaacggggcugagaaaugugcccuccauucagucaaggggauuguuuggcgcuauagccggcuucaucgaagggggauggaccgguauggucgacggcugguacggguaucaucaccaaaacgagcagggaaguggcuacgcggccgaccucaaaagcacacagaaugcaauugauaagaucacuaacaaaguuaauuccgugauagagaagaugaacacccaguuuacagcuguggguaaagaguucaaucaccuggagaagcggauugaaaacuuaaauaagaaagucgacgauggguuccuggacaucuggacuuacaacgccgagcuccuugugcuguuggaaaaugagcgcacccuagauuaucaugacucuaacguaaagaaccuguacgagaaaguucgaaaucaacucaagaacaaugcuaaagaaacaggcaacggauguuuugaguucuaucacaagugcgauaauaccuguauggaaagcgugaagaacggcacuuacgacuauccuaaauacucagaggaagccaagcugaauagagagaaaaucgauggggucaaacuugagaguacgaggauuuaucagauccuggcaauuuacuccacaguggccagcucuuugguccucgugguuucacugggagcuauaaguuuuuggaugugcagcaacgguuccuuacagugccggaucuguauuuga

SEQ ID NO: 139955 - RNA, 1701 nt, Artificial Sequence
  derived and/or modified CDS sequence (opt3) from hemagglutinin__InfluenzaA__AHV83780
augaaggccauccuggugguccuccuuuacaccuucgcuacagcaaacgccgacacucugugcauuggcuaucacgcgaauaacagcacggauaccguugacacaguguuggagaagaauguaacugugacccauuccgucaacuuacuggaagauaagcacaaugggaaacuauguaagcucagaggaguggcuccccugcaucuugguaaaugcaacauagccggcuggauccuggggaauccugagugugaaucuuugucaacagcaaguagcugguccuacauuguugagaccucuucgucagacaacggaacuugcuauccaggcgauuuuaucaauuacgaagaacucagggagcagcugagcaguguguccucuuucgaacgguuugagauuuucccgaagacaagcuccuggcccaaccacgacucaaauaagggugucaccgccgcuuguccucaugcaggggccaaaaguuuuuauaagaaccugaucuggcucgugaaaaagggaaauagcuacccaaaauuacgccaaucuuauauaaacgauaagggcaaggaaguacugguucuuuggggcauccaccaccccuccacgacuaccgaccagcagucauuguaccagaaugcugaugccuacguguucgucgggacaagccgauauaguaaaaaguuuaaaccugagauugcgauccguccaaaggugagagaccaagagggaaggaugaacuacuauuggacucugguggaacccggugauaaaauuaccuucgaggcaacaggcaaccuagucguuccucgguacgccuuuaccauggaacgcaaugcugggucuggaaucauaauuuccgacacgccagugcaugauugcaacacuacaugucagaccccggagggcgccaucaauacuagccuccccuuccagaacauucacccuaucacaaucgguaagugcccaaaauauguaaagucgaccaagcugagacuugcaacggggcugaggaaugugcccucuauucagucccggggauuguuuggcgcuauagccggcuucaucgaagggggauggaccgguauggucgacggcugguacggguaucaucaccaaaacgagcagggaucaggcuacgcggccgaccucaaaaguacacagaaugcaauugauaagaucacuaacaaagugaauagcguuauagagaagaugaacacccaguuuacagcuguggguaaagaguucaaucaccuggagaagcgcauugaaaacuuaaauaagaaagucgacgauggguuccuggacaucuggacuuacaacgccgagcuccuugugcuguuggaaaaugagcgaacccuagauuaucaugacuccaacguaaagaaccuguacgagaaaguuagaaaucaacucaagaacaaugcuaaagaaaucggcaacggauguuuugaguucuaucacaagugcgauaauacauguauggaaucugugaagaacggcaccuacgacuauccuaaauacagcgaggaagccaagcugaauagggagaaaauugauggggucaaacuugagucaacucggaucuaucagauucuggcaauauacaguacgguggccuccagcuugguccucgugguuucucugggagcuaucucauuuuggaugugcaguaacgguagcuuacagugccguauuuguaucuga

SEQ ID NO: 139956 - RNA, 1701 nt, Artificial Sequence; identical to SEQ ID NO: 138088
  derived and/or modified CDS sequence (opt3) from hemagglutinin__InfluenzaA__AHV83781

SEQ ID NO: 139957 - RNA, 1701 nt, Artificial Sequence
  derived and/or modified CDS sequence (opt3) from hemagglutinin__InfluenzaA__AHV83782
augaaggccauccuggugguccuccuuuacacccuggcuacagcaaacgccgacacuuugugcauuggcuaucacgcgaauaacagcacggauaccguugacacaguguuagagaaaaauguaacugugacccauuccgucaaccugcuagaagauaagcacaaugggaaacucuguaagcugagaggaguggcuccccuucaucuggguaaaugcaacauagccggcuggaucuuggggaauccugagugugaaucucucucaacagcaaguagcugguccuacauuguugagaccucuucgucagacaacggaacuugcuauccaggcgauuucaucaauuacgaggaacugagggagcagcugagcaguguguccucuuuugaacgguucgagauuuuuccgaagacaagcuccuggcccaaccacgacucaaauaagggugucaccgccgcuuguccucaugcaggggccaaaaguuucuauaagaaccucaucugguuagugaaaaagggaaauagcuacccaaaacugucucaauccuauauaaacgauaagggcaaggaaguacuuguuuuguggggcauccaccaccccucaacgacugcugaccagcagagccuguaccagaaugccgaugcguacguguuugucgggaccagucgcuauucuaaaaaguucaaaccugagauugcaauccgaccaaaggugcgugaccaagagggaagaaugaacuacuauuggacacuuguggaacccggugauaaaauuacuuuugaggccaccggcaaccucgucgcuccuagguacgccuucacaauggaacggaaugcaggguccggaaucauaauuagcgacaccccaguucaugauugcaacacgacuugucagacaccggagggcgcuaucaauaccucgcugcccuuucagaacauucacccuaucacuaucgguaagugcccaaaauaugugaagucuacaaagcuacgccuggccaccggguugagaaauguacccuccauucagucaaggggacucuucggcgcgauagccggcuuuaucgaagggggauggacggguaugguggacggcugguacggguaucaucaccaaaacgagcagggaaguggcuacgcagcugaccugaaaagcacccagaaugccauugauaagaucacaaacaaagucaauuccgugauagagaagaugaacacucaguucaccgcuguugguaaagaauuuaaucacuuagagaagcggauugaaaaccugaauaagaaaguggacgauggguuccucgacaucuggacauacaacgccgagcuucuggucuugcuagaaaaugagcgcacucuggauuaucaugacucuaacgugaagaaccucuacgagaaaguacgaaaucaacugaagaacaaugcaaaagaaaucggcaacggauguuucgaguuuuaucacaagugcgauaauaccuguauggaaagcguuaagaacggcacauacgacuauccuaaauacucagaggaagccaaacuuaauagagagaagauugauggggugaagcuggagaguaccaggaucuaucagauuuuggcuauauacuccacugucgcgagcucucucgugcuggucgugucauuaggagcaaucaguuucuggaugugcagcaacgguucccugcagugccggauuuguaucuga

SEQ ID NO: 139958 - RNA, 1701 nt, Artificial Sequence
  derived and/or modified CDS sequence (opt3) from hemagglutinin__InfluenzaA__AHV83783
augaaggccauccuggugguccuccuuuacaccuucgcuacagcaaacgccgacacucugugcauuggcuaucacgcgaauaacagcacggauaccguugacacaguguuggagaagaauauaacuguaacccauuccgugaacuuacuggaagauaagcacaaugggaaacuauguaagcucagaggagucgcuccccugcaucuugguaaaugcaacaucgccggcuggauucuggggaauccugagugugaaucuuugucaacagcaaguagcugguccuacaucguggagaccucuucgucagacaacggaacuugcuauccaggcgauuuuauuaauuacgaagaacucagggagcagcugagcaguguuuccucuuucgaacgguuugagaucuucccgaagacaagcuccuggcccaaccacgacucaaauaagggugugaccgccgcuuguccucaugcaggggccaaaggauuuuauaagaaccugauauggcucgucaaaaagggcaauaguuacccaaaauuacgccaaagcuauaucaacgauaagggcaaggaagugcugguacuuugggggauucaccaccccucuacgacuaccgaccagcaguccuuguaccagaaugcugaugccuacguuuucgugggaacaucacgauauagcaaaaaguuuaaaccugagaucgcgauucguccaaaggucagagaccaagaggguaggaugaacuacuauuggacucugguggaacccggcgauaaaaucaccuucgaggcaacagggaaccuaguggucccucgguacgccuuuaccauggaacgcaaugcuggaaguggcauaauuaucucugacacgccaguucaugauugcaacacuacaugucagaccccggagggugccauuaauacuucccuccccuuccagaacauccacccuaucacaauugggaagugcccaaaauauguaaagagcaccaagcugagacuugcaacgggacugaggaaugugcccucgauacagucucggggcuuguuuggcgcuaucgccggguucauugaaggagguuggaccggcaugguggacgggugguacggauaucaucaccaaaacgagcagggcuccgguuacgcggccgaccucaaaucaacacagaaugcaaucgauaagauaacuaacaaagucaauagugugauugagaagaugaacacccaguuuacagcuguugggaaagaguucaaucaccuggagaagcgcaucgaaaacuuaaauaagaaaguggacgauggcuuccuggacaucuggacuuacaacgccgagcuccuuguccuguuggaaaaugagcgaacccuagauuaucaugacagcaacgugaagaaccuguacgagaaaguaagaaaucaacucaagaacaaugcuaaagaaauuggaaacggcuguuuugaguucuaucacaagugcgauaauacauguauggaauccguuaagaacgggaccuacgacuauccuaaauacucugaggaagccaagcugaauagggagaaaaucgauggagugaaacuugagagcacucggauuuaucagauacuggcaaucuacucaacggucgccaguuccuuggugcucgucgugagccugggugcuauuucuuuuuggaugugcucaaacggcaguuuacagugccguaucuguaucuga

SEQ ID NO: 139959 - RNA, 1701 nt, Artificial Sequence; identical to SEQ ID NO: 138088
  derived and/or modified CDS sequence (opt3) from hemagglutinin__InfluenzaA__AHV83784

SEQ ID NO: 139960 - RNA, 1701 nt, Artificial Sequence; identical to SEQ ID NO: 138088
  derived and/or modified CDS sequence (opt3) from hemagglutinin__InfluenzaA__AHV83785

SEQ ID NO: 139961 - RNA, 1701 nt, Artificial Sequence; identical to SEQ ID NO: 138088
  derived and/or modified CDS sequence (opt3) from hemagglutinin__InfluenzaA__AHV83787

SEQ ID NO: 139962 - RNA, 1701 nt, Artificial Sequence
  derived and/or modified CDS sequence (opt3) from hemagglutinin__InfluenzaA__AHV83788
augaaggccauccuggugguccuccuuuacaccuucgcuacagcaaacgccgacacucugugcauuggcuaucacgcgaauaacagcacggauaccguugacacaguguuggagaaaaauguaacugugacccauuccgucaacuuacuggaagauaagcacaaugggaaacuauguaagcucagaggagugucuccccugcaucuugguaaaugcaacauagcuggcuggauccuggggaauccugagugugaaucauugaguacagccagcuccuggucuuacauuguugagaccucgucaagcgacaacggaacuugcuauccaggcgauuuugugaauuacgaagaacucagggagcagcugaguuccgucucuagcuucgaacgguuugagaucuucccgaagacauccucauggcccaaccacgacaguaauaagggugugaccgcagccuguccucaugcuggggcaaagagcuuuuauaagaaccugauuuggcucguuaaaaagggaaauucuuacccaaaauuaucccaaucauauaucaacgauaagggcaaggaaguacuggugcuuuggggcauacaccaccccagcacgacugccgaccagcagaguuuguaccagaaugcugaugccuacgucuucguggggaccucucgcuauuccaaaaaguuuaaaccugagaucgcgauucgaccaaaggugcgugaccaagagggaagaaugaacuacuauuggacacuggucgaacccggugauaaaaucacuuucgaggcaaccggcaaccuaguugugccuagguacgccuuuacaauggaacggaaugcugggagcggaauuaucauaucggacaccccaguacaugauugcaacacgacuugucagacaccggagggcgccauuaauaccucucuccccuuccagaacauccacccuauuacuaucgguaagugcccaaaauaugugaaguccacaaagcugcgccuugcaaccgggcugagaaauguccccucaauccagaguaggggauuguuuggcgcuauugccggcuucauagaagggggauggacggguaugguggacggcugguacggguaucaucaccaaaacgagcagggaagcggcuacgcggccgaccucaaauccacccagaaugcaaucgauaagauuacaaacaaaguuaauucugugaucgagaagaugaacacucaguuuaccgcugucgguaaagaguucaaucaccuggagaagcggauagaaaacuuaaauaagaaaguggacgauggguuccuggacauuuggacauacaacgccgagcuccuuguacuguuggaaaaugagcgcacucuagauuaucaugacagcaacguuaagaaccuguacgagaaagugcgaaaucaacucaagaacaaugcuaaagaaaucggcaacggauguuuugaguucuaucacaagugcgauaauaccuguauggaaucagucaagaacggcacauacgacuauccuaaauacagugaggaagccaagcugaauagagagaaaaucgauggggugaaacuugaguccaccaggauuuaucagauccuggcaauuuacagcacugucgccucuucauuggugcucguugugagucugggagcuaucagcuuuuggaugugcuccaacgguucuuuacagugccggauauguauuuga

SEQ ID NO: 139963 - RNA, 1701 nt, Artificial Sequence; identical to SEQ ID NO: 139950
  derived and/or modified CDS sequence (opt3) from hemagglutinin__InfluenzaA__AHV83789

SEQ ID NO: 139964 - RNA, 1701 nt, Artificial Sequence; identical to SEQ ID NO: 138088
  derived and/or modified CDS sequence (opt3) from hemagglutinin__InfluenzaA__AHV83790

SEQ ID NO: 139965 - RNA, 1701 nt, Artificial Sequence; identical to SEQ ID NO: 138088
  derived and/or modified CDS sequence (opt3) from hemagglutinin__InfluenzaA__AHV83791

SEQ ID NO: 139966 - RNA, 1701 nt, Artificial Sequence; identical to SEQ ID NO: 138088
  derived and/or modified CDS sequence (opt3) from hemagglutinin__InfluenzaA__AHV83792

SEQ ID NO: 139967 - RNA, 1701 nt, Artificial Sequence
  derived and/or modified CDS sequence (opt3) from hemagglutinin__InfluenzaA__AHV83793
augaaggccauccuggugguccuccuuuacaccuucgcuacagcaaacgccgacacucugugcauuggcuaucacgcgaauaacagcacggauaccguugacacaguguuggagaaaaauguaacugugacccauuccgucaacuuacuggaagauaagcacaaugggaaacuauguaagcucagaggaguggcuccccugcaucuugguaaaugcaacauagccggcuggauccuggggaauccugagugugaaucuuugucaacagcaaguagcugguccuacauuguugagaccucuucgucagacaacggaacuugcuauccaggcgauuuuaucaauuacgaagaacucagggagcagcugagcaguguguccucuuucgaaaaguuugagauuuucccgaagacaagcuccuggcccaaccacgacucaaauaaaggugucaccgccgcuuguccucaugcaggggccaagaguuuuuauaaaaaccugaucuggcucgugaagaaaggaaauagcuacccaaaguuaucucaauccuauauaaacgauaagggcaaagaaauccugguacuuuggggcauucaccaccccucaacgacugcugaccagcagagcuuguaccagaaugccgaugcguacguuuucguggggaccagucgguauucuaagaaauuuaagccugagaucgcaauucgcccaaaaguccgagaccaagagggacguaugaacuacuauuggacacugguggaacccggugauaagaucacuuucgaggccaccggcaaccuaguggucccuagauacgcuuuuacaauggaaaggaaugccggguccggaauaauuaucagcgacaccccaguucaugauugcaacacgacuugucagacaccggagggcgcaauuaauaccucgcuccccuuccagaacauccacccuaucacuauugguaaaugcccaaaguaugugaagucuacaaaacugcggcuugcuaccgggcugcgcaauguacccuccauacagucaagaggauuguuuggcgccaucgcgggcuucauugaagggggauggacggguaugguggacggcugguacggguaucaucaccaaaacgagcagggaaguggcuacgccgcagaccaaaagagcacccagaaugcuaucgauaaaauaacaaacaaggucaauuccgugauugagaaaaugaacacucaguuuaccgccguugguaaggaguucaaucaccucgagaagaggaucgaaaaccugaauaaaaagguggacgauggguucuuagacaucuggacauacaacgcugagcugcucguccuucuggaaaaugagcggacuuuggauuaucaugacucuaacgugaaaaaccuauacgagaagguacgcaaucagcugaaaaacaaugccaaggaaauuggcaacggauguuuugaguucuaucacaagugcgauaauaccuguauggaaagcguuaaaaacggcacauacgacuauccuaaguacucagaggaagcaaaacucaaucgagagaagaucgauggggugaaacuggagaguaccagaauuuaucagauacuugccaucuacuccacugucgcuagcucucugguguuggucgugucacucggagcgauuaguuuuuggaugugcagcaacgguucccugcaaugcaggaucuguaucuga

SEQ ID NO: 139968 - RNA, 1701 nt, Artificial Sequence
  derived and/or modified CDS sequence (opt3) from hemagglutinin__InfluenzaA__AHV83794
augaaggccauccuggugguccuccuuuacaccuucgcuacagcaaacgccgacacucugugcauuggcuaucacgcgaauaacagcacggauaccguugacacaguguuggagaaaaauguaacugugacccauuccgucaacuuacuggaagauaagcacaaugggaaacuauguaagcucagaggaguggcuccccugcaucuugguaaaugcaacauagccggcuggauccuggggaauccugagugugaaucuuugucaacagcaaguagcugguccuacauuguugagaccucuucgucagacaacggaacuugcuauccaggcgauuuuaucaauuacgaagaacucagggagcagcugagcaguguguccucuuucgaacgguuugagauuuucccgaagacaagcuccuggcccaaccacgacucaaauaagggugucaccgccgcuuguccucaugcaggggccaaaaguuuuuauaagaaccugaucuggcucgugaaaaagggaaauagcuacccaaaauuaucucaauccuauauaaacgauaagggcaaggaaguacugguucuuuggggcauccaccaccccucaacgacugcugaccagcagagcuuguaccagaaugccgaugcguacguguucgucgggaccagucgcuauucuaaaaaguuuaaaccugagauugcaauccgaccaaaggugcgugaccaagagggaagaaugaacuacuauuggacacugguggaacccggugauaaaauuacuuucgaggccaccggcaaccuagucguuccuagguacgcuuuuacaauggaacggaaugccggguccggaaucauaauuagcgacaccccagugcaugauugcaacacgacuugucagacaccggagggcgcaaucaauaccucgcuccccuuccagaacauucacccuaucacuaucgguaagugcccaaaauauguaaagucuacaaagcugcgccuugcuaccgggcugagaaaugugcccuccauucagucaaggggauuguuuggcgccauagcgggcuucaucgaagggggauggacggguauggucgacggcugguacggguaucaucaccaaaacgagcagggaaguggcuacgccgcagaccagaaaagcacccagaaugcuauugauaagaucacaaacaaaguuaauuccgugauagagaagaugaacacucaauuuaccgccguggguaaagaguucaaucaccucgagaagcggauugaaaaccugaauaagaaagucgacgauggguucuuagacaucuggacauacaacgcugagcugcucgugcuucuggaaaaugagcgcacuuuggauuaucaugacucuaacguaaagaaccuauacgagaaaguucgaaaucagcugaagaacaaugccaaagaaaucggcaacggauguuuugaguucuaucacaagugcgauaauaccuguauggaaagcgugaagaacggcacauacgacuauccuaaauacucagaggaagcaaagcucaauagagagaaaauugauggggucaagcuggagaguaccaggaucuaucagauucuugccauauacuccacuguggcuagcucucuggucuuggugguuucacucggagcgaucaguuuuuggaugugcagcaacgguucccugcaaugccggauuuguaucuga

SEQ ID NO: 139969 - RNA, 1701 nt, Artificial Sequence
  derived and/or modified CDS sequence (opt3) from hemagglutinin__InfluenzaA__AHV83795
augaaggccauccuggugguccuccuuuacaccuucgcuacagcaaacgccgacacucugugcauuggcuaucacgcgaauaacagcacggauaccguugacacaguguuggagaaaaauguaacugugacccauuccgucaacuuacuggaagauaagcacaaugggaaacuauguaagcucagaggaguggcuccccugcaucuugguaaaugcaacauagccggcuggauccuggggaauccugagugugaaucuuugucagcagccaguagcugguccuacauuguugagacaucuucgucagacaacggaaccugcuauccaggcgauuuuaucaauuacgaagaacucagggagcagcugagcaguguguccucuuucgaacgguuugagauuuucccgaagacuagcuccuggcccaaccacgacucaaauaagggugucacagcugcauguccucaugccggggcuaaaaguuuuuauaagaaccugaucuggcucgugaaaaagggaaauagcuacccaaaauuaucucaauccuauauaaacgauaagggcaaggaaguacugguucuuuggggcauccaccaccccucaaccacggccgaccagcagagcuuguaccagaaugcggauacuuacguguucgucgggaccagucgcuauucuaaaaaguuuaaaccugagauugcaauccgaccaaaggugcgugaccaagagggaagaaugaacuacuauuggacacugguggaacccggugauaaaauuacuuucgaggccaccggcaaccuagucguuccuagguacgcuuuuacaauggaacggaaugccggguccggaaucauaauuagcgacaccccagugcaugauugcaacacgacuugucagacaccggagggcgcaaucaauaccucgcuccccuuccagaacauucacccuaucacuaucgguaagugcccaaaauauguaaagucuacaaagcugcgccuugcuaccgggcugagaaaugugcccuccauucagucaaggggauuguuuggcgccauagcgggcuucaucgaagggggauggacggguauggucgacggcugguacggguaucaucaccaaaacgagcagggaaguggcuacgccgcagaccagaaaagcacccagaaugcuauugauaagaucacaaacaaaguuaauuccgugauagagaagaugaacacucaauuuaccgccguggguaaagaguucaaucaccucgagaagcggauugaaaaccugaauaagaaagucgacgauggguucuuagacaucuggacauacaacgcugagcugcucgugcuucuggaaaaugagcgcacuuuggauuaucaugacucuaacguaaagaaccuauacgagaaaguucgaaaucagcugaagaacaaugccaaagaaaucggcaacggauguuuugaguucuaucacaagugcgauaauaccuguauggaaagcgugaagaacggcacauacgacuauccuaaauacucagaggaagcaaagcucaauagagagaaaauugauggggucaagcuggagaguaccaaaaucuaucagauucuugccauauacuccacuguggcuagcucucuggucuuggugguuucacucggagcgaucaguuuuuggaugugcagcaacgguucccugcaaugcaggauuuguaucuga

SEQ ID NO: 139970 - RNA, 1701 nt, Artificial Sequence; identical to SEQ ID NO: 139968
  derived and/or modified CDS sequence (opt3) from hemagglutinin__InfluenzaA__AHV83796

SEQ ID NO: 139971 - RNA, 1701 nt, Artificial Sequence; identical to SEQ ID NO: 138088
  derived and/or modified CDS sequence (opt3) from hemagglutinin__InfluenzaA__AHV83798

SEQ ID NO: 139972 - RNA, 1701 nt, Artificial Sequence; identical to SEQ ID NO: 138088
  derived and/or modified CDS sequence (opt3) from hemagglutinin__InfluenzaA__AHV83799

SEQ ID NO: 139973 - RNA, 1701 nt, Artificial Sequence
  derived and/or modified CDS sequence (opt3) from hemagglutinin__InfluenzaA__AHV83800
augaaggccauccuggugguccuccuuuacaccuucgcuacagcaaacgccgacacucugugcauuggcuaucacgcgaauaacagcacggauaccguugacacaguguuggagaaaaauguaacugugacccauuccgucaacuuacuggaagauaagcacaaugggaaacuauguaagcucagaggaguggcuccccugcaucuugguaaaugcaacauagccggcuggauccuggggaauccugagugugaaucuuugucaacagcaaguagcugguccuacauuguugagaccucuucgucagacaacggaacuugcuauccaggcgauuuuaucaauuacgaagaacucagggagcagcugagcaguguguccucuuucgaacgguuugagauuuucccgaagacaagcuccuggcccaaccacgacucaaauaagggugucaccgccgcuuguccucaugcaggggccaaaaguuuuuauaagaaccugaucuggcucgugaaaaagggaaauagcuacccaaaauuaucucaauccuauauaaacgauaagggcaaggaaguacugguucuuuggggcauccaccaccccucaacgacugcugaccagcagagcuuguaccagaaugccgaugcguacguguucgucgggaccagucgcuauucuaaaaaguuuaaaccugagauugcaauccgaccaaaggugcgugaccaagagggaagaaugaacuacuauuggacacugguggaacccggugauaaaauuacuuucgaggccaccggcaaccuagucguuccuagguacgcuuuuacaauggaacggaaugccggguccggaaucauaauuagcgacaccccagugcaugauugcaacacgacuugucagacaccggagggcgcaaucaauaccucgcuccccuuccagaacauucacccuaucacuaucgguaagugcccaaaauauguaaagucuacaaagcugcgccuugcuaccgggcugagaaaugugcccuccauucagucaaggggauuguuuggcgccauagcgggcuucaucgaagggggauggacggguauggucgacggcugguacggguaucaucaccaaaacgagcagggaaguggcuacgccgcagaccucaaaagcacccagaaugcuauugauaagaucacaaacaaaguaaauuccguuauagagaagaugaacacucaguuuaccgccguggguaaagaguucaaucaccuggagaagcggauugaaaacuuaaauaagaaagucgacgauggguuccuggacaucuggacauacaacgcugagcuccuugugcuguuggaaaaugagaagacucuagauuaucaugacucuaacgugaaaaaccuguacgagaagguucgcaaucaacucaaaaacaaugccaaggaaaucggcaacggauguuuugaguucuaucacaagugcgauaauaccuguauggaaagcgugaaaaacggcacauacgacuauccuaaguacucagaggaagcaaaacugaaucgagagaagauugauggggucaaacuugagaguaccagaaucuaucagauucuggccauauacuccacuguggcuagcucuuugguccucgugguuucacugggagcgaucaguuuuuggaugugcagcaacgguuccuuacagugcaggauuuguaucuga

SEQ ID NO: 139974 - RNA, 1701 nt, Artificial Sequence
  derived and/or modified CDS sequence (opt3) from hemagglutinin__InfluenzaA__AHV83801
augaaggccauccuggugguccuccuuuacaccuucgcuacagcaaacgccgacacucugugcauuggcuaucacgcgaauaacagcacggauaccguugacacaguguuggagaaaaauguaacugugacccauuccgucaacuuacuggaagauaagcacaaugggaaacuauguaagcucagaggaguggcuccccugcaucuugguaaaugcaacauagccggcuggauccuggggaauccugagugugaaucuuugucaacagcaaguagcugguccuacauuguugagaccucuucgucagacaacggaacuugcuauccaggcgauuuuaucaauuacgaagaacucagggagcagcugagcaguguguccucuuucgaacgguuugagauuuucccgaagacaagcuccuggcccaaccacgacucaaauaagggugucaccgccgcuuguccucaugcaggggccaaaaguuuuuauaagaaccugaucuggcucgugaaaaagggaaauagcuacccaaaauuaucucaauccuauauaaacgauaagggcaaggaaguacugguucuuuggggcauccaccaccccucaacgacugcugaccagcagagcuuguaccagaaugccgaugcguacguguucgucgggaccagucgcuauucuaaaaaguuuaaaccugagauugcaauccgaccaaaggugcgugaccaagagggaagaaugaacuacuauuggacacugguggaacccggugauaaaauuacuuucgaggccaccggcaaccuagucguuccuagguacgcuuuuacaauggaacggaaugccggguccggaaucauaauuagcgacaccccagugcaugauugcaacacgacuugucagacaccggagggcgcaaucaauaccucgcuccccuuccagaacauucacccuaucacuaucgguaagugcccaaaauauguaaagucuacaaagcugcgccuugcuaccgggcugagaaaugugcccuccauucagucaaggggauuguuuggcgccauagcgggcuucaucgaagggggauggacggguauggucgacggcugguacggguaucaucaccaaaacgagcagggaaguggcuacgccgcagaccagaaaagcacccagaaugcuauugauaagaucacaaacaaaguuaauuccgugauagagaagaugaacacucaauuuaccgccguggguaaagaguucaaucaccucgagaagcggauugaaaaccugaauaagaaagucgacgauggguucuuagacaucuggacauacaacgcugagcugcucgugcuucuggaaaaugagcgcacuuuggauuaucaugacucuaacguaaagaaccuauacgagaaaguucgaaaucagcugaagaacaaugccaaagaaaucggcaacggauguuuugaguucuaucacaagugcgauaauaccuguauggaaagcgugaagaacggcacauacgacuauccuaaauacucagaggaagcaaagcucaauagagagaaaauugauggggucaagcuggagaguaccaaaaucuaucagauucuugccauauacuccacuguggcuagcucucuggucuuggugguuucacucggagcgaucaguuuuuggaugugcagcaacgguucccugcaaugcaggauuuguaucuga

SEQ ID NO: 139975 - RNA, 1701 nt, Artificial Sequence
  derived and/or modified CDS sequence (opt3) from hemagglutinin__InfluenzaA__AHV83802
augaaggccauccuggugguccuccuuuacaccuucgcuacagcaaacgccgacacucugugcauuggcuaucacgcgaauaacagcacggauaccguugacacaguguuggagaagaauguaacugugacccauuccgucaacuuacuggaagauaagcacaaugggaaacuauguaagcucagaggaguggcuccccugcaucuugguaaaugcaacauagccggcuggauccuggggaauccugagugugaaucuuugucaacagcaaguagcugguccuacauuguugagaccucuucgucagacaacggaacuugcuauccaggcgauuuuaucaauuacgaagaacucagggagcagcugagcaguguguccucuuucgaacgguuugagauuuucccgaagacaagcuccuggcccaaccacgacucaaauaagggugucaccgccgcuuguccucaugcaggggccaaaaguuuuuauaagaaccugaucuggcucgugaaaaagggaaauagcuacccaaaauuaucucaauccuauauaaacgauaagggcaaggaaguacugguucuuuggggcauccaccaccccucaacgacugcugaccagcagggguuguaccagaauguggaugccuacgucuucgugggaaccagccgcuauaguaaaaaguuuaaaccugagauugcgauccgaccaaaggugcgugaccaagaggguagaaugaacuacuauuggacacuggucgaacccggcgauaaaauuacuuucgaggcaaccgggaaccuaguugugccuagguacgccuuuacaauggaacggaaugcuggaucuggcaucauaauuuccgacaccccaguacaugauugcaacacgacuugucagacaccggagggugccaucaauaccagccuccccuuccagaacauucacccuaucacuaucgggaagugcccaaaauaugugaagucgacaaagcugcgccuugcaaccggacugagaaauguccccucuauucaguccaggggcuuguuuggcgcuauagccggguucaucgaaggagguuggacgggcaugguggacgggugguacggauaucaucaccaaaacgagcagggcucagguuacgcggccgaccucaaaaguacccagaaugcaauugauaagaucacaaacaaaguuaauagcgugauagagaagaugaacacucaguuuaccgcugucgggaaagaguucaaucaccuggagaagcggauugaaaacuuaaauaagaaaguggacgauggcuuccuggacaucuggacauacaacgccgagcuccuuguacuguuggaaaaugagcgcacucuagauuaucaugacuccaacguuaagaaccuguacgagaaagugcgaaaucaacucaagaacaaugcuaaagaaaucggaaacggcuguuuugaguucuaucacaagugcgauaauaccuguauggaaucugucaagaacgggacauacgacuauccuaaauacagcgaggaagccaagcugaauagagagaaaauugauggagugaaacuugagucaaccaggaucuaucagauucuggcaauauacaguacugucgccuccagcuuggugcucguugugucucugggugcuaucucauuuuggaugugcaguaacggcagcuuacagugccggauuuguaucuga

SEQ ID NO: 139976 - RNA, 1701 nt, Artificial Sequence; identical to SEQ ID NO: 138088
  derived and/or modified CDS sequence (opt3) from hemagglutinin__InfluenzaA__AHV83803

SEQ ID NO: 139977 - RNA, 1701 nt, Artificial Sequence; identical to SEQ ID NO: 138088
  derived and/or modified CDS sequence (opt3) from hemagglutinin__InfluenzaA__AHV83804

SEQ ID NO: 139978 - RNA, 1701 nt, Artificial Sequence; identical to SEQ ID NO: 138088
  derived and/or modified CDS sequence (opt3) from hemagglutinin__InfluenzaA__AHV83805

SEQ ID NO: 139979 - RNA, 1701 nt, Artificial Sequence; identical to SEQ ID NO: 139968
  derived and/or modified CDS sequence (opt3) from hemagglutinin__InfluenzaA__AHV83806

SEQ ID NO: 139980 - RNA, 1701 nt, Artificial Sequence
  derived and/or modified CDS sequence (opt3) from hemagglutinin__InfluenzaA__AHV83807
augaaggccauccuggugguccuccuuuacaccuucgcuacagcaaacgccgacacucugugcauuggcuaucacgcgaauaacagcacggauaccguugacacaguguuggagaaggauguaacugugacccauuccgucaauuuacuggaagacaagcacaacgggaaacuauguaagcucagaggaguggcuccccugcaucuugguaaaugcaauauagccggcuggauccuggggaacccugagugugaaucuuugucaacagcaaguagcugguccuacauuguugagaccucuucgucagauaauggaacuugcuauccaggcgacuuuaucaacuacgaagaacucagggagcagcugagcaguguguccucuuucgaacgguuugagauuuucccgaagacaagcuccuggcccaaucacgauucaaacaagggugucaccgccgcuuguccucaugcaggggccaaaaguuuuuauaagaaucugaucuggcucgugaaaaagggaaacagcuacccaaaauuaucucaauccuauauaaaugacaagggcaaggaaguacugguucuuuggggcauccaccaccccucaacgacugcugaucagcagagcuuguaccagaacgccgacgcguacguguucgucgggaccagucgcuauucuaaaaaguuuaaaccugagauugcaauccgaccaaaggugcgugaucaagagggaagaaugaauuacuauuggacacugguggaacccggugacaaaauuacuuucgaggccaccggcaaccuagucguuccuagguacgcuuuuacaauggaacggaacgccggguccggaaucauaauuagcgauaccccagugcaugacugcaauacgacuugucagacaccggagggcgcaaucaacaccucgcuccccuuccagaauauucacccuaucacuaucgguaagugcccaaaauauguaaagucuacaaagcugcgccuugcuaccgggcugagaaacgugcccuccauucagucaaggggauuguuuggcgccauagcgggcuucaucgaagggggauggacggguauggucgacggcugguacggguaucaucaccaaaaugagcagggaaguggcuacgccgcagaucucaaaagcacccagaacgcuauugacaagaucacaaauaaagugaacuccguuauagagaagaugaauacucaguuuaccgccguggguaaagaguucaaccaccuggagaagcggauugaaaauuuaaacaagaaagucgaugacggguuccuggauaucuggacauacaaugcugagcuccuugugcuguuggaaaacgagcgcacucuagacuaucaugauucuaauguaaagaaccuguacgagaaaguucgaaaccaacucaagaauaacgccaaagaaaucggcaauggauguuuugaguucuaucacaagugcgacaacaccuguauggaaagcgugaagaauggcacauacgauuauccuaaauacucagaggaagcaaagcugaacagagagaaaauugacggggucaaacuugagaguaccaggaucuaucagauucuggccauauacuccacuguggcuagcucuuugguccucgugguuucacugggagcgaucaguuuuuggaugugcagcaaugguuccuuacagugccggauuuguaucuga

SEQ ID NO: 139981 - RNA, 1701 nt, Artificial Sequence
  derived and/or modified CDS sequence (opt3) from hemagglutinin__InfluenzaA__AHV83808
augaaggccauccuggugguccuccuuuacaccuucgcuacagcaaacgccgacacucugugcauuggcuaucacgcgaauaacagcacggauaccguugacacaguguuggagaagaauguaacugugacccauuccgucaacuuacuggaagauaagcacaaugggaaacuauguaagcucagaggaguggcuccccugcaucuugguaaaugcaacauagccggcuggauccuggggaauccugagugugaaucuuugucaacagcaaguagcugguccuacauuguugagaccucuucgucagacaacggaacuugcuauccaggcgauuuuaucaauuacgaggagcucagggagcagcugagcaguguguccucuuucgaacgguuugagauuuucccgaagacaagcuccuggcccaaccacgacucaaauaagggugucaccgccgcuuguccucaugcaggggccaaaaguuuuuauaagaaccugaucuggcucgugaaaaagggaaauagcuacccaaaauuaucucaauccuauauaaacgauaagggcaaggaaguacugguucuuuggggcauccaccaccccucaacgacugcugaccagcagagcuuguaccagaaugccgaggcguacguguucgucgggaccagucgcuauucuaaaaaguuuaaaccugagauugcaauccgaccaaaggugcgugaucaagaaggaagaaugaacuacuauuggacacugguggagcccggugacaaaauuacuuucgaagccaccggcaaccuagucguuccuagguacgcuuuuacaauggagcggaaugccggguccggaaucauaauuagcgauaccccagugcaugacugcaacacgacuugucagacaccggaaggcgcaaucaauaccucgcuccccuuccagaacauucacccuaucacuaucgguaagugcccaaaauauguaaagucuacaaagcugcgccuugcuaccgggcugagaaaugugcccuccauucagucaaggggauuguuuggcgccauagcgggcuucaucgaagggggauggacggguauggucgauggcugguacggguaucaucaccaaaacgagcagggaaguggcuacgccgcagaccucaaaagcacccagaaugcuauugacaagaucacaaacaaaguuaauuccgugauagaaaagaugaacacucaguuuaccgccguggguaaagaguucaaucaccuggaaaagcggauugagaacuuaaauaagaaagucgaugacggguuccuggauaucuggacauacaacgcugaacuccuugugcuguuggagaaugagcgcacucuagacuaucaugauucuaacguaaagaaccuguacgaaaaaguucgaaaucaacucaagaacaaugccaaagagaucggcaacggauguuuugaguucuaucacaagugcgacaauauguguauggaaagcgugaagaacggcaccuacgauuauccuaaauacucagaagaggcaaagcugaauagagagaaaauugacggggucaaacuugaaaguacaaggaucuaucagauucuggccauauacuccaccguggcuagcucuuugguccucgugguuucacugggagcgaucaguuuuuggaugugcagcaacgguuccuuacagugccggauuuguaucuga

SEQ ID NO: 139982 - RNA, 1701 nt, Artificial Sequence; identical to SEQ ID NO: 138088
  derived and/or modified CDS sequence (opt3) from hemagglutinin__InfluenzaA__AHV83809

SEQ ID NO: 139983 - RNA, 1701 nt, Artificial Sequence; identical to SEQ ID NO: 139069
  derived and/or modified CDS sequence (opt3) from hemagglutinin__InfluenzaA__AHV83810

SEQ ID NO: 139984 - RNA, 1701 nt, Artificial Sequence
  derived and/or modified CDS sequence (opt3) from hemagglutinin__InfluenzaA__AHV83812
augaaggccauccuggugguccuccuuuacaccuucacaacugcuaacgcagacacgcugugcauuggcuaucacgccaauaacagcaccgauacaguugacacuguguuggagaaaaauguaaccgugacacauuccgucaacuuacuggaagauaagcacaaugggaaacuauguaagcucagaggaguggcgccccugcaucuugguaaaugcaacauagcuggcuggauccuggggaauccugagugugaaucuuugucaaccgccaguagcugguccuacauuguugagacuucuucgucagacaacggaacaugcuauccaggcgauuuuaucaauuacgaagaacucagggagcagcugagcaguguguccucuuucgaacgguuugagauuuucccgaagaccagcuccuggcccaaccacgacucaaauaagggugucacggcagccuguccucaugcuggggcaaaaaguuuuuauaagaaccugaucuggcucgugaaaaagggaaauagcuacccaaaauuaucucaauccuauauaaacgauaagggcaaggaaguacugguucuuuggggcauccaccaccccucaacuaccgccgaccagcagagcuuguaccagaaugcugaugccuacguguucgucgggacaagucgcuauucuaaaaaguuuaaaccugagauugcgauccgaccaaaggugcgugaccaagagggaagaaugaacuacuauuggacucugguggaacccggugauaaaauuaccuucgaggcaacaggcaaccuagucguuccuagguacgccuuuaccauggaacggaaugcuggguccggaaucauaauuagcgacacgccagugcaugauugcaacacuacaugucagaccccggagggcgccaucaauacuucgcuccccuuccagaacauucacccuaucacaaucgguaagugcccaaaauauguaaagucuaccaagcugcgccuugcaacggggcugagaaaugugcccuccauucagucaaggggauuguuuggcgcuauagccggcuucaucgaagggggauggaccgguauggucgacggcugguacggguaucaucaccaaaacgagcagggaaguggcuacgcggccgaccucaaaagcacacagaaugcaauugauaagaucacuaacaaaguuaauuccgugauagagaagaugaacacccaguuuacagcuguggguaaagaguucaaucaccuggagaagcggauugaaaacuuaaauaagaaagucgacgauggguuccuggacaucuggacuuacaacgccgagcuccuugugcuguuggaaaaugagcgcacccuagauuaucaugacucuaacguaaagaaccuguacgagaaaguucgaaaucaacucaagaacaaugcuaaagaaaucggcaacggauguuuugaguucuaucacaagugcgauaauacauguauggaaagcgugaagaacggcaccuacgaguauccuaaauacucagaagaggccaagcugaauagagagaaaauugacggggucaaacuugaaaguacuaagaucuaucagauucuggcaauauacuccacgguggccagcucuuugguccucgugguuucacugggagcuaucaguuuuuggaugugcagcaacgguuccuuacagugcaggauuuguaucuga

SEQ ID NO: 139985 - RNA, 1701 nt, Artificial Sequence; identical to SEQ ID NO: 138088
  derived and/or modified CDS sequence (opt3) from hemagglutinin__InfluenzaA__AHV83813

SEQ ID NO: 139986 - RNA, 1701 nt, Artificial Sequence
  derived and/or modified CDS sequence (opt3) from hemagglutinin__InfluenzaA__AHV83814
augaaggccauccuggugguccuccuuuacaccuucgcuacagcaaacgccgacacucugugcauuggcuaucacgcgaauaacagcacggauaccguugacacaguguuggagaagaauguaacugugacccauuccgucaacuuacuggaagauaagcacaaugggaaacuauguaagcucagaggaguggcuccccugcaucuugguaaaugcaacauagccggcuggauccuggggaauccugagugugaaucuuugucaacagcaaguagcugguccuacauuguugagaccucuucgucagacaacggaacuugcuauccaggcgauuuuaucaauuacgaagaacucagggagcagcugagcaguguguccucuuucgaacgguuugagauuuucccgaagacaagcuccuggcccaaccacgacucaaauaagggugucaccgccgcuuguccucaugcaggggccaaaaguuuuuauaagaaccugaucuggcucgugaaaaagggaaauagcuacccaaaauuaucucaauccuauauaaacgauaagggcaaggaaguacugguucuuuggggcauccaccaccccucaacgacugcugaccagcagagcuuguaccagaaugccgaugcguacguguucgucgggaccagucgcuauucuaaaaaguuuaaaccugagauugcaauccgaccaaaggugcgugaccaagagggaagaaugaacuacuauuggacacugguggaacccggugauaaaauuacuuucgaggccaccggcaaccuagucguuccuagguacgcuuuuacaauggaacggaaugccggguccggaaucauaauuagcgacaccccagugcaugauugcaacacgacuugucagacaccggagggcgcaaucaauaccucgcuccccuuccagaacauucacccuaucacuaucgguaagugcccaaaauauguaaagucuacaaagcugcgccuugcuaccgggcugagaaaugugcccuccauucagucaaggggauuguuuggcgccauagcgggcuucaucgaagggggauggacggguauggucgacggcugguacggguaucaucaccaaaacgagcagggaaguggcuacgccgcagaccucaaaagcacccagaaugcuauugauaagaucacaaacaaaguuaauuccgugauagagaagaugaacacucaguuuaccgccguggguaaagaguucaaucaccuggagaagcggauugaaaacuuaaauaagaaagucgacgauggguuccuggacaucuggacauacaacgcugagcuccuugugcuguuggaaaaugagcgcaaccuagauuaucaugacucuaacguaaagaaucuguacgagaaaguucgaaaccaacucaagacuaaugccaaagaaaucggcaacggauguuuugaguucuaucacaagugcgauaauaccuguauggaaagcgugaagaacggcacauacgacuauccuaaauacucagaggaagcaaagcugaauagagagaaaauugauggggucaaacuugagaguaccaggaucuaucagauucuggccauauacuccacuguggcuagcucuuugguccucgugguuucacugggagcgaucaguuuuuggaugugcagcaacgguuccuuacagugccggauuuguaucuga

SEQ ID NO: 139987 - RNA, 1701 nt, Artificial Sequence; identical to SEQ ID NO: 139069
  derived and/or modified CDS sequence (opt3) from hemagglutinin__InfluenzaA__AHV83815

SEQ ID NO: 139988 - RNA, 1701 nt, Artificial Sequence; identical to SEQ ID NO: 138088
  derived and/or modified CDS sequence (opt3) from hemagglutinin__InfluenzaA__AHV83816

SEQ ID NO: 139989 - RNA, 1701 nt, Artificial Sequence
  derived and/or modified CDS sequence (opt3) from hemagglutinin__InfluenzaA__AHV83817
augaaggccauccuggugguccuccuuuacaccuucgcuacagcaaacgccgacacucugugcauuggcuaucacgcgaauaacagcacggauaccguugacacaguguuggagaaaaauguaacugugacccauuccgucaacuuacuggaagauaagcacaaugggaaacuauguaagcucagaggaguggcuccccugcaucuugguaaaugcaacauagccggcuggauccuggggaauccugagugugaaucuuugucaacagcaaguagcugguccuacauuguugagaccucuucgucagacaacggaacuugcuauccaggcgauuuuaucaauuacgaagaacucagggagcagcugagcaguguguccucuuucgaacgguuugagauuuucccgaagacaagcuccuggcccaaccacgacucaaauaagggugucaccgccgcuuguccucaugcaggggccaaaaguuuuuauaagaaccugguguggcucguaaagaagggaaauagcuacccaaaauuaucucaauccuauaucaacgauaagggcaaggaaguucuggugcuuuggggcauacaccaccccucaacgacugcugaccagcagagcuuguaccagaaugccgaugcguacgucuucguggggaccagucgcuauucuaaaaaguuuaaaccugagaucgcaauucgaccaaaggugcgugaccaagagggaagaaugaacuacuauuggacacuggucgaacccggugauaaaaucacuuucgaggccaccggcaaccuaguugugccuagguacgcuuuuacaauggaacggaaugccggguccggaauuaucauaagcgacaccccaguacaugauugcaacacgacuugucagacaccggagggcgcaauuaauaccucgcuccccuuccagaacauccacccuauuacuaucgguaagugcccaaaauaugugaagucuacaaagcugcgccuugcuaccgggcugagaaauguccccuccauccagucaaggggauuguuuggcgccauugcgggcuucauagaagggggauggacggguaugguggacggcugguacggguaucaucaccaaaacgagcagggaaguggcuacgccgcagaccucaaaagcacccagaaugcuaucgauaagauuacaaacaaaguuaauuccgugaucgagaagaugaacacucaguuuaccgccgucgguaaagaguucaaucaccuggagaagcggauagaaaacuuaaauaagaaaguggacgauggguuccuggacauuuggacauacaacgcugagcuccuuguacuguuggaaaaugagcgcacucuagauuaucaugacucuaacguuaagaaccuguacgagaaagugcgaaaucaacucaagaacaaugccaaagaaaucggcaacggauguuuugaguucuaucacaagugcgauaauaccuguauggaaagcgucaagaacggcacauacgacuauccuaaauacucagaggaagcaaagcugaauagagagaaaaucgauggggugaaacuugagaguaccaggauuuaucagauccuggccauuuacuccacugucgcuagcucuuuggugcucguugugucacugggagcgauaaguuuuuggaugugcagcaacgguuccuuacagugccggaucuguauuuga

SEQ ID NO: 139990 - RNA, 1701 nt, Artificial Sequence; identical to SEQ ID NO: 139968
  derived and/or modified CDS sequence (opt3) from hemagglutinin__InfluenzaA__AHV83818

SEQ ID NO: 139991 - RNA, 1701 nt, Artificial Sequence; identical to SEQ ID NO: 139950
  derived and/or modified CDS sequence (opt3) from hemagglutinin__InfluenzaA__AHV83819

SEQ ID NO: 139992 - RNA, 1701 nt, Artificial Sequence
  derived and/or modified CDS sequence (opt3) from hemagglutinin__InfluenzaA__AHV83821
augaaggccauccuggugguccuccuuuacaccuucgcuacagcaaacgccgacacucugugcauuggcuaucacgcgaauaacagcacggauaccguugacacaguguuggagaaaaauguaacugugacccauuccgucaacuuacuggaagauaagcacaaugggaaacuauguaagcucagaggagugucuccccugcaucuugguaaaugcaacauagcuggcuggauccuggggaauccugagugugaaucauugaguacagccagcuccuggucuuacauuguugagaccucgucaagcgacaacggaacuugcuauccaggcgauuuugugaauuacgaagaacucagggagcagcugaguuccgucucuagcuucgaacgguuugagaucuucccgaagacauccucauggcccaaccacgacaguaauaagggugugaccgcagccuguccucaugcuggggcaaagagcuuuuauaagaaccugauuuggcucguuaaaaagggaaauucuuacccaaaauuaucccaaucauauaucaacgauaagggcaaggaaguacuggugcuuuggggcauacaccaccccagcacgacugccgaccagcagaguuuguaccagaaugcugaugccuacgucuucguggggaccucucgcuauuccaaaaaguuuaaaccugagaucgcgauucgaccaaaggugcgugaccaagagggaagaaugaacuacuauuggacacuggucgaacccggugauaaaaucacuuucgaggcaaccggcaaccuaguugugccuagguacgccuuuacaauggaacggaaugcugggagcggaauuaucauaucggacaccccaguacauaacugcaauacgacuugucagacaccggagggcgccauuaacaccucucuccccuuccagaauauccacccuauuacuaucgguaagugcccaaaauaugugaaguccacaaagcugcgccuugcaaccgggcugagaaacguccccucaauccagaguaggggauuguuuggcgcuauugccggcuucauagaagggggauggacggguaugguggauggcugguacggguaucaucaccaaaaugagcagggaagcggcuacgcggccgaccucaaauccacccagaacgcaaucgacaagauuacaaauaaaguuaacucugugaucgagaagaugaauacucaguuuaccgcugucgguaaagaguucaaccaccuggagaagcggauagaaaauuuaaacaagaaaguggaugacggguuccuggauauuuggacauacaaugccgagcuccuuguacuguuggaaaacgagcgcacucuagacuaucaugauagcaacguuaagaaucuguacgagaaagugcgaaaccaacucaagaauaacgcuaaagaaaucggcaauggauguuuugaguucuaucacaagugcgacaacaccuguauggaaucagucaagaauggcacauacgauuauccuaaauacagugaggaagccaagcugaacagagagaaaaucgacggggugaaacuugaguccaccaggauuuaucagauccuggcaauuuacagcacugucgccucuucauuggugcucguugugagucugggagcuaucagcuuuuggaugugcuccaaugguucuuuacagugccggauauguauuuga

SEQ ID NO: 139993 - RNA, 1701 nt, Artificial Sequence
  derived and/or modified CDS sequence (opt3) from hemagglutinin__InfluenzaA__AHV83822
augaaggccauccuggugguccuccuuuacaccuucgcuacagcaaacgccgacacucugugcauuggcuaucacgcgaauaacagcacggauaccguugacacaguguuggagaaaaauguaacugugacccauuccgucaacuuacuggaagauaagcacaaugggaaacuauguaagcucagaggagugucuccccugcaucuugguaaaugcaacauagcuggcuggauccuggggaauccugagugugaaucauugaguacagccagcuccuggucuuacauuguugagaccucgucaagcgacaacggaacuugcuauccaggcgauuuugugaauuacgaagaacucagggagcagcugaguuccgucucuagcuucgaacgguuugagaucuucccgaagacauccucauggcccaaccacgacaguaauaagggugugaccgcagccuguccucaugcuggggcaaagagcuuuuauaagaaccugauuuggcucguuaaaaagggaaauucuuacccaaaauuaucccaaucauauaucaacgauaagggcaaggaaguacuggugcuuuggggcauacaccaccccagcacgacugccgaccagcagaguuuguaccagaaugcugaugccuacgucuucguggggaccucucgcuauuccaaaaaguuuaaaccugagaucgcgauucgaccaaaggugcgugaccaagagggaagaaugaacuacuauuggacacuggucgaacccggugauaaaaucacuuucgaggcaaccggcaaccuaguugugccuagguacgccuuuacaauggaacggaaugcugggagcggaauuaucauaucggacaccccaguacaugauugcaacacgacuugucagacaccggagggcgccauuaauaccucucuccccuuccagaacauccacccuauuacuaucgguaagugcccaaaauaugugaaguccacaaagcugcgccuugcaaccgggcugagaaauguccccucaauccagaguaggggauuguuuggcgcuauugccggcuucauagaagggggauggacggguaugguggacggcugguacggguaucaucaccaaaacgagcagggaagcggcuacgcggccgaccucaaauccacccagaaugcaaucgauaagauuacaaacaaaguuaauucuaucauagagaagaugaacacucaguuuaccgcuguggguaaagaguucaaucaccuggagaagcggauugaaaacuuaaauaagaaagucgacgauggguuccuggacaucuggacauacaacgccgagcuccuugugcuguuggaaaaugagcgcacucuagauuaucaugacagcaacguaaagaaccuguacgagaaaguucgaaaucaacucaagaacaaugcuaaagaaaucggcaacggauguuuugaguucuaucacaagugcgauaauaccuguauggaaucagugaagaacggcacauacgacuauccuaaauacagugaggaagccaagcugaauagagagaaaauugauggggucaaacuugaguccaccaggaucuaucagauucuggcaauauacagcacuguggccucuucauugguccucgugguuagucugggagcuaucagcuuuuggaugugcuccaacgguucuuuacagugccggauuuguaucuga

SEQ ID NO: 139994 - RNA, 1701 nt, Artificial Sequence
  derived and/or modified CDS sequence (opt3) from hemagglutinin__InfluenzaA__AHV83823
augaaggccauccuggugguccuccuuuacaccuucgcuacagcaaacgccgacacucugugcauuggcuaucacgcgaauaacagcacggauaccguugacacaguguuggagaaaaauguaacugugacccauuccgucaacuuacuggaagauaagcacaaugggaaacuauguaagcucagaggaguggcuccccugcaucuugguaaaugcaacauagccggcuggauccuggggaauccugagugugaaucuuugucaacagcaaguagcugguccuacauuguugagaccucuucgucagacaacggaacuugcuauccaggcgauuuuaucaauuacgaagaacucagggagcagcugagcaguguguccucuuucgaacgguuugagauuuucccgaagacaagcuccuggcccaaccacgacucaaauaagggugucaccgccgcuuguccucaugcaggggccaaaaguuuuuauaagaaccugaucuggcucgugaaaaagggaaauagcuacccaaaaauaucucaauccuauaucaacgauaagggcaaggaaguauuaguucuguggggcauucaccaccccucaacgacugcugaccagcagagccuuuaccagaaugccgaugcguacguguucgucgggaccagucgcuauucuaaaaaguuuaaaccugagaucgcaauucgaccaaaggugcgugaccaagagggaagaaugaacuacuauuggacauugguggaacccggugauaaaaucacuuucgaggccaccggcaaccuggucguuccuagguacgcuuuuacaauggaacggaauaccggguccggaauaauuaucagcgacacgccagugcaugauugcaacacuacaugucagaccccggagggcgccauuaauacuucgcuacccuuccagaacauccacccuaucacaauugguaagugcccaaaauauguaaagucuaccaagcuccgccuggcaacggggcuuagaaaugugcccuccauacagucaaggggacuguuuggcgcuaucgccggcuucauugaagggggauggaccgguauggucgacggcugguacggguaucaucaccaaaacgagcagggaaguggcuacgcggccgacuugaaaagcacacagaaugcaaucgauaagauaacuaacaaaguuaauuccgugauugagaagaugaacacccaguuuacagcuguggguaaagaguucaaucaccucgagaagcggaucgaaaaccugaauaagaaagucgacgauggguucuuagacaucuggacuuacaacgccgagcugcucgugcuucuggaaaaugagcgcaccuuggauuaucaugacucuaacguaaagaaccuauacgagaaaguucgaaaucaacugaagaacaaugcuaaagaaauuggcaacggauguuuugaguucuaucacaagugcgauaauacauguauggaaagcgugaagaacggcaccuacgacuauccuaaauacucagaggaagccaagcucaauagagagaaaaucgauggggucaagcuggagaguacuaggauuuaucagauacuugcaaucuacuccacgguggccagcucucuggucuuggugguuucacucggagcuauuaguuuuuggaugugcagcaacgguucccugcagugccggaucuguaucuga

SEQ ID NO: 139995 - RNA, 1701 nt, Artificial Sequence
  derived and/or modified CDS sequence (opt3) from hemagglutinin__InfluenzaA__AHV83824
augaaggccauccuggugguccuccuuuacaccuucgcuacagcaaacgccgacacucugugcauuggcuaucacgcgaauaacagcacggauaccguugacacaguguuggagaagaauguaacugugacccauuccgucaacuuacuggaagauaagcacaaugggaaacuauguaagcucagaggaguggcuccccugcaucuugguaaaugcaacauagccggcuggauccuggggaauccugagugugaaucuuugucaacagcaaguagcugguccuacauuguugagaccucuucgucagacaacggaacuugcuauccaggcgauuuuaucaauuacgaagaacucagggagcagcugagcaguguguccucuuucgaacgguuugagauuuucccgaagacaagcuccuggcccaaccacgacucaaauaagggugucaccgccgcuuguccucaugcaggggccaaaaguuuuuauaagaaccugaucuggcucgugaaaaagggaaauagcuacccaaaauuacgccaaucuuauauaaacgauaagggcaaggaaguacugguucuuuggggcauccaccaccccuccacgacuaccgaccagcagucauuguaccagaaugcugaugccuacguguucgucgggacaagccgauauaguaaaaaguuuaaaccugagauugcgauccguccaaaggugagagaccaagagggaaggaugaacuacuauuggacucugguggaacccggugauaaaauuaccuucgaggcaacaggcaaccuagucguuccucgguacgccuuuaccauggaacgcaaugcugggucuggaaucauaauuuccgacacgccagugcaugauugcaacacuacaugucagaccccggagggcgccaucaauacuagccuccccuuccagaacauucacccuaucacaaucgguaagugcccaaaauauguaaagucgaccaagcugagacuugcaacggggcugaggaaugugcccucuauucagucccggggauuguuuggcgcuauagccggcuucaucgaagggggauggaccgguauggucgacggcugguacggguaucaucaccaaaacgagcagggaucaggcuacgcggccgaccucaaaaguacacagaaugcaauugauaagaucacuaacaaagugaauagcguuauagagaagaugaacacccaguuuacagcuguggguaaagaguucaaucaccuggagaagcgcauugaaaacuuaaauaagaaagucgacgauggguuccuggacaucuggacuuacaacgccgagcuccuugugcuguuggaaaaugagcgaaaccuagauuaucaugacuccaacguaaagaaucuguacgagaaaguuagaaaccaacucaagaauaacgcuaaagaaaucggcaauggauguuuugaguucuaucacaagugcgauaacaccuguauggaaucugugaagaauggcacauacgacuauccuaaauacagcgaggaagccaagcugaacagggagaaaauugauggggucaaacuugagucaacccggaucuaucagauucuggcaauauacaguacuguggccuccagcuugguccucgugguuucucugggagcuaucucauuuuggaugugcaguaaugguagcuuacagugccguauuuguaucuga

SEQ ID NO: 139996 - RNA, 1701 nt, Artificial Sequence; identical to SEQ ID NO: 139968
  derived and/or modified CDS sequence (opt3) from hemagglutinin__InfluenzaA__AHV83825

SEQ ID NO: 139997 - RNA, 1701 nt, Artificial Sequence
  derived and/or modified CDS sequence (opt3) from hemagglutinin__InfluenzaA__AHV83826
augaaggccauccuggugguccuccuuuacaccuucgcuacagcaaacgccgacacucugugcauuggcuaucacgcgaauaacagcacggauaccguugacacaguguuggagaagaauguaacugugacccauuccgucaacuuacuggaagauaagcacaaugggaaacuauguaagcucagaggaguggcuccccugcaucuugguaaaugcaacauagccggcuggauccuggggaauccugagugugaaucuuugucaacagcaaguagcugguccuacauuguugagaccucuucgucagacaacggaacuugcuauccaggcgauuuuaucaauuacgaagaacucagggagcagcugagcaguguguccucuuucgaacgguuugagauuuucccgaagacaagcuccuggcccaaccacgacucaaauaagggugucaccgccgcuuguccucaugcaggggccaaaaguuuuuauaagaaccugaucuggcucgugaaaaagggaaauagcuacccaaaauuaucucaauccuauuucaacgauaagggcaaggaaguacugguucuuuggggcauacaccaccccucaacgacugcugaccagcagagcuuguaccagaaugccgaugcguacguguuugucgggaccagucgcuauucuaaaaaguucaaaccugagaucgcaauucgaccaaaggugcgugaccaagagggaagaaugaacuacuauuggacacugguggaacccggugauaaaaucacuuuugaggccaccggcaaccuagucguuccuagguacgcuuucacaauggaacggaaugccggguccggaauuaucauaagcgacaccccagugcaugauugcaacacgacuugucagacaccggagggcgcaauuaauaccucgcuccccuuucagaacauccacccuauuacuaucgguaagugcccaaaauauguaaagucuacaaagcugcgccuugcuaccgggcugagaaaugugcccuccauccagucaaggggauuguucggcgccauugcgggcuuuauagaagggggauggacggguauggucgacggcugguacggguaucaucaccaaaacgagcagggaaguggcuacgccgcagaccucaaaagcacccagaaugcuaucgauaagauuacaaacaaaguuaauuccgugaucgagaagaugaacacucaguucaccgccguggguaaagaguucaaucaccuggagaagcggauagaaaacuuaaauaagaaagucgacgauggguuucuggacauuuggacauacaacgcugagcuccuugugcuguuggaaaaugagcgcacucuagauuaucaugacucuaacguaaagaaccuguacgagaaaguucgaaaucaacucaagaacaaugccaaagaaaucggcaacggauguuucgaguuuuaucacaagugcgauaauaccuguauggaaagcgugaagaacggcacauacgacuauccuaaauacucagaggaagcaaagcugaauagagagaaaaucgauggggucaaacuugagaguaccaggauuuaucagauccuggccauuuacuccacugcugcgagcucuuuggugcucgucgugucacugggagcaauaaguuucuggaugugcagcaacgguuccuuacagugccggaucuguauuuga

SEQ ID NO: 139998 - RNA, 1701 nt, Artificial Sequence; identical to SEQ ID NO: 138088
  derived and/or modified CDS sequence (opt3) from hemagglutinin__InfluenzaA__AHV83827

SEQ ID NO: 139999 - RNA, 1701 nt, Artificial Sequence; identical to SEQ ID NO: 138088
  derived and/or modified CDS sequence (opt3) from hemagglutinin__InfluenzaA__AHV83828

SEQ ID NO: 140000 - RNA, 1701 nt, Artificial Sequence
  derived and/or modified CDS sequence (opt3) from hemagglutinin__InfluenzaA__AHV83829
auggaggccauccuggugguccuccuuuacaccuucgcuacagcaaacgccgacacucugugcauuggcuaucacgcgaauaacagcacggauaccguugacacaguguuggaaaagaauguaacugugacccauuccgucaacuuacuggaggauaaacacaaugggaagcuauguaaacucagaggaguggcuccccugcaucuugguaagugcaacauagccggcuggauccuggggaauccugaaugugagucuuugucaacagcaaguagcugguccuacauuguugaaaccucuucgucagacaacggaacuugcuauccaggcgauuuuaucaauuacgaggagcucagggaacagcugagcaguguguccucuuucgagcgguuugaaauuuucccgaaaacaagcuccuggcccaaccacgacucaaauaagggugucaccgccgcuuguccucaugcaggggccaagaguuuuuauaaaaaccugaucuggcucgugaagaaaggaaauagcuacccaaagauaucucaauccuauaucaacgauaaaggcaaggagguauuaguucuguggggcauucaccaccccucaacgacugcugaccagcagagccuuuaccagaaugccgaugcguacguguucgucgggaccagucgcuauucuaagaaauuuaagccugagaucgcaauucgaccaaaagugcgugaccaagaaggaagaaugaacuacuauuggacauugguggagcccggugauaagaucacuuucgaagccaccggcaaccuggucguuccuagguacgcuuuuacaauggagcggaaugccggguccggaauaauuaucagcgacaccccagugcaugauugcaacacgacuugucagacaccggaaggcgcaauuaauaccucgcuacccuuccagaacauccacccuaucacuauugguaaaugcccaaaguauguaaaaucuacaaagcuccgccuggcuaccgggcuuagaaaugugcccuccauacagucaaggggacuguuuggcgccaucgcgggcuucauugaagggggauggacggguauggucgacggcugguacggguaucaucaccaaaacgagcagggaaguggcuacgccgcagacuugaaaagcacccagaaugcuaucgauaaaauaacaaacaagguaaauuccguuauugaaaagaugaacacucaguuuaccgccguggguaaggaguucaaucaccucgaaaaacggaucgagaaccugaauaagaaggucgacgauggguucuuagacaucuggacauacaacgcugaacugcucgugcuucuggagaaugagcgcacuuuggauuaucaugacucuaacgugaaaaaccuauacgaaaagguucgaaaucaacugaaaaacaaugccaaggagauuggcaacggauguuuugaguucuaucacaaaugcgauaauaccuguauggagagcgugaagaacggcacauacgacuauccuaaguacucagaagaggcaaaacucaauagagagaagaucgauggggucaaacuggaaaguaccaggauuuaucagauacuugccaucuacuccacuguggcuagcucucuggucuuggugguuucacucggagcgauuaguuuuuggaugugcagcaacgguucccugcagugccggaucuguaucuga

SEQ ID NO: 140001 - RNA, 1701 nt, Artificial Sequence; identical to SEQ ID NO: 138088
  derived and/or modified CDS sequence (opt3) from hemagglutinin__InfluenzaA__AHV83830

SEQ ID NO: 140002 - RNA, 1701 nt, Artificial Sequence
  derived and/or modified CDS sequence (opt3) from hemagglutinin__InfluenzaA__AHV83831
augaaggccauccuggugguccuccuuuacaccuucgcuacagcaaacgccgacacucugugcauuggcuaucacgcgaauaacagcacggauaccguugacacaguguuggagaagaauguaacugugacccauuccgucaacuuacuggaagauaagcacaaugggaaacuauguaagcucagaggaguggcuccccugcaucuugguaaaugcaacauagccggcuggauccuggggaauccugagugugaaucuuugucaacagcaaguagcugguccuacauuguugagaccucuucgucagacaacggaacuugcuauccaggcgauuuuaucaauuacgaagaacucagggagcagcugagcaguguguccucuuucgaacgguuugagauuuucccgaagacaagcuccuggcccaaccacgacucaaauaagggugucaccgccgcuuguccucaugcaggggccaaaaguuuuuauaagaaccugaucuggcucgugaaaaagggaaauagcuacccaaaauuaucucaauccuauauaaacgauaagggcaaggaaguacugguucuuuggggcauccaccaccccucaacgauugcugaccagcagagcuuguaccagaaugccgaugcguacguguucgucgggaccagucgcuauucuaaaaaguuuaaaccugagaucgcaauucgaccaaaggugcgugaccaagagggaagaaugaacuacuauuggacucugguggaacccggugauaaaaucacauucgaggccacuggcaaccuagucguuccuagguacgcuuuuaccauggaacggaaugccggguccggaauaauugugagcgacacaccaguacaugauugcaacaccacgugucagacuccggagggcgcaaucaauacaucgcuccccuuccagaacauucacccuaucaccaucgguaagugcccaaaauaugugaagucuacuaagcugcgccuugcuacagggcugagaaauguccccuccauucagucaaggggauuguuuggcgccauagcgggcuucaucgaagggggauggaccgguaugguggacggcugguacggguaucaucaccaaaacgagcagggaaguggcuacgccgcagaccucaaaagcacgcagaaugcuauugauaagaucaccaacaaaguuaauuccgugauagagaagaugaacacacaguuuacugccgucgguaaagaguucaaucaccuggagaagcggauugaaaacuuaaauaagaaaguggacgauggguuccuggacaucuggaccuacaacgcugagcuccuuguacuguuggaaaaugagcgcacacuagauuaucaugacucuaacguuaagaaccuguacgagaaagugcgaaaucaacucaagaacaaugccaaagaaaucggcaacggauguuuugaguucuaucacaagugcgauaauacuuguauggaaagcgucaagaacggcaccuacgacuauccuaaauacucagaggaagcaaagcugaauagagagaaaauugauggggugaaacuugagaguacaaggaucuaucagauucuggccauauacuccaccgucgcuagcucuuuggugcucguugugucacugggagcgaucaguuuuuggaugugcagcaacgguuccuuacagugccggauuuguaucuga

SEQ ID NO: 140003 - RNA, 1701 nt, Artificial Sequence; identical to SEQ ID NO: 139051
  derived and/or modified CDS sequence (opt3) from hemagglutinin__InfluenzaA__AHV83832

SEQ ID NO: 140004 - RNA, 1701 nt, Artificial Sequence; identical to SEQ ID NO: 138088
  derived and/or modified CDS sequence (opt3) from hemagglutinin__InfluenzaA__AHV83833

SEQ ID NO: 140005 - RNA, 1701 nt, Artificial Sequence; identical to SEQ ID NO: 139069
  derived and/or modified CDS sequence (opt3) from hemagglutinin__InfluenzaA__AHV83834

SEQ ID NO: 140006 - RNA, 1701 nt, Artificial Sequence
  derived and/or modified CDS sequence (opt3) from hemagglutinin__InfluenzaA__AHV83836
augaaggccauccuggugguccuccuuuacaccuucgcuacagcaaacgccgacacucugugcauuggcuaucacgcgaauaacagcacggauaccguugacacaguguuggagaaaaauguaacugugacccauuccgucaacuuacuggaagauaagcacaaugggaaacuauguaagcucagaggaguggcuccccugcaucuugguaaaugcaacauagccggcuggauccuggggaauccugagugugaaucuuugucaacagcaaguagcugguccuacauuguugagaccucuucgucagacaacggaacuugcuauccaggcgauuuuaucaauuacgaagaacucagggagcagcugagcaguguguccucuuucgaacgguuugagauuuucccgaagacaagcuccuggcccaaccacgacucaaauaagggugucaccgccgcuuguccucaugcaggggccaaaaguuuuuauaagaaccugaucuggcucgugaaaaaggaaaauagcuacccaaaauuacgccaaucuuauauaaacgauaagggaaaggagguacugguucuuuggggcauccaccaccccuccacgacuaccgaccagcagucauuguaccagaaugcugaugccuacguguucgucggcacaagccgauauaguaaaaaguuuaaaccugagauugcgauccguccaaaggugagagaccaagaagggaggaugaacuacuauuggacucugguggagcccggagauaaaauuaccuucgaagcaacagguaaccuagucguuccucgguacgccuuuaccauggagcgcaaugcuggcucugggaucauaauuuccgacacgccagugcaugauugcaacacuacaugucagaccccggaaggagccaucaauacuagccuccccuuccagaacauucacccuaucacaaucggcaagugcccaaaauauguaaagucgaccaagcugagacuugcaacgggucugaggaaugugcccucuauucagucccggggguuguuuggagcuauagccggcuucaucgagggcggguggaccggaauggucgacgguugguacggcuaucaucaccaaaacgagcaggggucaggauacgcggccgaccucaaaaguacacagaaugcaauugauaagaucacuaacaaagugaauagcguuauagaaaagaugaacacccaguuuacagcugugggcaaagaguucaaucaccuggaaaagcgcauugagaacuuaaauaagaaagucgacgaugguuuccuggacaucuggacuuacaacgccgaacuccuugugcuguuggagaaugagcgaacccuagauuaucaugacuccaacguaaagaaccuguacgaaaaaguuagaaaucaacucaagaacaaugcuaaagagaucgggaacggcuguuuugaguucuaucacaagugcgauaauacauguauggagucugugaagaacggaaccuacgacuauccuaaauacagcgaagaggccaagcugaauagggagaaaauugauggcgucaaguuagaaucaacucggaucuaucagauucuggcaauauacaguacgguggccuccagcuugguccucgugguuucucugggggcuaucucauuuuggaugugcaguaacggaagccuucagugccguauuuguaucuga

SEQ ID NO: 140007 - RNA, 1701 nt, Artificial Sequence; identical to SEQ ID NO: 139955
  derived and/or modified CDS sequence (opt3) from hemagglutinin__InfluenzaA__AHV83837

SEQ ID NO: 140008 - RNA, 1701 nt, Artificial Sequence; identical to SEQ ID NO: 138088
  derived and/or modified CDS sequence (opt3) from hemagglutinin__InfluenzaA__AHV83838

SEQ ID NO: 140009 - RNA, 1701 nt, Artificial Sequence; identical to SEQ ID NO: 139051
  derived and/or modified CDS sequence (opt3) from hemagglutinin__InfluenzaA__AHV83839

SEQ ID NO: 140010 - RNA, 1701 nt, Artificial Sequence; identical to SEQ ID NO: 139069
  derived and/or modified CDS sequence (opt3) from hemagglutinin__InfluenzaA__AHV83840

SEQ ID NO: 140011 - RNA, 1701 nt, Artificial Sequence
  derived and/or modified CDS sequence (opt3) from hemagglutinin__InfluenzaA__AHV83841
augaaggccauccuggugguccuccuuuacaccuucgcuacagcaaacgccgacacucugugcauuggcuaucacgcgaauaacagcacggauaccguugacacaguguuggagaagaauguaacugugacccauuccgucaacuuacuggaagauaagcacaaugggaaacuauguaagcucagaggaguggcuccccugcaucuugguaaaugcaacauagccggcuggauccuggggaauccugagugugaaucuuugucaacagcaaguagcugguccuacauuguugagaccucuucgucagacaacggaacuugcuauccaggcgauuuuaucaauuacgaagaacucagggagcagcugagcaguguguccucuuucgaacgguuugagauuuucccgaagacaagcuccuggcccaaccacgacucaaauaagggugucaccgccgcuuguccucaugcaggggccaaaaguuuuuauaagaaccugaucuggcucgugaaaaagggaaauagcuacccaaaauuacgccaaucuuauauaaacgauaagggcaaggaaguacugguucuuuggggcauccaccaccccuccacgacuaccgaccagcagucauuguaccagaaugcugaugccuacguguucgucgggacaagccgauauaguaaaaaguuuaaaccugagauugcgauccguccaaaggugagagaccaagagggaaggaugaacuacuauuggacucugguggaacccggugauaaaauuaccuucgaggcaacaggcaaccuagucguuccucgguacgccuuuaccauggaacgcaaugcugggucuggaaucauaauuuccgacacgccagugcauaacugcaauacuacaugucagaccccggagggcgccaucaacacuagccuccccuuccagaauauucacccuaucacaaucgguaagugcccaaaauauguaaagucgaccaagcugagacuugcaacggggcugaggaacgugcccucuauucagucccggggauuguuuggcgcuauagccggcuucaucgaagggggauggaccgguauggucgauggcugguacggguaucaucaccaaaaugagcagggaucaggcuacgcggccgaccucaaaaguacacagaacgcaauugacaagaucacuaauaaagugaacagcguuauagagaagaugaauacccaguuuacagcuguggguaaagaguucaaccaccuggagaagcgcauugaaaauuuaaacaagaaagucgaugacggguuccuggauaucuggacuuacaaugccgagcuccuugugcuguuggaaaacgagcgaacccuagacuaucaugauuccaacguaaagaaucuguacgagaaaguuagaaaccaacucaagaauaacgcuaaagaaaucggcaauggauguuuugaguucuaucacaagugcgacaacacauguauggaaucugugaagaauggcaccuacgauuauccuaaauacagcgaggaagccaagcugaacagggagaaaauugacggggucaaacuugagucaacucggaucuaucagauucuggcaauauacaguacgguggccuccagcuugguccucgugguuucucugggagcuaucucauuuuggaugugcaguaaugguagcuuacagugccguauuuguaucuga

SEQ ID NO: 140012 - RNA, 1701 nt, Artificial Sequence; identical to SEQ ID NO: 138088
  derived and/or modified CDS sequence (opt3) from hemagglutinin__InfluenzaA__AHV83842

SEQ ID NO: 140013 - RNA, 1701 nt, Artificial Sequence; identical to SEQ ID NO: 138088
  derived and/or modified CDS sequence (opt3) from hemagglutinin__InfluenzaA__AHV83843

SEQ ID NO: 140014 - RNA, 1701 nt, Artificial Sequence; identical to SEQ ID NO: 138088
  derived and/or modified CDS sequence (opt3) from hemagglutinin__InfluenzaA__AHV83844

SEQ ID NO: 140015 - RNA, 1701 nt, Artificial Sequence
  derived and/or modified CDS sequence (opt3) from hemagglutinin__InfluenzaA__AHV83845
augaaggccauccuggugguccuccuuuacaccuucgcuacagcaaacgccgacacucugugcauuggcuaucacgcgaauaacagcacggauaccguugacacaguguuggagaagaauguaacugugacccauuccgucaacuuacuggaagauaagcacaaugggaaacuauguaagcucagaggaguggcuccccugcaucuugguaaaugcaacauagccggcuggauccuggggaauccugagugugaaucuuugucaacagcaaguagcugguccuacauuguugagaccucuucgucagacaacggaacuugcuauccaggcgauuuuaucaauuacgaagaacucagggagcagcugagcaguguguccucuuucgaacgguuugagauuuucccgaagacaagcuccuggcccaaccacgacucaaauaagggugucaccgccgcuuguccucaugcaggggccaaaaguuuuuauaagaaccugaucuggcucgugaaaaagggaaauagcuacccaaaauuaucucaauccuauauaaacgauaagggcaaggaaguacugguucuuuggggcauccaccaucccccuacgacugcugaccagcagucauuguaccagaaugccgaugcguacguguucgucgggaccagccgcuauaguaaaaaguuuaaaccagagauugcaauccgacccaaggugcgugaccaagagggaagaaugaacuacuauuggacacugguggaaccuggugauaaaauuacuuucgaggccaccggcaaccuagucguuccaagguacgcuuuuacaauggaacggaaugccgggucuggaaucauaauuuccgacaccccggugcacgauugcaacacgacuugucagacacccgagggcgcaaucaauaccagccucccuuuccagaacauucacccaaucacuaucgguaagugccccaaauauguaaagucgacaaagcugcgccuugcuaccgggcugagaaaugugccuucuauucaguccaggggauuguuuggcgccauagcgggcuucaucgaagggggauggacggguauggucgacggcugguacggguaucaucaccaaaacgagcagggaucaggcuacgccgcagaccucaaaaguacccagaaugcuauugauaagaucacaaacaaagugaauagcguuauagagaagaugaacacucaguuuaccgccguggguaaagaguucaaucaccuggagaagcggauugaaaacuuaaauaagaaagucgacgauggguuccuggacaucuggacauacaacgcugagcuccuugugcuguuggaaaaugagcgcacucuagauuaucaugacuccaacguaaagaaccuguacgagaaaguucgaaaucaacucaagaacaaugccaaagaaaucggcaacggauguuuugaguucuaucacaagugcgauaauaccuguauggaaucugugaagaacggcacauacgacuauccaaaauacagcgaggaagcaaagcugaauagagagaaaauugauggggucaaacuugagucaaccaggaucuaucagauucuggccauauacaguacugcugcguccagcuuggugcucgucgugucucugggagcaaucucauuuuggaugugcaguaacgguagcuuacagugccggauuuguaucuga

SEQ ID NO: 140016 - RNA, 1701 nt, Artificial Sequence; identical to SEQ ID NO: 138088
  derived and/or modified CDS sequence (opt3) from hemagglutinin__InfluenzaA__AHV83846

SEQ ID NO: 140017 - RNA, 1701 nt, Artificial Sequence; identical to SEQ ID NO: 138088
  derived and/or modified CDS sequence (opt3) from hemagglutinin__InfluenzaA__AHV83847

SEQ ID NO: 140018 - RNA, 1701 nt, Artificial Sequence; identical to SEQ ID NO: 138088
  derived and/or modified CDS sequence (opt3) from hemagglutinin__InfluenzaA__AHV83848

SEQ ID NO: 140019 - RNA, 1701 nt, Artificial Sequence; identical to SEQ ID NO: 139941
  derived and/or modified CDS sequence (opt3) from hemagglutinin__InfluenzaA__AHV83849

SEQ ID NO: 140020 - RNA, 1701 nt, Artificial Sequence
  derived and/or modified CDS sequence (opt3) from hemagglutinin__InfluenzaA__AHV83850
augaaggccauccuggugguccuccuuuacaccuucgcuacaacuaacgcagacacgcugugcauuggcuaucacgccaauaacagcaccgauacaguugacacuguguuggagaaaaauguaaccgugacacauuccgucaacuuacuggaagauaagcacaaugggaaacuauguaagcucagaggaguggcgccccugcaucuugguaaaugcaacauagcuggcuggauccuggggaauccugagugugaaucuuugucaaaggccaguagcugguccuacauuguugagaccucuucgucagacaacggaacuugcuauccaggcgauuuuaucaauuacgaagaacucagggagcagcugagcaguguguccucuuucgaacgguuugagauuuucccgaagacaagcuccuggcccaaccacgacucaaauaaaggugucaccgcagccuguccucaugcuggggcaaagaguuuuuauaaaaaccugaucuggcucgugaagaaaggaaauagcuacccaaaguuaucucaauccuauauaaacgauaagggcaaagaaguacugguucuuuggggcauccaccaccccucaacgacugccgaccagcagagcuuguaccagaaugcugaugccuacguguucgucgggaccagucgcuauucuaagaaauuuaagccugagauugcgauccgaccaaaagugcgugaccaagagggaagaaugaacuacuauuggacacugguggaacccggugauaagauuacuuucgaggcaaccggcaaccuagucguuccuagguacgccuuuacaauggaacggaaugcuggguccggaaucauaauuagcgacaccccagugcaugauugcaacacgacuugucagacaccggagggcgccaucaauaccucgcuccccuuccagaacauucacccuaucacuaucgguaaaugcccaaaguauguaaagucuacaaaacugcgccuugcaaccgggcugagaaaugugcccuccauucagucaaggggauuguuuggcgcuauagccggcuucaucgaagggggauggacggguauggucgacggcugguacggguaucaucaccaaaacgagcagggaaguggcuacgcggccgaccucaagagcacccagaaugcaauugauaaaaucacaaacaagguaaauuccguuauagagaaaaugaacacucaguuuaccgcuguggguaaggaguucaaucaccuggagaagcggauugaaaacuuaaauaaaaaggucgacgauggguuccuggacaucuggacauacaacgccgagcuccuugugcuguuggaaaaugagcgcacucuagauuaucaugacucuaacgugaaaaaccuguacgagaagguucgaaaucaacucaaaaacaaugcuaaggaaaucggcaacggauguuuugaguucuaucacaagugcgauaauaccuguauggaaagcgugaaaaacggcacauacgacuauccuaaguacucagaggaagccaaacugaauagagagaagauugauggggucaaacuugagaguaccaggaucuaucagauucuggcaauauacuccacuguggccagcucuuugguccucgugguuucacugggagcuaucaguuuuuggaugugcagcaacgguuccuuacagugccggauuuguaucuga

SEQ ID NO: 140021 - RNA, 1701 nt, Artificial Sequence; identical to SEQ ID NO: 138088
  derived and/or modified CDS sequence (opt3) from hemagglutinin__InfluenzaA__AHV83851

SEQ ID NO: 140022 - RNA, 1701 nt, Artificial Sequence; identical to SEQ ID NO: 138088
  derived and/or modified CDS sequence (opt3) from hemagglutinin__InfluenzaA__AHV83852

SEQ ID NO: 140023 - RNA, 1701 nt, Artificial Sequence
  derived and/or modified CDS sequence (opt3) from hemagglutinin__InfluenzaA__AHV83853
augaaggccauccuggugguccuccuuuacaccuucgcuacagcaaacgccgacacucugugcauuggcuaucacgcgaauaacagcacggauaccguugacacaguguuggagaaaaauguaacugugacccauuccgucaacuuacuggaagauaagcacaaugggaaacuauguaagcucagaggaguggcuccccugcaucuugguaaaugcaacauagccggcuggauccuggggaauccugagugugaaacauugucuaccgcaucaaguuggagcuacauuguugagacuuccucuucggacaacggaacaugcuauccaggcgauuuuaucgacuacgaagaacucagggagcagcugucaagcgugaguuccuucgaacgguuugagauuuucccgaagaccucuagcuggcccaaucacgauuccaacaagggugucacggccgcuuguccucaugcaggggccaaaggauuuuauaagaaucugaucuggcucgugaaaaagggcaacucauacccaaaauuaaguaagagcuauauaaaugacaagggcaaagaaguacugguucuuugggggauccaccaccccucuacuaccgcugaucaacaguccuuguaccagaacgccgacacauacguguucgucggaacuucacgcuauagcaagaaauuuaagccugagauugcgauccgaccaaaagugcgugaucaggaggguagaaugaauuacuauuggacccugguggaacccggcgacaagauuacauucgaggcaaccgggaaccuagucguuccuagguacgccuuugcuauggaacgggaugccggaaguggcaucauaauuucugacacgccagugcaugacugcaacacuacaugucaaaccccgaaaggugcaaucaauacuucccuccccuuccagaacauucacccuaucacaaucgggaagugcccaaaguauguaaaaagcaccaagcugcgccuugcuacgggacugagaaaugugcccucgauucagucuaggggcuuguuuggcgccauagcgggguucaucgagggagguuggaccggcauggucgaugggugguacggauaucaucaccagaacgaacaaggcuccgguuacgccgcagaccucaaaucaacacagaaugcuauugauaagaucacuaacaaagugaauaguguuauagagaagaugaacacccaguuuacagccguggggaaggaguucaaucaccuggaaaaacggauugagaacuuaaauaagaaagucgacgauggcuuccuggacaucuggacuuacaacgcugaacuccuugugcuguuggagaaugaacgcacccuagauuaucaugacagcaacguaaagaaucuguacgagaaaguucgaacacagcucaagaacaacgccaaggagaucggaaauggcuguuuugaguucuaucacaaaugcgauaacaccuguauggaguccgugaagaaugggacuuacgacuauccuaaauacucugaagaggcaaagcugaacagagaagagauugauggagucaaacuugagagcacgaggaucuaucaaauucuggccauauacucaacagcugcgaguuccuuggugcucgucgugagccugggugcaaucucuuuuuggaugugcucaaauggcaguuuacagugccggauuuguaucuga

SEQ ID NO: 140024 - RNA, 1701 nt, Artificial Sequence; identical to SEQ ID NO: 139950
  derived and/or modified CDS sequence (opt3) from hemagglutinin__InfluenzaA__AHV83855

SEQ ID NO: 140025 - RNA, 1701 nt, Artificial Sequence
  derived and/or modified CDS sequence (opt3) from hemagglutinin__InfluenzaA__AHV83856
augaaggccauccuggugguccuccuuuacaccuucgcuacagcaaacgccgacacucugugcauuggcuaucacgcgaauaacagcacggauaccguugacacaguguuggagaagaauguaacugugacccauuccgucaacuuacuggaagauaagcacaaugggaaacuauguaagcucagaggaguggcuccccugcaucuugguaaaugcaacauagccggcuggauccuggggaauccugagugugaaucuuugucaacagcaaguagcugguccuacauuguugagaccucuucgucagacaacggaacuugcuauccaggcgauuuuaucaauuacgaagaacucagggagcagcugagcaguguguccucuuucgaacgguuugagauuuucccgaagacaagcuccuggcccaaccacgacucaaauaagggugucaccgccgcuuguccucaugcaggggccaaaaguuuuuauaagaaccugaucuggcucgugaaaaagggaaauagcuacccaaaauuaucucaauccuauauaaacgauaagggcaaggaaguacugguucuuuggggcauccaccaccccucaacgacugcugaccagcagagcuuguaccagaaugccgaugcguacguguucgucgggaccagucgcuauucuaaaaaguuuaaaccugagauugcaauccgaccaaaggugcgugaccaagagggaagaaugaacuacuauuggacacugguggaacccggugauaaaauuacuuucgaggccaccggcaaccuagucguuccuagguacgcuuuuacaauggaacggaaugccggguccggaaucauaauuagcgacaccccagugcaugauugcaacacgacuugucagacaccggagggcgcaaucaauaccucgcuccccuuccagaacauucacccuaucacuaucgguaagugcccaaaauauguaaagucuacaaagcugcgccuugcuaccgggcugagaaaugugcccuccauucagucaaggggauuguuuggcgccauagcgggcuucaucgaagggggauggacggguauggucgacggcugguacggguaucaucaccaaaacgagcagggaaguggcuacgccgcagaccucaaaagcacccagaaugcuauugauaagaucacaaacaaaguuaauuccgugauagagaagaugaacacucaguuuaccgccguggguaaagaguucaaucaccuggagaagcggauugaaaacuuaaauaagaaagucgacgauggguuccuggacaucuggacauacaacgcugagcuccuugugcuguuggaaaaugagcgcacucuagauuaucaugacucuaacguaaagaaccuguacgagaaaguucgaaaucaacucaagaacaaugccaaagaaaucggcaacggauguuuugaguucuaucacaagugcgauaauaccuguauggaaauugugaagaacggcacauacgacuauccuaaauacagcgaggaagcaaagcugaauagagagaaaaucgauggggucaaacuugagucaaccaggauuuaucagauacuggccaucuacaguacuguggcuuccagcuugguccucgugguuucucugggagcgauuucauuuuggaugugcaguaacgguagcuuacagugccggaucuguaucuga

SEQ ID NO: 140026 - RNA, 1701 nt, Artificial Sequence; identical to SEQ ID NO: 139950
  derived and/or modified CDS sequence (opt3) from hemagglutinin__InfluenzaA__AHV83857

SEQ ID NO: 140027 - RNA, 1701 nt, Artificial Sequence
  derived and/or modified CDS sequence (opt3) from hemagglutinin__InfluenzaA__AHV83858
augaaggccauccuggugguccuccuuuacaccuucgcuacagcaaacacugacacgcugugcauuggcuaucacgccaauaacagcaccgauacaguugacacuguguuggagaaaaauguaaccgugacacauuccgucaacuuacuggaagauaagcacaaugggaaacuauguaagcucagaggaguggcgccccugcaucuugguaaaugcaacauagcuggcuggauccuggggaauccugagugugaaucuuugucaaccgccaguagcugguccuacauuguugagacuucuucgucagacaacggaacaugcuauccaggcgauuuuaucaauuacgaagaacucagggagcagcugagcaguguguccucuuucgaacgguuugagauuuucccgaagaccagcuccuggcccaaccacgacucaaauaagggugucacggcagccuguccucaugcuggggcaaaaaguuuuuauaagaaccugaucuggcucgugaaaaagggaaauagcuacccaaaauuaucucaauccuauauaaacgauaagggcaaggaaguacugguucuuuggggcauccaccaccccucaacuaccgccgaccagcagagcuuguaccagaaugcugaugccuacguguucgucgggacaagucgcuauucuaaaaaguuuaaaccugagauugcgauccgaccaaaggugcgugaccaagagggaagaaugaacuacuauuggacucugguggaacccggugauaaaauuaccuucgaggcaacaggcaaccuagucguuccuagguacgccuuuaccauggaacggaaugcuggguccggaaucauaauuagcgacacgccagugcaugauugcaacacuacaugucagaccccggagggcgccaucaauacuucgcuccccuuccagaacauucacccuaucacaaucgguaagugcccaaaauauguaaagucuaccaagcugcgccuugcaacggggcugagaaaugugcccuccauucagucaaggggauuguuuggcgcuauagccggcuucaucgaagggggauggaccgguauggucgacggcugguacggguaucaucaccaaaacgagcagggaaguggcuacgcggccgaccagaaaagcacacagaaugcaauugauaagaucacuaacaaaguuaauuccgugauagagaagaugaacacccaauuuacagcuguggguaaagaguucaaucaccucgagaagcggauugaaaaccugaauaagaaagucgacgauggguucuuagacaucuggacuuacaacgccgagcugcucgugcuucuggaaaaugagcgcaccuuggauuaucaugacucuaacguaaagaaccuauacgagaaaguucgaaaucagcugaagaacaaugcuaaagaaaucggcaacggauguuuugaguucuaucacaagugcgauaauacauguauggaaagcgugaagaacggcaccuacgacuauccuaaauacucagaggaagccaagcucaauagagagaaaauugauggggucaagcuggagaguacuaggaucuaucagauucuugcaauauacuccacgguggccagcucucuggucuuggugguuucacucggagcuaucaguuuuuggaugugcagcaacgguucccugcaaugccggauuuguaucuga

SEQ ID NO: 140028 - RNA, 1701 nt, Artificial Sequence; identical to SEQ ID NO: 138088
  derived and/or modified CDS sequence (opt3) from hemagglutinin__InfluenzaA__AHV83859

SEQ ID NO: 140029 - RNA, 1701 nt, Artificial Sequence
  derived and/or modified CDS sequence (opt3) from hemagglutinin__InfluenzaA__AHV83861
augaaggccauccuggugguccuccuuuacaccuucacaacugcuaacgcagacacgcugugcauuggcuaucacgccaauaacagcaccgauacaguugacacuguguuggagaagaauguaaccgugacacauuccgucaacuuacuggaagauaagcacaaugggaaacuauguaagcucagaggaguggcgccccugcaucuugguaaaugcaacauagcuggcuggauccuggggaauccugagugugaaucuuugucaaccgccaguagcugguccuacauuguugagacuucuucgucagacaacggaacaugcuauccaggcgauuuuaucaauuacgaagaacucagggagcagcugagcaguguguccucuuucgaacgguuugagauuuucccgaagaccagcuccuggcccaaccacgacucaaauaagggugucacggcagccuguccucaugcuggggcaaaaaguuuuuauaagaaccugaucuggcucgugaaaaagggaaauagcuacccaaaauuaucucaauccuauauaaacgauaagggcaaggaaguacugguucuuuggggcauccaccaccccucaacuaccgccgaccagcagagcuuguaccagaaugcugaugccuacguguucgucgggacaagucgcuauucuaaaaaguuuaaaccugagauugcgauccgaccaaaggugcgugaccaagagggaagaaugaacuacuauuggacucugguggaacccggugauaaaauuaccuucgaggcaacaggcaaccuagucguuccuagguacgccuuuaccauggaacggaaugcuggguccggaaucauaauuagcgacacgccagugcaugauugcaacacuacaugucagaccccggagggcgccaucaauacuucgcuccccuuccagaacauucacccuaucacaaucgguaagugcccaaaauauguaaagucuaccaagcugcgccuugcaacggggcugagaaaugugcccuccauucagucaaggggauuguuuggcgcuauagccggcuucaucgaagggggauggaccgguauggucgacggcugguacggguaucaucaccaaaacgagcagggaaguggcuacgcggccgaccucaaaagcacacagaaugcaauugauaagaucacuaacaaaguuaauuccgugauagagaagaugaacacccaguuuacagcuguggguaaagaguucaaucaccuggagaagcggauugaaaacuuaaauaagaaagucgacgauggguuccuggacaucuggacuuacaacgccgagcuccuugugcuguuggaaaaugagcgcacccuagauuaucaugacucuaacguaaagaaccuguacgagaaaguucgaaaucaacucaagaacaaugcuaaagaaaucggcaacggauguuuugaguucuaucacaagugcgauaauacauguauggaaagcgugaagaacggcaccuacgacuauccuaaauacucagaggaagccaagcugaauagagagaaaauugauggggucaaacuugagaguacuaggaucuaucagauucuggcaauauacuccacgguggccagcucuuugguccucgugguuucacugggagcuaucaguuuuuggaugugcagcaacgguuccuuacagugccggauuuguaucuga

SEQ ID NO: 140030 - RNA, 1701 nt, Artificial Sequence; identical to SEQ ID NO: 140029
  derived and/or modified CDS sequence (opt3) from hemagglutinin__InfluenzaA__AHV83862

SEQ ID NO: 140031 - RNA, 1701 nt, Artificial Sequence; identical to SEQ ID NO: 138088
  derived and/or modified CDS sequence (opt3) from hemagglutinin__InfluenzaA__AHV83863

SEQ ID NO: 140032 - RNA, 1701 nt, Artificial Sequence; identical to SEQ ID NO: 138088
  derived and/or modified CDS sequence (opt3) from hemagglutinin__InfluenzaA__AHV83864

SEQ ID NO: 140033 - RNA, 1701 nt, Artificial Sequence
  derived and/or modified CDS sequence (opt3) from hemagglutinin__InfluenzaA__AHV83866
augaaggccauccuggugguccuccuuuacaccuucgcuacagcaaacgccgacacucugugcauuggcuaucacgcgaauaacagcacggauaccguugacacaguguuggagaagaauguaacugugacccauuccgucaacuuacuggaagauaagcacaaugggaaacuauguaagcucagaggaguggcuccccugcaucuugguaaaugcaacauagccggcuggauccuggggaauccugagugugaaucuuugucaacagcaaguagcugguccuacauuguugagaccucuucgucagacaacggaacuugcuauccaggcgauuuuaucaauuacgaagaacucagggagcagcugagcaguguguccucuuucgaacgguuugagauuuucccgaagacaagcuccuggcccaaccacgacucaaauaagggugucaccgccgcuuguccucaugcaggggccaaaaguuuuuauaagaaccugaucuggcucgugaaaaagggaaauagcuacccaaaauuaucucaauccuauauaaacgauaagggcaaggaaguacugguucuuuggggcauccaccaccccucaacgacugcugaccagcagagcuuguaccagaaugccgaugcguacguguucgucgggaccagucgcuauucuaaaaaguuuaaaccugagauugcaauccgaccaaaggugcgugaccaagagggaagaaugaacuacuauuggacacugguggaacccggugauaaaauuacuuucgaggccaccggcaaccuagucguuccuagguacgcuuuuacaauggaacggaaugccggguccggaaucauaauuagcgacaccccaauccaugauugcaacacgacuugucagacaccggagggcgcaauuaauaccucgcuccccuuccagaacauccacccuaucacuauugguaagugcccaaaauaugugaagucuacaaagcugcgccuugcuaccgggcugagaaauguacccuccauacagucaaggggauuguuuggcgccaucgcgggcuucauugaagggggauggacggguaugguggacggcugguacggguaucaucaccaaaacgagcagggaaguggcuacgccgcagaccucaaaagcacccagaaugcuaucgauaagauaacaaacaaagucaauuccgugauugagaagaugaacacucaguuuaccgccguugguaaagaguucaaucaccuggagaagcggaucgaaaacuuaaauaagaaaguggacgauggguuccuggacaucuggacauacaacgcugagcuccuuguccuguuggaaaaugagcgcacucuagauuaucaugacucuaacgugaagaaccuguacgagaaaguacgaaaucaacucaagaacaaugccaaagaaauuggcaacggauguuuugaguucuaucacaagugcgaugacaccuguauggaaagcguuaagaauggcacauacgauuauccuaaauacucagaggaagcaaagcugaacagagagaaaaucgacggggugaaacuugagaguaccaggauuuaucagauacuggccaucuacuccacugucgcuagcucuuuggugcucgucgugucacugggagcgauuaguuuuuggaugugcagcaaugguuccuuacagugccggaucuguaucuga

SEQ ID NO: 140034 - RNA, 1701 nt, Artificial Sequence
  derived and/or modified CDS sequence (opt3) from hemagglutinin__InfluenzaA__AHV83867
augaaggccauccuggugguccuccuuuacaccuucgcuacagcaaacgccgacacucugugcauuggcuaucacgcgaauaacagcacggauaccguugacacaguguuggagaagaauguaacugugacccauuccgucaacuuacuggaagauaagcacaaugggaaacuauguaagcucagaggaguggcuccccugcaucuugguaaaugcaacauagccggcuggauccuggggaauccugagugugaaucuuugucaacagcaaguagcugguccuacauuguugagaccucuucgucagacaacggaacuugcuauccaggcgauuuuaucaauuacgaagaacucagggagcagcugagcaguguguccucuuucgaacgguuugagauuuucccgaagacaagcuccuggcccaaccacgacucaaauaagggugucaccgccgcuuguccucaugcaggggccaaaaguuuuuauaagaaccugaucuggcucgugaaaaagggaaauagcuacccaaaauuaucucaauccuauauaaacgauaagggcaaggaaguacugguucuuuggggcauccaccaccccucaacgacugcugaccagcagagcuuguaccagaaugccgaugcguacguguucgucgggaccagucgcuauucuaaaaaguuuaaaccugagauugcaauccgaccaaaggugcgugaccaagagggaagaaugaacuacuauuggacacugguggaacccggugauaaaauuacuuucgaggccaccggcaaccuagucguuccuagguacgcuuuuacaauggaacggaaugccggguccggaaucauaauuagcgacaccccagugcaugauugcaacacgacuugucagacaccggagggcgcaaucaauaccucgcuccccuuccagaacauucacccuaucacuaucgguaagugcccaaaauauguaaagucuacaaagcugcgccuugcuaccgggcugagaaaugugcccuccauucagucaaggggauuguuuggcgccauagcgggcuucaucgaagggggauggacggguauggucgacggcugguacggguaucaucaccaaaacgagcagggaaguggcuacgccgcagaccucaaaagcacccagaaugcuauugauaagaucacaaacaaaguuaauuccgugauagagaagaugaacacucaguuuaccgccguggguaaagaguucaaucaccuggagaagcggauugaaaacuuaaauaagaaagucgacgauggguuccuggacaucuggacauacaacgcugagcuccuugugcuguuggaaaaugagcgcacucuagauuaucaugacucuaacguaaagaaccuguacgagaaaguucgaaaucaacucaagaacaaugccaaagaaaucggcaacggauguuuugaguucuaucacaagugcgaugacaccuguauggaaagcgugaagaauggcacauacgauuauccuaaauacucagaggaagcaaagcugaacagagagaaaauugacggggucaaacuugagaguaccaggaucuaucagauucuggccauauacuccacuguggcuagcucuuugguccucgugguuucacugggagcgaucaguuuuuggaugugcagcaaugguuccuuacagugccggauuuguaucuga

SEQ ID NO: 140035 - RNA, 1701 nt, Artificial Sequence; identical to SEQ ID NO: 138088
  derived and/or modified CDS sequence (opt3) from hemagglutinin__InfluenzaA__AHV83868

SEQ ID NO: 140036 - RNA, 1701 nt, Artificial Sequence
  derived and/or modified CDS sequence (opt3) from hemagglutinin__InfluenzaA__AHV83869
augaaggccauccuggugguccuccuuuacaccuucgcuacagcaaacgccgacacucugugcauuggcuaucacgcgaauaacagcacggauaccguugacacaguguuggagaagaauguaacugugacccauuccgucaacuuacuggaagauaagcacaaugggaaacuauguaagcucagaggaguggcuccccugcaucuugguaaaugcaacauagccggcuggauccuggggaauccugagugugaaucuuugucaacagcaaguagcugguccuacauuguugagaccucuucgucagacaacggaacuugcuauccaggcgauuuuaucaauuacgaagaacucagggagcagcugagcaguguguccucuuucgaacgguuugagauuuucccgaagacaaacagcuggcccaaucacgacuccaacaagggugucaccgccgcuuguccucaugcaggggccaaaucauuuuauaagaaucugaucuggcucgugaaaaagggaaacaguuacccaaaauuaagccaaucuuauauaaaugauaagggcaaggaaguacugguucuuuggggcauccaccaccccuccacgacugcugaccagcagucauuguaccagaacgccgaugcguacguguucgucgggaccagccgcuauaguaaaaaguuuaaaccugagauugcaauccgaccaaaggugcgugaccaagagggaagaaugaacuacuauuggacacugguggaacccggugauaaaauuacuuucgaggccaccggcaaucuagucguuccuagguacgcuuuuacaauggaacggaacgccgggucuggaaucauaauuuccgacaccccagugcaugauugcaauacgacuugucagacaccggagggcgcaaucaacaccagccuccccuuccagaauauucacccuaucacuaucgguaagugcccaaaauauguaaagucgacaaagcugcgccuugcuaccgggcugagaaacgugcccucuauucaguccaggggauuguuuggcgccauagcgggcuucaucgaagggggauggacggguauggucgacggcugguacggguaucaucaccaaaaugagcagggaucaggcuacgccgcagaccucaaaaguacccagaacgcuauugauaagaucacaaauaaagugaacagcguuauagagaagaugaauacucaguuuaccgccguggguaaagaguucaaccaccuggagaagcggauugaaaauuuaaacaagaaagucgacgauggguuccuggacaucuggacauacaaugcugagcuccuugugcuguuggaaaacgagcgcacucuagauuaucaugacuccaacguaaagaaucuguacgagaaaguucgaaaccaacucaagaauaacgccaaagaaaucggcaauggauguuuugaguucuaucacaagugcgauaacaccuguauggaaucugugaagaauggcacauacgacuauccuaaauacagcgaggaagcaaagcugaacagagagaaaauugauggggucaaacuugagucaaccaggaucuaucagauucuggccauauacaguacuguggcuuccagcuugguccucgugguuucucugggagcgaucucauuuuggaugugcaguaaugguagcuuacagugccggauuuguaucuga

SEQ ID NO: 140037 - RNA, 1701 nt, Artificial Sequence; identical to SEQ ID NO: 138088
  derived and/or modified CDS sequence (opt3) from hemagglutinin__InfluenzaA__AHV83870

SEQ ID NO: 140038 - RNA, 1701 nt, Artificial Sequence; identical to SEQ ID NO: 138088
  derived and/or modified CDS sequence (opt3) from hemagglutinin__InfluenzaA__AHV83871

SEQ ID NO: 140039 - RNA, 1701 nt, Artificial Sequence; identical to SEQ ID NO: 138088
  derived and/or modified CDS sequence (opt3) from hemagglutinin__InfluenzaA__AHV83872

SEQ ID NO: 140040 - RNA, 1701 nt, Artificial Sequence
  derived and/or modified CDS sequence (opt3) from hemagglutinin__InfluenzaA__AHV83873
augaaggccauccuggugguccuccuuuacaccuucgcuacaacuaacgcagacacgcugugcauuggcuaucacgccaauaacagcaccgauacaguugacacuguguuggagaagaauguaaccgugacacauuccgucaacuuacuggaagauaagcacaaugggaaacuauguaagcucagaggaguggcgccccugcaucuugguaaaugcaacauagcuggcuggauccuggggaauccugagugugaaucuuugucaaccgccaguagcugguccuacauuguugagacuucuucgucagacaacggaacaugcuauccaggcgauuuuaucaauuacgaagaacucagggagcagcugagcaguguguccucuuucgaacgguuugagauuuucccgaagaccagcuccuggcccaaccacgacucaaauaagggugucacggcagccuguccucaugcuggggcaaaaaguuuuuauaagaaccugaucuggcucgugaaaaagggaaauagcuacccaaaauuaucucaauccuauauaaacgauaagggcaaggaaguacugguucuuuggggcauccaccaccccucaacuguggccgaccagcagagcuuguaccagaaugcugaugccuacgucuucguggggaccagucgcuauucuaaaaaguuuaaaccugagauugcgauccgaccaaaggugcgugaccaagagggaagaaugaacuacuauuggacacuggucgaacccggugauaaaauuacuuucgaggcaaccggcaaccuaguugugccuagguacgccuuuacaauggaacggaaugcuggguccggaaucauaauuagcgacaccccaguacaugauugcaacacgacuugucagacaccggagggcgccaucaauaccucgcuccccuuccagaacauucacccuaucacuaucgguaagugcccaaaauaugugaagucuacaaagcugcgccuugcaaccgggcugagaaauguccccuccauucagucaaggggauuguuuggcgcuauagccggcuucaucgaagggggauggacggguaugguggacggcugguacggguaucaucaccaaaacgagcagggaaguggcuacgcggccgaccucaaaagcacccagaaugcaauugauaagaucacaaacaaaguuaauuccgugauagagaagaugaacacucaguuuaccgcugucgguaaagaguucaaucaccuggagaagcggauugaaaacuuaaauaagaaaguggacgauggguuccuggacaucuggacauacaacgccgagcuccuuguacuguuggaaaaugagcgcacucuagauuaucaugacucuaacguuaagaaccuguacgagaaagugcgaaaucaacucaagaacaaugcuaaagaaaucggcaacggauguuuugaguucuaucacaagugcgauaauaccuguauggaaagcgucaagaacggcacauacgacuauccuaaauacucagaggaagccaagcugaauagagagaaaauugauggggugaaacuugagaguaccaggaucuaucagauucuggcaauauacuccacugucgccagcucuuuggugcucguugugucacugggagcuaucaguuuuuggaugugcagcaacgguuccuuacagugccggauuuguaucuga

SEQ ID NO: 140041 - RNA, 1701 nt, Artificial Sequence; identical to SEQ ID NO: 138088
  derived and/or modified CDS sequence (opt3) from hemagglutinin__InfluenzaA__AHV83874

SEQ ID NO: 140042 - RNA, 1701 nt, Artificial Sequence; identical to SEQ ID NO: 138088
  derived and/or modified CDS sequence (opt3) from hemagglutinin__InfluenzaA__AHV83875

SEQ ID NO: 140043 - RNA, 1701 nt, Artificial Sequence; identical to SEQ ID NO: 138088
  derived and/or modified CDS sequence (opt3) from hemagglutinin__InfluenzaA__AHV83876

SEQ ID NO: 140044 - RNA, 1701 nt, Artificial Sequence
  derived and/or modified CDS sequence (opt3) from hemagglutinin__InfluenzaA__AHV83877
augaaggccauccuggugguccuccuuuacaccuucgcuacagcaaacgccgacacucugugcauuggcuaucacgcgaauaacagcacggauaccguugacacaguguuggagaaaaauguaacugugacccauuccgucaacuuacuggaagauaagcacaaugggaaacuauguaagcucagaggaguggcuccccugcaucuugguaaaugcaacauagccggcuggauccuggggaauccugagugugaaucuuugucaacagcaaguagcugguccuacauuguugagaccucuucgucagacaacggaacuugcuauccaggcgauuuuaucaauuacgaggagcucagggagcagcugagcaguguguccucuuucaagcgguuugaaauuuucccgaagacaagcuccuggcccaaccacgacucaaauaaaggugucaccgccgcuuguccucaugcaggggccaagaguuuuuauaaaaaccugaucuggcucgugaagaaaggaaauagcuacccaaaguuaucucaauccuauauaaacgauaagggcaaagagguacugguucuuuggggcauccaccaccccucaacgacugcugaccagcagagcuuguaccagaaugccgaugcguacguguucgucgggaccagucgcuauucuaagaaauuuaagccugaaauugcaauccgaccaaaagugcgugaccaagagggaagaaugaacuacuauuggacacugguggagcccggugauaagauuacuuucgaagccaccggcaaccuagucguuccuagguacgcuuuuacaauggagcggaaugccggguccggaaucauaauuagcgacaccccagugcaugauugcaacacgacuugucagacaccggaaggcgcaaucaauaccucgcuccccuuccagaacauucacccuaucacuaucgguaaaugcccaaaguauguaaagucuacaaaacugcgccuugcuaccgggcugagaaaugugcccuccauucagucaaggggauuguuuggcgccauagcgggcuucaucgaagggggauggacggguauggucgacggcugguacggguaucaucaccaaaacgaacagggaaguggcuacgccgcagaccucaagagcacccagaaugcuauugauaaaaucacaaacaagguaaauuccguuauagagaaaaugaacacucaguuuaccgccguggguaaggaguucaaucaccuggaaaagcggauugagaacuuaaauaaaaaggucgacgauggguuccuggacaucuggacauacaacgcugaacuccuugugcuguuggagaaugaacgcacucuagauuaucaugacucuaacgugaaaaaccuguacgagaagguucgaaaucaacucaaaaacaaugccaaggagaucggcaacggauguuuugaguucuaucacaagugcgauaauaccuguauggaaagcgugaaaaacggcacauacgacuauccuaaguacucagaagaggcaaaacugaauagagaaaagauugauggggucaaacuugagaguaccaggaucuaucagauucuggccauauacuccacuguggcuagcucuuugguccucgugguuucacugggagcgaucaguuuuuggaugugcagcaacgguuccuuacagugccggauuuguaucuga

SEQ ID NO: 140045 - RNA, 1701 nt, Artificial Sequence; identical to SEQ ID NO: 139955
  derived and/or modified CDS sequence (opt3) from hemagglutinin__InfluenzaA__AHV83878

SEQ ID NO: 140046 - RNA, 1701 nt, Artificial Sequence; identical to SEQ ID NO: 139955
  derived and/or modified CDS sequence (opt3) from hemagglutinin__InfluenzaA__AHV83879

SEQ ID NO: 140047 - RNA, 1701 nt, Artificial Sequence
  derived and/or modified CDS sequence (opt3) from hemagglutinin__InfluenzaA__AHV83881
augaaggccacccuggugguccuccuuuacacauucgcuacugcaaacgccgacacgcugugcaucggcuaucacgcgaauaacagcaccgauacaguugacacuguguuggagaagaauguaaccgugacacauuccgucaacuuacuggaagauaagcacaaugggaaacuauguaagcucagaggaguggcuccccugcaucuugguaaaugcaacauugccggcuggauacuggggaauccugagugugaaucuuugucaaccgcaaguagcugguccuacaucguugagacuucuucgucagacaacggaacaugcuauccaggcgauuuuauuaauuacgaagaacucagggagcagcugagcaguguguccucuuucgaacgguuugagaucuucccgaagaccagcuccuggcccaaccacgacucaaauaagggugucacggccgcuuguccucaugcaggggccaaaaguuuuuauaagaaccugauuuggcucgugaaaaagggaaauagcuacccaaaauuaucucaauccuauaucaacgauaagggcaaggaaguacugguucuuuggggcauacaccaccccucaacuaccgcugaccagcagagcuuguaccagaaugccgaugcguacguguucgucgggacaagucgcuauucuaaaaaguuuaaaccugagaucgcaauucgaccaaaggugcgugaccaagagggaagaaugaacuacuauuggacucugguggaacccggugauaaaaucaccuucgaggccacaggcaaccuagucguuccuagguacgcuuuuaccauggaacggaaugccggguccggaauuaucauaagcgacacgccagugcaugauugcaacacuacaugucagaccccggagggcgcaauuaauacuucgcuccccuuccagaacauccacccuauuacaaucgguaagugcccaaaauauguaaagucuaccaagcugcgccuugcuacggggcugagaaaugugcccuccauccagucaaggggauuguuuggcgccauugcgggcuucauagaagggggauggaccgguauggucgacggcugguacggguaucaucaccaaaacgagcagggaaguggcuacgccgcagaccucaaaagcacacagaaugcuaucgauaagauuacuaacaaaguuaauuccgugaucgagaagaugaacacccaguuuacagccguggguaaagaguucaaucaccuggagaagcggauagaaaacuuaaauaagaaagucgacgauggguuccuggacauuuggacuuacaacgcugagcuccuugugcuguuggaaaaugagcgcacccuagauuaucaugacucuaacguaaagaaccuguacgagaaaguucgaaaucaacucaagaacaaugccaaagaaaucggcaacggauguuuugaguucuaucacaagugcgauaauacauguauggaaagcgugaagaacggcaccuacgacuauccuaaauacucagaggaagcaaagcugaauagagagaaaaucgauggggucaaacuugagaguacuaggauuuaucagauccuggccauuuacuccacgguggcuagcucuuugguccucgugguuucacugggagcgauaaguuuuuggaugugcagcaacgguuccuuacagugccggaucuguauuuga

SEQ ID NO: 140048 - RNA, 1701 nt, Artificial Sequence; identical to SEQ ID NO: 139069
  derived and/or modified CDS sequence (opt3) from hemagglutinin__InfluenzaA__AHV83882

SEQ ID NO: 140049 - RNA, 1701 nt, Artificial Sequence; identical to SEQ ID NO: 139051
  derived and/or modified CDS sequence (opt3) from hemagglutinin__InfluenzaA__AHV83883

SEQ ID NO: 140050 - RNA, 1701 nt, Artificial Sequence; identical to SEQ ID NO: 138088
  derived and/or modified CDS sequence (opt3) from hemagglutinin__InfluenzaA__AHV83884

SEQ ID NO: 140051 - RNA, 1701 nt, Artificial Sequence
  derived and/or modified CDS sequence (opt3) from hemagglutinin__InfluenzaA__AHV83885
augaaggccauccuggugguccuccuuuacaccuucgcuacagcaaacgccgacacucugugcauuggcuaucacgcgaauaacagcacggauaccguugacacaguguuggagaagaauguaacugugacccauuccgucaacuuacuggaagauaagcacaaugggaaacuauguaagcucagaggaguggcuccccugcaucuugguaaaugcaacauagccggcuggauccuggggaauccugagugugaaucuuugucaacagcaaguagcugguccuacauuguugagaccucuucgucagacaacggaacuugcuauccaggcgauuuuaucaauuacgaagaacucagggagcagcugagcaguguguccucuuucgaacgguuugagauuuucccgaagacaagcuccuggcccaaccacgacucaaauaagggugucaccgccgcuuguccucaugcaggggccaaaaguuuuuauaagaaccugaucuggcucgugaaaaagggaaauagcuacccaaaauuaucucaauccuauauaaacgauaagggcaaggaaguacugguucuuuggggcauccaccaccccucaacgacugcugaccagcagagcuuguaccagaaugccgaugcguacguguucgucgggaccagucgcuauucuaaaaaguuuaaaccugagauugcaauccgaccaaaggugcgugaccaagagggaagaaugaacuacuauuggacacugguggaacccggugauaaaauuacuuucgaggccaccggcaaccuagucguuccuagguacgcuuuuacaauggaacggaaugccggguccggaaucauaauuagcgacaccccaguguaugauugcaacacgacuugucagacaccggagggcgcaaucaauaccucgcuccccuuccagaacauucauccuaucacuaucgguaagugcccaaaauacguaaagucuacaaagcugcgccuugcuaccgggcugagaaaugugcccuccauucagucaaggggauuguuuggcgccauagcgggcuucaucgaagggggauggacggguauggucgacggcugguauggguaccaccaucaaaacgagcagggaaguggcuacgccgcagaccucaaaagcacccagaaugcuauugauaagaucacaaacaaaguuaauuccgugauagagaagaugaacacucaguuuaccgccguggguaaagaguucaaucaccuggagaagcggauugaaaacuuaaauaagaaagucgacgauggguuccuggacaucuggacauauaacgcugagcuccuugugcuguuggaaaaugagcgcacucuagauuaccacgacucuaacguaaagaaccuguaugagaaaguucgaaaucaacucaagaacaaugccaaagaaaucggcaacggauguuuugaguucuaccauaagugcgauaauaccuguauggaaagcgugaagaacggcacauaugacuacccuaaauauucagaggaagcaaagcugaauagagagaaaauugauggggucaaacuugagaguaccaggaucuaccagauucuggccauauacuccacuguggcuagcucuuugguccucgugguuucacugggagcgaucaguuuuuggaugugcagcaacgguuccuuacagugccggauuuguaucuga

SEQ ID NO: 140052 - RNA, 1701 nt, Artificial Sequence; identical to SEQ ID NO: 139968
  derived and/or modified CDS sequence (opt3) from hemagglutinin__InfluenzaA__AHV83887

SEQ ID NO: 140053 - RNA, 1701 nt, Artificial Sequence; identical to SEQ ID NO: 138088
  derived and/or modified CDS sequence (opt3) from hemagglutinin__InfluenzaA__AHV83888

SEQ ID NO: 140054 - RNA, 1701 nt, Artificial Sequence
  derived and/or modified CDS sequence (opt3) from hemagglutinin__InfluenzaA__AHV83889
augaaggccauccuggugguccuccuucacacccuggcuacagcaaacgccgacacuuugugcauuggcuaccaugcgaauaacagcacggauaccguugacacaguguuagagaaaaauguaacugugacccacuccgucaaccugcuagaagauaagcauaaugggaaacucuguaagcugagaggaguggcuccccuucaccuggguaaaugcaacauagccggcuggaucuuggggaauccugagugugaaucucucucaacagcaaguagcugguccuauauuguugagaccucuucgucagacaacggaacuugcuacccaggcgauuucaucaauuaugaggaacugagggagcagcugagcaguguguccucuuuugaacgguucgagauuuuuccgaagacaagcuccuggcccaaccaugacucaaauaagggugucaccgccgcuuguccucacgcaggggccaaaaguuucuacaagaaccucaucugguuagugaaaaagggaaauagcuauccaaaacugucucaauccuacauaaacgauaagggcaaggaaguacuuguuuuguggggcauccaccaucccucaacgacugcugaccagcagagccuguaucagaaugccgaugcguacguguuugucgggaccagucgcuacucuaaaaaguucaaaccugagauugcaauccgaccaaaggugcgugaccaagagggaagaaugaacuauuacuggacacuuguggaacccggugauaaaauuacuuuugaggccaccggcaaccucgucguuccuagguaugcuuucacaauggaacggaaugccggguccggaaucauaauuagcgacaccccagugcacgauugcaacacgacuugucagacaccggagggcgcaaucaauaccucgcugcccuuucagaacauucauccuaucacuaucgguaagugcccaaaauacguaaagucuacaaagcuacgccuggcuaccggguugagaaaugugcccuccauucagucaaggggacucuucggcgccauagcgggcuuuaucgaagggggauggacggguauggucgacggcugguauggguaccaccaccaaaacgagcagggaaguggcuaugccgcagaccugaaaagcacccagaaugcuauugauaagaucacaaacaaaguuaauuccgugauagagaagaugaacacucaguucaccgccguggguaaagaauuuaaucauuuagagaagcggauugaaaaccugaauaagaaagucgacgauggguuccucgacaucuggacauacaacgcugagcuucugguguugcuagaaaaugagcgcacucuggauuaccacgacucuaacguaaagaaccucuaugagaaaguucgaaaucaacugaagaacaaugccaaagaaaucggcaacggauguuucgaguuuuaccauaagugcgauaauaccuguauggaaagcgugaagaacggcacauaugacuacccuaaauauucagaggaagcaaaacuuaauagagagaagauugauggggucaagcuggagaguaccaggaucuaccagauuuuggccauauauuccacuguggcuagcucucucguccuggugguuucauuaggagcgaucaguuucuggaugugcagcaacgguucccugcagugccggauuuguaucuga

SEQ ID NO: 140055 - RNA, 1701 nt, Artificial Sequence; identical to SEQ ID NO: 138088
  derived and/or modified CDS sequence (opt3) from hemagglutinin__InfluenzaA__AHV83890

SEQ ID NO: 140056 - RNA, 1701 nt, Artificial Sequence; identical to SEQ ID NO: 138088
  derived and/or modified CDS sequence (opt3) from hemagglutinin__InfluenzaA__AHV83891

SEQ ID NO: 140057 - RNA, 1701 nt, Artificial Sequence; identical to SEQ ID NO: 138088
  derived and/or modified CDS sequence (opt3) from hemagglutinin__InfluenzaA__AHV83893

SEQ ID NO: 140058 - RNA, 1701 nt, Artificial Sequence; identical to SEQ ID NO: 138088
  derived and/or modified CDS sequence (opt3) from hemagglutinin__InfluenzaA__AHV83894

SEQ ID NO: 140059 - RNA, 1701 nt, Artificial Sequence
  derived and/or modified CDS sequence (opt3) from hemagglutinin__InfluenzaA__AHV83895
augaaggccauccuggugguccuccuuuacaccuucgcuacagcaaacgccgacacucugugcauuggcuaucacgcgaauaacagcacggauaccguugacacaguguuggagaagaauguaacugugacccauuccgucaacuuacuggaagauaagcacaaugggaaacuauguaagcucagaggaguggcuccccugcaucuugguaaaugcaacauagccggcuggauccuggggaauccugagugugaaucuuugucaacagcaaguagcugguccuacauuguugagaccucuucgucagacaacggaacuugcuauccaggcgauuuuaucaauuacgaagaacucagggagcagcugagcaguguguccucuuucgaacgguuugagauuuucccgaagacaagcuccuggcccaaccacgacucaaauaagggugucaccgccgcuuguccucaugcaggggccaaaaguuuuuauaagaaccugaucuggcucgugaaaaagggaaauagcuacccaaaauuaucucaauccuauauaaacgauaagggcaaggaaguacugguucuuuggggcauccaccaccccucaacgacugcugaccagcagagcuuguaccagaaugccgaugcguacguguucgucgggaccagucgcuauucuaaaaaguuuaaaccugagauugcaauccgaccaaaggugcgugaccaagagggaagaaugaacuacuauuggacacugguggaacccggugauaaaauuacuuucgaggccaccggcaaccuagucguuccuagguacgcuuuuacaauggaacggaaugccggguccggaaucauaauuagcgacaccccagugcaugauugcaacacgacuugucagacaccggagggcgcaaucaauaccucgcuccccuuccagaacauucacccuaucacuaucgguaagugcccaaaauauguaaagucuacaaagcugcgccuugcuaccgggcugagaaaugugcccuccauucagucaaggggauuguuuggcgccauagcgggcuucaucgaagggggauggacggguauggucgacggcugguacggguaucaucaccaaaacgagcagggaaguggcuacgccgcagaccucaaaagcacccagaaugcuauugauaagaucacaaacaaaguuaauuccgugauagagaagaugaacacucaguuuaccgccguggguaaagaguucaaucaccuggagaagcggauugaaaacuuaaauaagaaagucgacgauggguuccuggacaucuggacauacaacgcugagcuccuugugcuguuggaaaaugagcgcacucuagauuaucaugacucuaacguaaagaaccuguacgagaaaguucgaaaucaacucaagaacaaugccaaagaaaucggcaacggauguuuugaguucuaucacaagugcgauaauaccuguauggaaagcgugaagaacggcacauacgacuauccuaaauacucagaggaaaccaagcugaauagagagaaaauugauggggucaaacuugagaguacuaggaucuaucagauucuggcaauauacuccacgguggccagcucuuugguccucgugguuucacugggagcuaucaguuuuuggaugugcagcaacgguuccuuacagugccggauuuguaucuga

SEQ ID NO: 140060 - RNA, 1701 nt, Artificial Sequence; identical to SEQ ID NO: 138088
  derived and/or modified CDS sequence (opt3) from hemagglutinin__InfluenzaA__AHV83896

SEQ ID NO: 140061 - RNA, 1701 nt, Artificial Sequence; identical to SEQ ID NO: 138088
  derived and/or modified CDS sequence (opt3) from hemagglutinin__InfluenzaA__AHV83897

SEQ ID NO: 140062 - RNA, 1701 nt, Artificial Sequence
  derived and/or modified CDS sequence (opt3) from hemagglutinin__InfluenzaA__AHV83898
augaaggccauccuggugguccuccuuuacaccuucgcuacagcaaacgccgacacucugugcauuggcuaucacgcgaauaacagcacggauaccguugacacaguguuggagaagaauguaacugugacccauuccgucaacuuacuggaagauaagcacaaugggaaacuauguaagcucagaggaguggcuccccugcaucuugguaaaugcaacauagccggcuggauccuggggaauccugagugugaaucuuugucaacagcaaguagcugguccuacauuguugagaccucuucgucagacaacggaacuugcuauccaggcgauuuuaucaauuacgaagaacucagggagcagcugagcaguguguccucuuucgaacgguuugagauuuucccgaagacaagcuccuggcccaaccacgacucaaauaagggugucaccgccgcuuguccucaugcaggggccaaaaguuuuuauaagaaccugaucuggcucgugaaaaagggaaauagcuacccaaaauuaucucaauccuauauaaacgauaagggcaaggaaguacugguucuuuggggcauccaccaccccucaacgacugcugaccagcagagcuuguaccagaaugccgaugcguacguguucgucgggaccagucgcuauucuaaaaaguuuaaaccugagauugcaauccgaccaaaggugcgugaccaagagggaagaaugaacuacuauuggacacugguggaacccggugauaaaauuacuuucgaggccaccggcaaccuagucguuccuagguacgcuuuuacaauggaacggaaugccggguccggaaucauaauuagcgacaccccagugcaugauugcaacacgacuugucagacaccggagggcgcaaucaauaccucgcuccccuuccagaacauucacccuaucacuaucgguaagugcccaaaauauguaaagucuacaaagcugcgccuugugaccgggcugagaaauguccccuccauucagucaaggggauuguuuggcgcuauagccggcuucaucgaagggggauggacggguaugguggacggcugguacggguaucaucaccaaaacgagcagggaaguggcuacgcggccgaccucaaaagcacccagaaugcaauugauaagaucacaaacaaaguuaauuccgugauagagaagaugaacacucaguuuaccgcugucgguaaagaguucaaucaccuggagaagcggauugaaaacuuaaauaagaaaguggacgauggguuccuggacaucuggacauacaacgccgagcuccuuguacuguuggaaaaugagcgcacucuagauuaucaugacucuaacguuaagaaccuguacgagaaagugcgaaaucaacucaagaacaaugcuaaagaaaucggcaacggauguuuugaguucuaucacaagugcgauaauaccuguauggaaagcgucaagaacggcacauacgacuauccuaaauacucagaggaagccaagcugaauagagagaaaauugauggggugaaacuugagaguaccaggaucuaucagauucuggcaauauacuccacugucgccagcucuuuggugcucguugugucacugggagcuaucaguuuuuggaugugcagcaacgguuccuuacagugccggauuuguaucuga

SEQ ID NO: 140063 - RNA, 1701 nt, Artificial Sequence; identical to SEQ ID NO: 138088
  derived and/or modified CDS sequence (opt3) from hemagglutinin__InfluenzaA__AHV83899

SEQ ID NO: 140064 - RNA, 1701 nt, Artificial Sequence; identical to SEQ ID NO: 138088
  derived and/or modified CDS sequence (opt3) from hemagglutinin__InfluenzaA__AHV83900

SEQ ID NO: 140065 - RNA, 1701 nt, Artificial Sequence; identical to SEQ ID NO: 138088
  derived and/or modified CDS sequence (opt3) from hemagglutinin__InfluenzaA__AHV83901

SEQ ID NO: 140066 - RNA, 1701 nt, Artificial Sequence; identical to SEQ ID NO: 138088
  derived and/or modified CDS sequence (opt3) from hemagglutinin__InfluenzaA__AHV83902

SEQ ID NO: 140067 - RNA, 1701 nt, Artificial Sequence; identical to SEQ ID NO: 138088
  derived and/or modified CDS sequence (opt3) from hemagglutinin__InfluenzaA__AHV83903

SEQ ID NO: 140068 - RNA, 1701 nt, Artificial Sequence; identical to SEQ ID NO: 138088
  derived and/or modified CDS sequence (opt3) from hemagglutinin__InfluenzaA__AHV83904

SEQ ID NO: 140069 - RNA, 1701 nt, Artificial Sequence
  derived and/or modified CDS sequence (opt3) from hemagglutinin__InfluenzaA__AHV83905
augaaggccauccuggugguccuccuuuacacccugacaacugcuaacgcagacacguugugcauuggcuaucacgccaauaacagcaccgauacaguugacacuguguuagagaaaaauguaaccgugacacauuccgucaaccugcuagaagauaagcacaaugggaaacucuguaagcugagaggaguggcgccccuucaucuggguaaaugcaacauagcuggcuggaucuuggggaauccugagugugaaucucucucaaccgccaguagcugguccuacauuguugagacuucuucgucagacaacggaacaugcuauccaggcgauuucaucaauuacgaggaacugagggagcagcugagcaguguguccucuuuugaacgguucgagauuuuuccgaagaccagcuccuggcccaaccacgacucaaauaagggugucacggcagccuguccucaugcuggggcaaaaaguuucuauaagaaccucaucugguuagugaaaaagggaaauagcuacccaaaacugucucaauccuauauaaacgauaagggcaaggaaguacuuguuuuguggggcauccaccaccccucaacuaccgccgaccagcagagccuguaccagaaugcugaugccuacguguuugucgggacaagucgcuauucuaaaaaguucaaaccugagauugcgauccgaccaaaggugcgugaccaagagggaagaaugaacuacuauuggacucuaguggaacccggugauaaaauuaccuuugaggcaacaggcaaccucgucguuccuagguacgccuucaccauggaacggaaugcuggguccggaaucauaauuagcgacacgccagugcaugauugcaacacuacaugucagaccccggagggcgccaucaauacuucgcugcccuuucagaacauucacccuaucacaaucgguaagugcccaaaauauguaaagucuaccaagcugcgccuugcaacgggguugagaaaugugcccuccauucagucaaggggacucuucggcgcuauagccggcuuuaucgaagggggauggaccgguauggucgacggcugguacggguaucaucaccaaaacgagcagggaaguggcuacgcggccgaccugaaaagcacacagaaugcaauugauaagaucacuaacaaaguuaauuccgugauagagaagaugaacacccaguucacagcuguggguaaagaauuuaaucacuuagagaagcggauugaaaaccugaauaagaaagucgacgauggguuccucgacaucuggacuuacaacgccgagcuucugguguugcuagaaaaugagcgcacccuggauuaucaugacucuaacguaaagaaccucuacgagaaaguucgaaaucaacugaagaacaaugcuaaagaaaucggcaacggauguuucgaguuuuaucacaagugcgauaauacauguauggaaagcgugaagaacggcaccuacgacuauccuaaauacucagaggaagccaaacuuaauagagagaagauugauggggucaagcuggagaguacuaggaucuaucagauuuuggcaauauacuccacgguggccagcucucucguccuggugguuucauuaggagcuaucaguuucuggaugugcagcaacgguucccugcagugccggauuuguaucuga

SEQ ID NO: 140070 - RNA, 1701 nt, Artificial Sequence; identical to SEQ ID NO: 138088
  derived and/or modified CDS sequence (opt3) from hemagglutinin__InfluenzaA__AHV83906

SEQ ID NO: 140071 - RNA, 1701 nt, Artificial Sequence; identical to SEQ ID NO: 138088
  derived and/or modified CDS sequence (opt3) from hemagglutinin__InfluenzaA__AHV83907

SEQ ID NO: 140072 - RNA, 1701 nt, Artificial Sequence
  derived and/or modified CDS sequence (opt3) from hemagglutinin__InfluenzaA__AHV83908
augaaggccauccuggugguccuccuuuacaccuucgcuacagcaaacgccgacacucugugcauuggcuaucacgcgaauaacagcacggauaccguugacacaguguuggagaaaaauguaacugugacccauuccgucaacuuacuggaagauaagcacaaugggaaacuauguaagcucagaggaguggcuccccugcaucuugguaaaugcaacauagccggcuggauccuggggaauccugagugugaaccauugucuacagcaucaaguuggagcuacauuguugagaccuccucuucggacaacggaacuugcuauccgggcgauuuuaucaauuacgaggagcucagggagcagcugucaagcgugaguuccuucgaacgguuugagauuuuccccaagacaucuagcuggccuaaccacgacuccaauaagggugucaccgccgcuuguccacaugcaggggccaaaucauuuuauaagaaccugaucuggcucgugaaaaagggaaauaguuaccccaaauuaagccaaucuuauauaaacgauaagggcaagaaaguacugguucuuuggggcauccaccacccuuccacgacugcugaccagcagucauuguaccagaaugccgaugcguacguguucgucgggaccagccgcuauaguaagaaauuuaagccagaaauugcaauccgacccaaagugcgugaccaagagggaagaaugaacuacuauuggacacugguggagccuggugauaagauuacuuucgaagccaccggcaaccuagucguuccaagguacgcuuuuacaauggagcggaaugccgggucuggaaucauaauuuccgacaccccggugcaugauugcaacacgacuugucagacacccgaaggcgcaaucaauaccagccucccuuuccagaacauucacccaaucacuaucgguaaaugccccaaguauguaaagucgacaaaacugcgccuugcuaccgggcugagaaaugugccuucuauucaguccaggggauuguuuggcgccauagcgggcuucaucgaagggggauggacggguauggucgacggcugguacggguaucaucaccaaaacgaacagggaucaggcuacgccgcagaccucaagaguacccagaaugcuauugauaaaaucacaaacaaggugaauagcguuauagagaaaaugaacacucaguuuaccgccguggguaaggaguucaaucaccuggaaaagcggauugagaacuuaaauaaaaaggucgacgauggguuccuggacaucuggacauacaacgcugaacuccuugugcuguuggagaaugaacgcacucuagauuaucaugacuccaacguuaaaaaccuguacgagaagguacgaaaucaacucaaaaacaaugccaaggagaucggcaacggauguuuugaguucuaucacaagugcgauaauaccuguauggaaucugugaaaaacggcacauacgacuauccaaaguacagcgaagaggcaaaacugaauagagaaaagauugauggggucaaacuugagucaaccaggaucuaucagauucuggccauauacaguacuguggcuuccagcuugguccucgugguuucucugggagcgaucucauuuuggaugugcaguaacgguagcuuacagugccggauuuguaucuga

SEQ ID NO: 140073 - RNA, 1701 nt, Artificial Sequence
  derived and/or modified CDS sequence (opt3) from hemagglutinin__InfluenzaA__AHV83911
augaaggccauccuggugguccuccuuuacaccuucgcuacagcaaacgccgacacucugugcauuggcuaucacgcgaauaacagcacggauaccguugacacaguguuggagaagaauguaacugugacccauuccgucaacuuacuggaagauaagcacaaugggaaacuauguaagcucagaggaguggcuccccugcaucuugguaaaugcaacauagccggcuggauccuggggaauccugagugugaaccauugucuacagcaucaaguuggagcuacauuguugagaccuccucuucggacaacggaacuugcuauccgggcgauuuuaucaauuacgaagaacucagggagcagcugucaagcgugaguuccuucgaacgguuugagauuuuccccaagacaucuagcuggccuaaccacgacuccaauaagggugucaccgccgcuuguccacaugcaggggccaaaucauuuuauaagaaccugaucuggcucgugaaaaagggaaauaguuaccccaaauuaagccaaucuuauauaaacgauaagggcaaggaaguacugguucuuuggggcauccaccacccuuccacgacugcugaccagcagucauuguaccagaaugccgaugcguacguguucgucgggaccagccgcuauaguaaaaaguuuaaaccagagauugcaauccgacccaaggugcgugaccaagagggaagaaugaacuacuauuggacacugguggaaccuggugauaaaauuacuuucgaggccaccggcaaccuagucguuccaagguacgcuuuuacaauggaacggaaugccgggucuggaaucauaauuuccgacaccccggugcaugauugcaacacgacuugucagacacccgagggcgcaaucaauaccagccucccuuuccagaacauucacccaaucacuaucgguaagugccccaaauauguaaagucgacaaagcugcgccuugcuaccgggcugagaaaugugccuucuauucaguccaggggauuguuuggcgccauagcgggcuucaucgaagggggauggacggguauggucgacggcugguacggguaucaucaccaaaacgagcagggaucaggcuacgccgcagaccucaaaaguacccagaaugcuauugauaagaucacaaacaaagugaauagcguuauagagaagaugaacacucaguuuaccgccguggguaaagaguucaaucaccuggagaagcggauugaaaacuuaaauaagaaagucgacgauggguuccuggacaucuggacauacaacgcugagcuccuugugcuguuggaaaaugagcgcacucuagauuaucaugacuccaacguaaagaaccuguacgagaaaguucgaaaucaacucaagaacaaugccaaagaaaucggcaacggauguuuugaguucuaucacaagugcgauaauaccuguauggaaucugugaagaacggcacauacgacuauccaaaauacagcgaggaagcaaagcugaauagagagaaaauugauggggucaaacuugagucaaccaggaucuaucagauucuggccauauacaguacuguggcuuccagcuugguccucgugguuucucugggagcgaucucauuuuggaugugcaguaacgguagcuuacagugccggauuuguaucuga

SEQ ID NO: 140074 - RNA, 1701 nt, Artificial Sequence; identical to SEQ ID NO: 138088
  derived and/or modified CDS sequence (opt3) from hemagglutinin__InfluenzaA__AHV83912

SEQ ID NO: 140075 - RNA, 1701 nt, Artificial Sequence; identical to SEQ ID NO: 138088
  derived and/or modified CDS sequence (opt3) from hemagglutinin__InfluenzaA__AHV83913

SEQ ID NO: 140076 - RNA, 1701 nt, Artificial Sequence; identical to SEQ ID NO: 138088
  derived and/or modified CDS sequence (opt3) from hemagglutinin__InfluenzaA__AHV83915

SEQ ID NO: 140077 - RNA, 1701 nt, Artificial Sequence; identical to SEQ ID NO: 138088
  derived and/or modified CDS sequence (opt3) from hemagglutinin__InfluenzaA__AHV83916

SEQ ID NO: 140078 - RNA, 1701 nt, Artificial Sequence; identical to SEQ ID NO: 140073
  derived and/or modified CDS sequence (opt3) from hemagglutinin__InfluenzaA__AHV83917

SEQ ID NO: 140079 - RNA, 1701 nt, Artificial Sequence; identical to SEQ ID NO: 139051
  derived and/or modified CDS sequence (opt3) from hemagglutinin__InfluenzaA__AHV83919

SEQ ID NO: 140080 - RNA, 1701 nt, Artificial Sequence; identical to SEQ ID NO: 139968
  derived and/or modified CDS sequence (opt3) from hemagglutinin__InfluenzaA__AHV83920

SEQ ID NO: 140081 - RNA, 1701 nt, Artificial Sequence; identical to SEQ ID NO: 139069
  derived and/or modified CDS sequence (opt3) from hemagglutinin__InfluenzaA__AHV83921

SEQ ID NO: 140082 - RNA, 1701 nt, Artificial Sequence
  derived and/or modified CDS sequence (opt3) from hemagglutinin__InfluenzaA__AHV83922
augaaggccauccuggugguccuccuuuacaccuucgcuacagcaaacgccgacacucugugcauuggcuaucacgcgaauaacagcacggauaccguugacacaguguuggagaagaauguaacugugacccauuccgucaacuuacuggaagauaagcacaaugggaaacuauguaagcucagaggaguggcuccccugcaucuugguaaaugcaacauagccggcuggauccuggggaauccugagugugaaucuuugucaacagcaaguagcugguccuacauuguugagaccucuucgucagacaacggaacuugcuauccaggcgauuuuaucaauuacgaagaacucagggagcagcugagcaguguguccucuuucgaacgguuugagauuuucccgaagacaagcuccuggcccaaccacgacucaaauaagggugucaccgccgcuuguccucaugcaggggccaaaaguuuuuauaagaaccugaucuggcucgugaaaaagggaaauagcuacccaaaauuaucucaauccuauauaaacgauaagggcaaggaaguacugguucuuuggggcauccaccaccccucaacgacugcugaccagcagagcuuguaccagaaugccgaugcguacguguucgucgggaccagucgcuauucuaaaaaguuuaaaccugagauugcaauccgaccaaaggugcgugaccaagagggaagaaugaacuacuauuggacacugguggaacccggugauaaaauuacuuucgaggccaccggcaaccuagucguuccuagguacgcuuuuacaauggaacggaaugccggguccggaaucauaauuagcgacaccccagugcaugauugcaacacgacuugucagacaccggagggcgcaaucaauaccucgcuccccuuccagaacauucacccuaucacuaucgguaagugcccaaaauauguaaagucuacaaagcugcgccuugcuaccgggcugagaaaugugcccuccauucagucaaggggauuguuuggcgccauagcgggcuucaucgaagggggauggacggguauggucgacggcugguacggguaucaucaccaaaacgagcagggaaguggcuacgccgcagaccucaaaagcacccagaaugcuauugauaagaucacaaacaaaguuaauuccgugauagagaagaugaacacucaguuuaccgccguggguaaagaguucucucaccuggagaagcggauugaaaauuuaaacaagaaagucgacgauggguuccuggacaucuggacauacaaugcugagcuccuugugcuguuggaaaacgagcgcacucuagauuaucaugacagcaauguaaagaaccuguacgagaaaguucgaaaccaacucaagaauaacgccaaagaaaucggcaauggauguuuugaguucuaucacaagugcgauaacaccuguauggaaucagugaagaauggcacauacgacuauccuaaauacagugaggaagcaaagcugaacagagagaaaauugauggggucaaacuugaguccaccaggaucuaucagauucuggccauauacagcacuguggcuucuucauugguccucgugguuagucugggagcgaucagcuuuuggaugugcuccaaugguucuuuacagugccggauuuguaucuga

SEQ ID NO: 140083 - RNA, 1701 nt, Artificial Sequence; identical to SEQ ID NO: 139984
  derived and/or modified CDS sequence (opt3) from hemagglutinin__InfluenzaA__AHV83923

SEQ ID NO: 140084 - RNA, 1701 nt, Artificial Sequence; identical to SEQ ID NO: 139968
  derived and/or modified CDS sequence (opt3) from hemagglutinin__InfluenzaA__AHV83924

SEQ ID NO: 140085 - RNA, 1701 nt, Artificial Sequence; identical to SEQ ID NO: 139984
  derived and/or modified CDS sequence (opt3) from hemagglutinin__InfluenzaA__AHV83925

SEQ ID NO: 140086 - RNA, 1701 nt, Artificial Sequence; identical to SEQ ID NO: 139968
  derived and/or modified CDS sequence (opt3) from hemagglutinin__InfluenzaA__AHV83926

SEQ ID NO: 140087 - RNA, 1701 nt, Artificial Sequence; identical to SEQ ID NO: 140073
  derived and/or modified CDS sequence (opt3) from hemagglutinin__InfluenzaA__AHV83927

SEQ ID NO: 140088 - RNA, 1701 nt, Artificial Sequence
  derived and/or modified CDS sequence (opt3) from hemagglutinin__InfluenzaA__AHV83928
augaaggccauccuggugguccuccuuuacaccuucacaacugcuaacgcagacacgcugugcauuggcuaucacgccaauaacagcaccgauacaguugacacuguguuggagaaaaauguaaccgugacacauuccgucaacuuacuggaagauaagcacaaugggaaacuauguaagcucagaggaguggcgccccugcaucuugguaaaugcaacauagcuggcuggauccuggggaauccugagugugaaucuuugucaaccgccaguagcugguccuacauuguugagacuucuucgucagacaacggaacaugcuauccaggcgauuuuaucaauuacgaagaacucagggagcagcugagcaguguguccucuuucgaacgguuugagauuuucccgaagaccagcuccuggcccaaccacgacucaaauaagggugucacggcagccuguccucaugcuggggcaaaaaguuuuuauaagaaccugaucuggcucgugaaaaagggaaauagcuacccaaaauuaucucaauccuauauaaacgauaagggcaaggaaguacugguucuuuggggcauccaccaccccucaacuaccgccgaccagcagagcuuguaccagaaugcugaugccuacguguucgucgggacaagucgcuauucuaaaaaguuuaaaccugagauugcgauccgaccaaaggugcgugaccaagagggaagaaugaacuacuauuggacucugguggaacccggugauaaaauuaccuucgaggcaacaggcaaccuagucguuccuagguacgccuuuaccauggaacggaaugcuggguccggaaucauaauuagcgacacgccagugcaugauugcaacacuacaugucagaccccggagggcgccaucaauacuucgcuccccuuccagaacauucacccuaucacaaucgguaagugcccaaaauauguaaagucuaccaagcugcgccuugcaacggggcugagaaaugugcccuccauucagucaaggggauuguuuggcgcuauagccggcuucaucgaagggggauggaccgguauggucgacggcugguacggguaucaucaccaaaacgagcagggaaguggcuacgcggccgaccagaaaagcacacagaaugcaauugauaagaucacuaacaaaguuaauuccgugauagagaagaugaacacccaauuuacagcuguggguaaagaguucaaucaccucgagaagcggauugaaaaccugaauaagaaagucgacgauggguucuuagacaucuggacuuacaacgccgagcugcucgugcuucuggaaaaugagcgcaccuuggauuaucaugacucuaacguaaagaaccuauacgagaaaguucgaaaucagcugaagaacaaugcuaaagaaaucggcaacggauguuuugaguucuaucacaagugcgauaauacauguauggaaagcgugaagaacggcaccuacgacuauccuaaauacucagaggaagccaagcucaauagagagaaaauugauggggucaagcuggagaguacuaggaucuaucagauucuugcaauauacuccacgguggccagcucucuggucuuggugguuucacucggagcuaucaguuuuuggaugugcagcaacgguucccugcaaugccggauuuguaucuga

SEQ ID NO: 140089 - RNA, 1701 nt, Artificial Sequence; identical to SEQ ID NO: 139968
  derived and/or modified CDS sequence (opt3) from hemagglutinin__InfluenzaA__AHV83929

SEQ ID NO: 140090 - RNA, 1701 nt, Artificial Sequence
  derived and/or modified CDS sequence (opt3) from hemagglutinin__InfluenzaA__AHV83930
augaaggccauccuggugauucuccuuuacaccuucgcuacagcaaacgccgacacucugugcauaggcuaucacgcgaauaacagcacggauaccgucgacacaguuuuggagaagaaugugacuguaacccauuccgugaacuuacuggaagauaagcacaaugggaaacuauguaagcucagaggagucgcuccccugcaucuugguaaaugcaacaucgccggcuggauucuggggaauccugagugugaaucuuugucaacagcaaguagcugguccuacaucguggagaccucuucgucagacaacggaacuugcuauccaggcgauuuuauuaauuacgaagaacucagggagcagcugagcaguguuuccucuuucgaacgguuugagaucuucccgaagacaagcuccuggcccaaccacgacucaaauaagggugugaccgccgcuuguccucaugcaggggccaaaaguuuuuauaagaaccugauauggcucgucaaaaagggaaauagcuacccaaaauuaucucaauccuauaucaacgauaagggcaaggaagugcugguacuuuggggcauucaccaccccucaacgacugcugaccagcagagcuuguaccagaaugccgaugcguacguuuucguggggaccagucgcuauucuaaaaaguuuaaaccugagaucgcaauucgaccaaagguccgugaccaagagggaagaaugaacuacuauuggacacugguggaacccggugauaaaaucacuuucgaggccaccggcaaccuaguggucccuagguacgcuuuuacaauggaacggaaugccggguccggaauaauuaucagcgacaccccaguucaugauugcaacacgacuugucagacaccggagggcgcaauuaauaccucgcuccccuuccagaacauccacccuaucacuauugguaagugcccaaaauaugugaagucuacaaagcugcgccuugcuaccgggcugagaaauguacccuccauacagucaaggggauuguuuggcgccaucgcgggcuucauugaagggggauggacggguaugguggacggcugguacggguaucaucaccaaaacgagcagggaaguggcuacgccgcagaccucaaaagcacccagaaugcuaucgauaagauaacaaacaaagucaauuccgugauugagaagaugaacacucaguuuaccgccguugguaaagaguucaaucaccuggagaagcggaucgaaaacuuaaauaagaaaguggacgauggguuccuggacaucuggacauacaacgcugagcuccuuguccuguuggaaaaugagcgcacucuagauuaucaugacucuaacgugaagaaccuguacgagaaaguacgaaaucaacucaagaacaaugccaaagaaauuggcaacggauguuuugaguucuaucacaagugcgauaauaccuguauggaaagcguuaagaacggcacauacgacuauccuaaauacucagaggaagcaaagcugaauagagagaaaaucgauggggugaaacuugagaguaccaggauuuaucagauacuggccaucuacuccacugucgcuagcucuuuggugcucgucgugucacugggagcgauuaguuuuuggaugugcagcaacgguuccuuacagugccggaucuguaucuga

SEQ ID NO: 140091 - RNA, 1701 nt, Artificial Sequence; identical to SEQ ID NO: 139968
  derived and/or modified CDS sequence (opt3) from hemagglutinin__InfluenzaA__AHV83931

SEQ ID NO: 140092 - RNA, 1701 nt, Artificial Sequence; identical to SEQ ID NO: 138088
  derived and/or modified CDS sequence (opt3) from hemagglutinin__InfluenzaA__AHV83932

SEQ ID NO: 140093 - RNA, 1701 nt, Artificial Sequence
  derived and/or modified CDS sequence (opt3) from hemagglutinin__InfluenzaA__AHV83933
augaaggccauccuggugguccuccuuuacaccuucgcuacagcaaacgccgacacucugugcauuggcuaucacgcgaauaacagcacggauaccguugacacaguguuggagaaaaauguaacugugacccauuccgucaacuuacuggaagauaagcacaaugggaaacuauguaagcucagaggagugacaccccugcaucuugguaaaugcaacauagcuggcuggauccuggggaauccugagugugaaucuuugucaaccgccaguagcugguccuacauuguugagacuucuucgucagacaacggaacaugcuauccaggcgauuuuaucaauuacgaagaacucagggagcagcugagcaguguguccucuuucgaacgguuugagauuuucccgaagaccagcuccuggcccaaccacgacucaaauaagggugucacggcagccuguccucaugcuggggcaaaaaguuuuuauaagaaccugaucuggcucgugaaaaagggaaauagcuacccaaaauuaucucaauccuauauaaacgauaagggcaaggaaguacugguucuuuggggcauccaccaccccucaacuaccgccgaccagcagagcuuguaccagaaugcugaugccuacguguucgucgggacaagucgcuauucuaaaaaguuuaaaccugagauugcgauccgaccaaaggugcgugaccaagagggaagaaugaacuacuauuggacucugguggaacccggugauaaaauuaccuucgaggcaacaggcaaccuagucguuccuagguacgccuuuaccauggaacggaaugcuggguccggaaucauaauuagcgacacgccagugcaugauugcaacacuacaugucagaccccggagggcgccaucaauacuucgcuccccuuccagaacauucacccuaucacaaucgguaagugcccaaaauauguaaagucuaccaagcugcgccuugcaacggggcugagaaaugugcccuccauucagucaaggggauuguuuggcgcuauagccggcuucaucgaagggggauggaccgguauggucgacggcugguacggguaucaucaccaaaacgagcagggaaguggcuacgcggccgaccagaaaagcacacagaaugcaauugauaagaucacuaacaaaguuaauuccgugauagagaagaugaacacccaauuuacagcuguggguaaagaguucaaucaccucgagaagcggauugaaaaccugaauaagaaagucgacgauggguucuuagacaucuggacuuacaacgccgagcugcucgugcuucuggaaaaugagcgcaccuuggauuaucaugacucuaacguaaagaaccuauacgagaaaguucgaaaucagcugaagaacaaugcuaaagaaaucggcaacggauguuuugaguucuaucacaagugcgauaauacauguauggaaagcgugaagaacggcaccuacgacuauccuaaauacucagaggaagccaagcucaauagagagaaaauugauggggucaagcuggagaguacuaggaucuaucagauucuugcacuguacuccacgguggccagcucuuugguccucgugguuucacugggagcuauaaguuuuuggaugugcagcaacgguuccuuacaaugccggaucuguauuuga

SEQ ID NO: 140094 - RNA, 1701 nt, Artificial Sequence; identical to SEQ ID NO: 139051
  derived and/or modified CDS sequence (opt3) from hemagglutinin__InfluenzaA__AHV83934

SEQ ID NO: 140095 - RNA, 1701 nt, Artificial Sequence; identical to SEQ ID NO: 138088
  derived and/or modified CDS sequence (opt3) from hemagglutinin__InfluenzaA__AHV83935

SEQ ID NO: 140096 - RNA, 1701 nt, Artificial Sequence; identical to SEQ ID NO: 138088
  derived and/or modified CDS sequence (opt3) from hemagglutinin__InfluenzaA__AHV83937

SEQ ID NO: 140097 - RNA, 1701 nt, Artificial Sequence
  derived and/or modified CDS sequence (opt3) from hemagglutinin__InfluenzaA__AHV83938
augaaggccauccuggugguccuccuuuacaccuucgcuacagcaaacgccgacacucugugcauuggcuaucacgcgaauaacagcacggauaccguugacacaguguuggagaaaaauguaacugugacccauuccgucaacuuacuggaagauaagcacaaugggaaacuauguaagcucagaggaguggcuccccugcaucuugguaaaugcaacauagccggcuggauccuggggaauccugagugugaaucuuugucaacagcaaguagcugguccuacauuguugagaccucuucgucagacaacggaacuugcuauccaggcgauuuuaucaauuacgaagaacucagggagcagcugagcaguguguccucuuucgaacgguuugagauuuucccgaagacaagcuccuggcccaaccacgacucaaauaagggugucaccgccgcuuguccucaugcaggggccaaaaguuuuuauaagaaccugaucuggcucgugaaaaagggaaauagcuacccaaaaauaucucaauccuauaucaacgauaagggcaaggaaguauuaguucuguggggcauucaccaccccucaacgacugcugaccagcagagccuuuaccagaaugccgaugcguacguguucgucgggaccagucgcuauucuaaaaaguuuaaaccugagaucgcaauucgaccaaaggugcgugaccaagagggaagaaugaacuacuauuggacauugguggaacccggugauaaaaucacuuucgaggccaccggcaaccuggucguuccuagguacgcuuuuacaauggaacggaaugccggguccggaauaauuaucagcgacaccccagugcaugauugcaacacgacuugucagacaccggagggcgcaauuaauaccucgcuacccuuccagaacauccacccuaucacuauugguaagugcccaaaauauguaaagucuacaaagcuccgccuggcuaccgggcuuagaaaugugcccuccauacagucaaggggacuguuuggcgccaucgcgggcuucauugaagggggauggacggguauggucgacggcugguacggguaucaucaccaaaacgagcagggaaguggcuacgccgcagaccagaaaagcacccagaaugcuaucgauaagauaacaaacaaaguuaauuccgugauugagaagaugaacacucaauuuaccgccguggguaaagaguucaaucacuuggagaagcggaucgaaaaccucaauaagaaagucgacgauggguuccuggacaucuggacauacaacgcugaguuacuggugcuccuugaaaaugagcgcacucuggauuaucaugacucuaacguaaagaacuuguacgagaaaguucgaaaucagcuaaagaacaaugccaaagaaauuggcaacggauguuuugaguucuaucacaagugcgauaauaccuguauggaaagcgugaagaacggcacauacgacuauccuaaauacucagaggaagcaaagcugaauagagagaaaaucgauggggucaagcucgagaguaccaggauuuaucagauacuggccaucuacuccacuguggcuagcucucuuguccuggugguuucauugggagcgauuaguuuuuggaugugcagcaacgguucccuccaaugccggaucuguaucuga

SEQ ID NO: 140098 - RNA, 1701 nt, Artificial Sequence; identical to SEQ ID NO: 140097
  derived and/or modified CDS sequence (opt3) from hemagglutinin__InfluenzaA__AHV83939

SEQ ID NO: 140099 - RNA, 1701 nt, Artificial Sequence
  derived and/or modified CDS sequence (opt3) from hemagglutinin__InfluenzaA__AHV83940
augaaggccauccuggugguccuccuuuacaccuucgcuacagcaaacgccgacacucugugcauuggcuaucacgcgaauaacagcacggauaccguugacacaguguuggagaaaaauguaacugugacccauuccgucaacuuacuggaagauaagcacaaugggaaacuauguaagcucagaggaguggcuccccugcaucuugguaaaugcaacauagccggcuggauccuggggaauccugagugugaaucuuugucaacagcaaguagcugguccuacauuguugagaccucuucgucagacaacggaacuugcuauccaggcgauuuuaucaauuacgaagaacucagggagcagcugagcaguguguccucuuucgaacgguuugagauuuucccgaagacaagcuccuggcccaaccacgacucaaauaagggugucaccgccgcuuguccucaugcaggggccaaaaguuuuuauaagaaccugaucuggcucgugaaaaagggaaauagcuacccaaaauuaucucaauccuauauaaacgauaagggcaaggaaguacugguucuuuggggcauccaccaccccucaacgacugcugaccagcagagcuuguaccagaaugccgaugcguacguguucgucgggaccagucgcuauucuaaaaaguuuaaaccugagauugcaauccgaccaaaggugcgugaccaagagggaagaaugaacuacuauuggacacugguggaacccggugauaaaauuacuuucgaggccaccggcaaccuagucguuccuagguacgcuuuuacaauggaacggaaugccggguccggaaucauaauuagcgacaccccagugcaugauugcaacacgacuugucagacaccggagggcgcaaucaauaccucgcuccccuuccagaacauucacccuaucacuaucgguaagugcccaaaauauguaaagucuacaaagcugcgccuugcuaccgggcugagaaaugugcccuccauucagucaaggggauuguuuggcgccauagcgggcuucaucgaagggggauggacggguauggucgacggcugguacggguaucaucaccaaaacgagcagggaaguggcuacgccgcagaccagaaaagcacccagaaugcuauugauaagaucacaaacaaaguuaauuccgugauagagaagaugaacacucaauuuaccgccguggguaaagaguucaaucaccucgagaagcggauugaaaaccugaauaagaaagucgacgauggguucauggacaucuggacauacaacgcugaguuacuggugcuccuugaaaaugagcgcacucuggauuaucaugacucuaacguaaagaacuuguacgagaaaguucgaaaucagcuaaagaacaaugccaaagaaaucggcaacggauguuuugaguucuaucacaagugcgauaauaccuguauggaaagcgugaagaacggcacauacgacuauccuaaauacucagaggaagcaaagcugaauagagagaaaauugauagggucaagcucgagaguacccggaucuaucagauucuggccauauacuccacuguggcuagcucucuuguccuggugguuucauugggggcgaucaguuuuuggaugugcagcaacggaucccuccaaugccguauuuguaucuga

SEQ ID NO: 140100 - RNA, 1701 nt, Artificial Sequence; identical to SEQ ID NO: 138088
  derived and/or modified CDS sequence (opt3) from hemagglutinin__InfluenzaA__AHV83941

SEQ ID NO: 140101 - RNA, 1701 nt, Artificial Sequence
  derived and/or modified CDS sequence (opt3) from hemagglutinin__InfluenzaA__AHV83943
augaaggccauccuggugguccuccuuuacaccuucgcuacagcaaacgccgacacucugugcauuggcuaucacgcgaauaacagcacggauaccguugacacaguguuggagaagaauguaacugugacccauuccgucaacuuacuggaagauaagcacaaugggaaacuauguaagcucagaggaguggcuccccugcaucuugguaaaugcaacauagccggcuggauccuggggaauccugagugugaaucuuugucaacagcaaguagcugguccuacauuguugagaccucuucgucagacaacggaacuugcuauccaggcgauuuuaucaauuacgaagaacucagggagcagcugagcaguguguccucuuucgaacgguuugagauuuucccgaagacaagcuccuggcccaaccacgacucaaauaagggugucaccgccgcuuguccucaugcaggggccaaaaguuuuuauaagaaccugaucuggcucgugaaaaagggaaauagcuacccaaaauuaucucaauccuauauaaacgauaagggcaaggaaguacugguucuuuggggcauccaccaccccucaacgacugcugaccagcagagcuuguaccagaaugccgaugcguacguguucgucgggaccagucgcuauucuaaaaaguuuaaaccugagauugcaauccgaccaaaggugcgugaccaagagggaagaaugaacuacuauuggacacugguggaacccggugauaaaauuacuuucgaggccaccggcaaccuagucguuccuagguacgcuuuuacaauggaacggaaugccggguccggaaucauaauuagcgacaccccagugcaugauugcaacacgacuugucagacaccggagggcgcaaucaauaccucgcuccccuuccagaacauucacccuaucacuaucgguaagugcccaaaauauguaaagucuacaaagcugcgccuugcuaccgggcugagaaaugugcccuccauucagucaaggggauuguuuggcgccauagcgggcuucaucgaagggggauggacggguauggucgacggcugguacggguaucaucaccaaaacgagcagggaaguggcuacgccgcagaccucaaaagcacccagaaugcuauugauaagaucacaaacaaaguuaauuccgugauagagaagaugaacacucaguuuaccgccguggguaaagaguucaaucaccuggagaagcggauugaaaacuuaaauaagaaagucgacgauggguuccuggacaucuggacauacaacgcugagcuccuugugcuguuggaaaaugagcgcacucuagauuaucaugacucuaacguaaagaaccuguacgagaaaguucgaaaucaacucaagaacaaugccaaagaaaucggcaacggauguuuugaguucuaucacaagugcgauaauauguguauggaaagcgugaagaacggcaccuacgacuauccuaaauacucagaggaagcaaagcugaauagagagaaaauugauggggucaaacuugagaguacaaggaucuaucagauucuggccauauacuccaccguggcuagcucuuugguccucgugguuucacugggagcgaucaguuuuuggaugugcagcaacgguuccuuacagugccggauuuguaucuga

SEQ ID NO: 140102 - RNA, 1701 nt, Artificial Sequence
  derived and/or modified CDS sequence (opt3) from hemagglutinin__InfluenzaA__AHV83944
augaaggccauccuggugguccuccuuuacaccuucgcuacagcaaacgccgacacucugugcauuggcuaucacgcgaauaacagcacggauaccguugacacaguguuggagaaaaauguaacugugacccauuccgucaacuuacuggaagaugagcacaaugggaagcuauguaaacucagaggaguggcuccccugcaucuugguaagugcaacauagccggcuggauccuggggaauccugaaugugagucuuugucaacagcaaguagcugguccuacauuguugaaaccucuucgucagacaacggaacuugcuauccaggcgauuuuaucaauuacgaggagcucagggaacagcugagcaguguguccucuuucgagcgguuugaaauuuucccgaaaacaagcuccuggcccaaccacgacucaaauaagggugucaccgccgcuuguccucaugcaggggccaagaguuuuuauaaaaaccugaucuggcucgugaagaaaggaaauagcuacccaaaguuaucucaauccuauauaaacgauaaaggcaaggagguacugguucuuuggggcauccaccaccccucaacgacugcugaccagcagagcuuguaccagaaugccgaugcguacguguucgucgggaccagucgcuauucuaagaaauuuaagccugagauugcaauccgaccaaaagugcgugaccaagaaggaagaaugaacuacuauuggacacugguggagcccggugauaagauuacuuucgaagccaccggcaaccuagucguuccuagguacgcuuuuacaauggagcggaaugccggguccggaaucauaauuagcgacaccccagugcaugauugcaacacgacuugucagacaccggaaggcgcaaucaauaccucgcuccccuuccagaacauucacccuaucacuaucgguaaaugcccaaaguauguaaaaucuacaaagcugcgccuugcuaccgggcugagaaaugugcccuccauucagucaaggggauuguuuggcgccauagcgggcuucaucgaagggggauggacggguauggucgacggcugguacggguaucaucaccaaaacgagcagggaaguggcuacgccgcagaccucaagagcacccagaaugcuauugauaaaaucacaaacaagguaaauuccguuauagagaaaaugaacacucaguuuaccgccguggguaaggaguucaaucaccuggaaaaacggauugagaacuuaaauaagaaggucgacgauggguuccuggacaucuggacauacaacgcugaacuccuugugcuguuggagaaugagcgcacucuagauuaucaugacucuaacgugaaaaaccuguacgaaaagguucgaaaucaacucaaaaacaaugccaaggagaucggcaacggauguuuugaguucuaucacaaaugcgauaauaccuguauggaaagcgugaagaacggcacauacgacuauccuaaguacucagaagaggcaaaacugaauagagagaagauugauggggucaaacuugaaaguaccaggaucuaucagauucuggccauauacuccacuguggcuagcucuuugguccucgugguuucacugggagcgaucaguuuuuggaugugcagcaacgguuccuuacagugccggauuuguaucuga

SEQ ID NO: 140103 - RNA, 1701 nt, Artificial Sequence
  derived and/or modified CDS sequence (opt3) from hemagglutinin__InfluenzaA__AHV83945
augaaggccauccuggugguccuccuuuacaccuucgcuacagcaaacgccgacacucugugcauuggcuaucacgcgaauaacagcacggauaccguugacacaguguuggagaagaauguaacugugacccauuccgucaacuuacuggaagauaagcacaaugggaaacuauguaagcucagaggaguggcuccccugcaucuugguaaaugcaacauagccggcuggauccuggggaauccugagugugaaucuuugucaacagcaaguagcugguccuacauuguugagaccucuucgucagacaacggaacuugcuauccaggcgauuuuaucaauuacgaagaacucagggagcagcugagcaguguguccucuuucgaacgguuugagauuuucccgaagacaagcuccuggcccaaccacgacucaaauaagggugucaccgccgcuuguccucaugcaggggccaaaaguuuuuauaagaaccugaucuggcucgugaaaaagggaaauagcuacccaaaauuaucucaauccuauauaaacgauaagggcaaggaaguacugguucuuuggggcauccaccaccccucaacgacuaccgaccagcagagcuuguaccagaaugcugaugccuacguguucgucgggacaagucgcuauucuaaaaaguuuaaaccugagauugcgauccgaccaaaggugcgugaccaagagggaagaaugaacuacuauuggacucugguggaacccggugauaaaauuaccuucgaggcaacaggcaaccuagucguuccuagguacgccuuuaccauggaacggaaugcuggguccggaaucauaauuagcgacacgccagugcaugauugcaacacuacaugucagaccccggagggcgccaucaauacuucgcuccccuuccagaacauucacccuaucacaaucgguaagugcccaaaauauguaaagucuaccaagcugcgccuugcaacggggcugagaaaugugcccuccauucagucaaggggauuguuuggcgcuauagccggcuucaucgaagggggauggaccgguauggucgacggcugguacggguaucaucaccaaaacgagcagggaaguggcuacgcggccgaccucaaaagcacacagaaugcaauugauaagaucacuaacaaaguuaauuccgugauagagaagaugaacacccaguuuacagcuguggguaaagaguucaaucaccuggagaagcggauugaaaacuuaaauaagaaagucgacgauggguuccuggacaucuggacuuacaacgccgagcuccuugugcuguuggaaaaugagcgcacccuagauuaucaugacucuaacguaaagaaccuguacgagaaaguucgaaaucaacucaagaacaaugcuaaagaaaucggcaacggauguuuugaguucuaucacaagugcgauaauacauguauggaaagcgugaagaacggcaccuacgacuauccuaaauacucagaggaagccaagcugaauagagagaaaauugauggggucaaacuugagaguacuaggaucuaucagauucuggcaauauacuccacgguggccagcucuuugguccucgugguuucacugggagcuaucaguuuuuggaugugcagcaacgguuccuuacagugccggauuuguaucuga

SEQ ID NO: 140104 - RNA, 1701 nt, Artificial Sequence
  derived and/or modified CDS sequence (opt3) from hemagglutinin__InfluenzaA__AHV83947
augaaggccauccuggugguccuccuuuacaccuucgcuacagcaaacgccgacacucugugcauuggcuaucacgcgaauaacagcacggauaccguugacacaguguuggagaaaaauguaacugugacccauuccgucaacuuacuggaagauaagcacaaugggaaacuauguaagcucagaggaguggcuccccugcaucuugguaaaugcaacauagccggcuggauccuggggaauccugagugugaaucuuugucaacagcaaguagcugguccuacauuguugagaccucuucgucagacaacggaacuugcuauccaggcgauuuuaucaauuacgaggagcucagggagcagcugagcaguguguccucuuucgaacgguuugagauuuucccgaagacaagcuccuggcccaaccacgacucaaauaagggugucaccgccgcuuguccucaugcaggggccaaaaguuuuuauaagaaccugaucuggcucgugaaaaagggaaauagcuacccaaaauuaucucaauccuauauaaacgauaagggcaaggaaguacugguucuuuggggcauccaccaccccucaacgacugcugaccagcagagcuuguaccagaaugccgaugcguacguguucgucgggaccagucgcuauucuaaaaaguuuaaaccugagauugcaauccgaccaaaggugcgugaccaagagggaagaaugaacuacuauuggacacugguggaacccggugauaaaauuacuuucgaggccaccggcaaccuagucguuccuagguacgcuuuuacagugaagcggaaugccggguccggaaucauaauuagcgacaccccaguacaugauugcaacacgacuugucagacaccggaaggcgcaaucaauaccucgcuccccuuccagaacauucacccuaucacuaucgguaaaugcccaaaguaugugaagucuacaaaacugcgccuugcuaccgggcugagaaauguccccuccauucagucaaggggauuguuuggcgccauagcgggcuucaucgaagggggauggacggguaugguggacggcugguacggguaucaucaccaaaacgaacagggaaguggcuacgccgcagaccaaaagagcacccagaaugcuauugauaaaaucacaaacaagguuaauuccgugauagagaaaaugaacacucaguuuaccgccgucgguaaggaguucaaucaccucgaaaagcggauugagaaccugaauaaaaagguggacgauggguucuuagacaucuggacauacaacgcugaacugcucguacuucuggagaaugaacgcacuuuggauuaucaugacucuaacguuaaaaaccuauacgagaaggugcgaaaucagcugaaaaacaaugccaaggagaucggcaacggauguuuugaguucuaucacaagugcgauaauaccuguauggaaagcgucaaaaacggcacauacgacuauccuaaguacucagaagaggcaaaacucaauagagaaaagauugauggggugaaacuggagaguaccaggaucuaucagauucuugccauauacuccacugucgcuagcucucugguguugguugugucacucggagcgaucaguuuuuggaugugcagcaacgguucccugcaaugccggauuuguaucuga

SEQ ID NO: 140105 - RNA, 1701 nt, Artificial Sequence; identical to SEQ ID NO: 138088
  derived and/or modified CDS sequence (opt3) from hemagglutinin__InfluenzaA__AHV83948

SEQ ID NO: 140106 - RNA, 1701 nt, Artificial Sequence; identical to SEQ ID NO: 138088
  derived and/or modified CDS sequence (opt3) from hemagglutinin__InfluenzaA__AHV83949

SEQ ID NO: 140107 - RNA, 1701 nt, Artificial Sequence; identical to SEQ ID NO: 138088
  derived and/or modified CDS sequence (opt3) from hemagglutinin__InfluenzaA__AHV83950

SEQ ID NO: 140108 - RNA, 1701 nt, Artificial Sequence
  derived and/or modified CDS sequence (opt3) from hemagglutinin__InfluenzaA__AHV83953
augaagaccaucauugcccugagcuacauacucugccuuguguucgcucagaaacugcccggcaacgacaauuccacagcaacuuuguguuuagggcaccaugccgucccuaacggaacgaucguuaagaccauuacaaaugauagaaucgaggugacuaacgcgaccgaacugguacaaaauucuucaauuggugagaucugcgacaguccacaccagauacuagauggcgaaaacuguacacucaucgacgcucugcuuggggauccgcagugcgacggauuucagaauaaaaagugggaucuguucguggagaggagcaaagccuauuccaacuguuaccccuaugacgucccugauuacgcaucuuugcggucgcucguggccucaagcggcacccuggaauuuaauaacgagaguuucaauugggcugguguuacucaaaacgggacauccucugcaugcauucgcggaagcaauuccucauuuuucagucgacugaacuggcucacccauuuaaauuuuaaguauccagcccugaacgugacgaugcccaacaaugagcaguucgacaaguuguacaucuggggcguccaccauccuggcacugauaaagaccagauuuuucuuuaugcucagagcucugggcguaucaccguguccacaaagagaucacaacaggccguaauaccaaacauuggaagcaggccccggauccgcaauauuccuaguagaaucucuaucuacuggacuauuguuaaaccaggugauauacugcuaaucaacuccaccggcaaucucauugcgccgaggggguacuucaagauccggagcggaaaaucgucuauaaugcgcuccgacgcacccauuggcaaguguaagucagaaugcaucacaccuaacgguaguaucccaaaugacaaacccuuucagaacgugaaucgaauuaccuauggggccuguccuagauacgucaagcagagcacgcugaaacuugcuacuggaaugaggaacgugccagagaagcaaacacggggcaucuucggcgccauugcaggguuuauagaaaauggaugggaggguaugauggauggcugguauggguuccgucaccagaacuccgagggacgcggccaggcugccgaccugaaaucuacccaagcggccaucgaucagauuaaugguaaguugaacagacucaucgggaaaacuaaugaaaaguuccaccagaucgagaaggaauuuagcgagguggaaggcaggauucaggaccuggagaaauacgucgaggauacaaagauagacuuauggucauauaacgcagaacugcucguugcucuugagaaccaacauaccaucgaucugacggacagugaaaugaauaaauuguucgagaagaccaaaaagcagcuacgggaaaacgccgaggaucugggaaauggcugcuuuaagauuuaccacaaaugugacaacgcuugcaucggguccauucgaaauggaacauaugaucaugacguguaccgcgacgaggcccucaacaauagauuccagaucaaggguguagaacugaaaagcggcuacaaggauuggauacuuuggaucucuuuugcaauuucaugcuuccuguuguguguggcccuccugggguuuaucaugugggcuugccagaaaggaaacauuagguguaauaucugcauauga

SEQ ID NO: 140109 - RNA, 1701 nt, Artificial Sequence; identical to SEQ ID NO: 139940
  derived and/or modified CDS sequence (opt3) from hemagglutinin__InfluenzaA__AHV83954

SEQ ID NO: 140110 - RNA, 1701 nt, Artificial Sequence
  derived and/or modified CDS sequence (opt3) from hemagglutinin__InfluenzaA__AHV83956
augaagaccaucauugcccugagcuacauacucugccuuguguucgcucagaaacugcccggcaacgacaauuccacagcaacuuuguguuuagggcaccaugccgucccuaacggaacgaucguuaagaccauuacaaaugauagaaucgaggugacuaacgcgaccgaacugguacaaaauucuucaauuggugagaucugcgacaguccacaccagauacuagauggcgaaaacuguacacucaucgacgcucugcuuggggauccgcagugcgacggauuucagaauaaaaagugggaucuguucguggagaggagcaaagccuauuccaacuguuaccccuaugacgucccugauuacgcaucuuugcggucgcucguggccucaagcggcacccuggaauuuaauaacgagaauuucaacugggcugguguuacucaaaaugggacaaguuccgcaugcauucgcggaucuaacagcuccuuuuucucacgacugaauuggcucacccauuuaaacuuuaaguauccagcccugaacgugacgaugcccaauaacgagcaguucgacaaguuguacaucuggggcguccaccauccuggcacugauaaagaccagauuuuucuuuaugcucagaguagcgggcguaucaccgugucuacaaagagaucccaacaggccguaauaccaaauauuggaucaaggccccggauccgcaacauuccuagcagaaucaguaucuacuggacuauuguuaaaccaggugauauacugcuaaucaauucuaccggcaaccucauugcgccgaggggguacuucaagauccgguccggaaaaagcucgauaaugcgcucugacgcacccauuggcaaguguaaguccgaaugcaucacaccuaaugguucaaucccaaacgacaaacccuuucagaaugugaaccgaauuaccuauggggccuguccuagauacgucaagcagaguacgcugaaacuugcuacuggaaugaggaaugugcaagagaagcagacacggggcaucuucggcgccauugcaggguuuauagaaaacggaugggaggguaugaaagauggcugguauggguuccgucaccagaauagcgagggacgcggccaagcugccgaccugaaguccacccaggcggccaucgaucagauuaacgguaaauugaauagacucaucgggaagacuaacgaaaaguuccaccagaucgagaaagaauuuucugagguggaaggcaggauucaagaccuggagaaguacgucgaggauacaaaaauagacuuauggagcuauaacgcagaacugcucguugcucuugagaaucagcauaccaucgaucugacggacucagaaaugaacaaguuguucgagaaaaccaagaagcagcuacgggaaaaugccgaggauaugggaaacggcugcuuuaaaauuuaccacaagugugacaaugcuugcaucgggaguauucgaaacggaacauaugaucaugacguguaccgcgacgaggcccugaauaacagauuccagaucaaagguguagaacucaaguccggcuacaaagauuggauacuguggaucagcuuugcaauuucuugcuuccuucuguguguggccuugcucggguuuaucaugugggcuugccaaaagggaaauauuagguguaacaucugcauauga

SEQ ID NO: 140111 - RNA, 1701 nt, Artificial Sequence
  derived and/or modified CDS sequence (opt3) from hemagglutinin__InfluenzaA__AHZ13523
augaagaccaucauugcccugagcuacauauucugccucguguuugcucagaaacuucccggcaacgacaauuccacagcaacucuguguuuggggcaccaugccgucccuaacggaacguuaguuaagaccaucacaaaugaucaaauugaggugacuaacgcgaccgaacugguacagucuucaaguacagguagaaucugcgacagcccacacaggauucuagauggcaaaaauuguacccucaucgacgcucugcuuggggauccgcauugcgacggauuccagaacgagaagugggaucuguuuguggaacgguccaaagccuucucuaauuguuaucccuacgacgucccugauuaugcaucguugcgcucacucguggccagcaguggcacucuggaguuuauaaacgaagguuucaauuggacagggguuacccaguccggaggcucuuacgcuugcaagcgaggcagcgugaacuccuuuuucucacgucugaauuggcucuauaagagugagagcaaauacccagucuuaaacgugacgaugcccaauaacgggaaguuugacaaacuguauaucuggggaguacaccauccuucuacugauaaggagcaaaccaaucuuuacguuagagcauccgguagggugacagucucaacuaaacggagccagcagaccgugauuccaaacaucggcagucgccccugggugagaggguugucuuccaggauuagcaucuacuggacaauagucaagccuggagacauucugcuaaucaacucgaccggcaaucucauugccccacgggguuauuucaagauccgcacggggaaaucuuccaucaugcgaucagaugcuccgauuggaacuuguaguuacgaaugcauaacacccaacggcagcaucccuaaugacaagccauuucagaacguuaauaaaauuaccuauggcgccugucccagauacgugaagcaaaacacucugaaacuugcgacagggaugaggaauguaccugagaagcagacccggggaaucuucggugcaauagccggcuuuauugaaaacgggugggagggaaugguggacggcugguaugguuuccgucaccaaaauuccgaggggacgggccaggcugccgaucugaaaucuacccaggcagcuaucgaccagaucaacggaaaguugaaucgccucauugaaaagacaaacgagaaauuccaccagaucgaaaaggaguuuagcgaagucgagggcaggauucaagaucuggagaaauacguggaagacacuaagauagauuuauggucauauaaugccgagcugcucguugcgcuugaaaaccagcauaccaucgaccugacagauagugagaugaauaaauuguucgaaaagacuagaaagcagcuacgggagaacgccgaggacauggggaacggaugcuuuaaaauuuaccacaagugugauaaugcaugcaucgguuccauccgaaacggcaccuacaaucaugacguguaucgcgaugaagcucugaacaauagauuccagauuaaaggggucgagcucaagagcggauacaaagacuggauacuguggaucucuuuugccauuucaugcuuccuucugugugugguauugcucggcuuuaucaugugggcuugccaaaaggguaacauuagguguaauaucugcauauga

SEQ ID NO: 140112 - RNA, 1698 nt, Artificial Sequence; identical to SEQ ID NO: 131664
  derived and/or modified CDS sequence (opt3) from hemagglutinin__InfluenzaA__AHZ13582

SEQ ID NO: 140113 - RNA, 1701 nt, Artificial Sequence
  derived and/or modified CDS sequence (opt3) from hemagglutinin__InfluenzaA__AHZ35584
augaagaccaucauugcccugagcuacauacucugccuuaucuucgcucaggagauucccggcaacgacaauuccacagcaacucuguguuuggggcaccaugccgugccuaacggaacgaucgucaaaaccauuacaaaugaucaaaucgaaguuacuaacgcgaccgaguuagugcagucuucaaguacaggugaaauaugcaauagcccacaccagauccuggacggcgagaacuguacccuaauugaugcucuccugggggacccgcagugcgaugacuuucaaaauaagaaaugggaucuuuucguagaaagauccaaggcccauucuaacuguuaucccuacgacgugccugauuaugcaucgcugaggucauuggucgccagcaguggaacucucgaguuuaauaacgaguccuucaauuggacaggcgugacccagaacgguacgucuagcgcuugcauccggcgcuccaauaacucauuuuucagucgacugaauuggcugacucaccucaacuuuaaauacccagcauuaaacguuaccaugcccaauaacgaacaguucgacaagcuguauauuuggggagugcaucacccugggacagauaaggaccagaucuuucuuuacgcccaagcuagcggccguauaacugucucuaccaaaagaucccagcaggccgugauuccaaauaucggcucaaggccccggguacgcaacauuccuagcagaguuaguaucuauuggacaaucgugaagccaggggauauuuugcugauaaauucuaccggaaaccuaaucgcgccgagggguuacuucaaaauucgguccggcaagagcucgaucaugcgcucugacgcacccauagggaaauguaauuccgccugcauuacgccuaacggaucaaucccaaaugacaagcccuuucagaacgucaaucgaaucacuuacggcgcuuguccuagauaugugaagcaaaacacacucaaacuggccaccgguaugaggaaugugccagagaagcagacucgggggauuuucggagcaaucgcuggcuuuauugaaaacggcugggaggggauggucgauggaugguacgguuuccgucaccagaauagugagggccgcgggcaagccgcggaccuuaaaagcacacaggccgcaauagaucagaucaacggaaagcugaacagauugauuggcaaaaccaaugaaaaguuccaucagaucgagaaagaauuuuccgagguugaagguaggauccaagaccucgagaaguauguggaggauacgaagauugaccuguggucuuacaacgcugaauuacugguagcccucgagaaucagcacaccauagaucuuacagacagcgaaaugaacaaacuguucgagaagacuaaaaagcaguugcgggaaaaugcugaggauauggggaacggcugcuuuaaaaucuaucauaagugugacaaugccugcauuggaucaauccgaaacggcaccuacgaucacgacguguaucgcgacgaggcacuaaauaacagauuccagauuaagggggucgaacugaaaaguggauacaaggauuggauccucuggauauccuuugccaucagcugcuuccugcuuuguguggcucuguuggguuuuauuaugugggcgugccaaaaaggcaauaucagguguaacauuugcaucuga

SEQ ID NO: 140114 - RNA, 1701 nt, Artificial Sequence
  derived and/or modified CDS sequence (opt3) from hemagglutinin__InfluenzaA__AHZ35608
augaagaccaucauugcccugagcuacauacucugccuuaucuucgcucaggagauucccggcaacgacaauuccacagcaacucuguguuuggggcaccaugccgugccuaacggaacgaucgucaaaaccauuacaaaugaucaaaucgaaguuacuaacgcgaccgaguuagugcagucuucaaguacaggugaaauaugcaauagcccacaccagauccuggacggcgagaacuguacccuaauugaugcucuccugggggacccgcagugcgaugacuuucaaaauaaggaaugggaucuuuucguagagagauccaaagcccauucuaacuguuaucccuacgacgugccugauuaugcaucgcugaggucauuggucgccagcaguggaacucucgaguuuaauaacgaauccuucaauuggacaggcgugacccagaacgguacgucuagcgcuugcauccggcgcuccaauaacucauuuuucagucgacugaauuggcugacucaccucaacuuuaaguacccagcauuaaacguuaccaugcccaauaacgagcaguucgacaaacuguauauuuggggagugcaucacccugggacagauaaggaccagaucuuucuuuacgcccaagcuagcggccguauaacugucucuaccaagagaucccagcaggccgugauuccaaauaucggcucaaggccccggguacgcaacauuccuagcagaguuaguaucuauuggacaaucgugaaaccaggggauauuuugcugauaaauucuaccggaaaccuaaucgcgccgagggguuacuucaagauucgguccggcaaaagcucgaucaugcgcucugacgcacccauagggaaguguaauuccgccugcauuacgccuaacggaucaaucccaaaugacaaacccuuucagaacgucaaucgaaucacuuacggcacauguccuagauaugugaagcaaaacacccucaagcuggcuacugguaugaggaaugugccagaaaaacagacacgggggauuuucggagccaucgcaggcuuuauugagaacggcugggaggggauggucgauggaugguacgguuuccgucaccagaauagugaaggccgcgggcaagcugccgaccuuaagagcacccaggcggccauagaucagaucaacggaaaacugaacagauugauuggcaagacgaaugagaaauuccaucagaucgaaaaggaguuuuccgaaguugaggguaggauccaagaccucgagaaauauguggaagauaccaagauugaccuguggucuuacaacgcagaguuacugguagcucucgaaaaucagcacacaauagaucuuacugacagcgagaugaacaagcuguucgagaaaaccaagaaacaguugcgggaaaaugccgaggauauggggaacggcugcuuuaagaucuaucauaaaugugacaaugcuugcauuggaucaauccgaaacggcacauacgaucacgacguguaucgcgacgaagcccuaaauaacagauuccagauuaagggggucgagcugaagaguggauacaaagauuggauccucuggauauccuuugcaaucagcugcuuccugcuuuguguggcccuguuggguuuuauuaugugggcuugccaaaagggcaauaucagguguaacauuugcaucuga

SEQ ID NO: 140115 - RNA, 1701 nt, Artificial Sequence; identical to SEQ ID NO: 140113
  derived and/or modified CDS sequence (opt3) from hemagglutinin__InfluenzaA__AHZ35620

SEQ ID NO: 140116 - RNA, 1701 nt, Artificial Sequence; identical to SEQ ID NO: 140113
  derived and/or modified CDS sequence (opt3) from hemagglutinin__InfluenzaA__AHZ35632

SEQ ID NO: 140117 - RNA, 1701 nt, Artificial Sequence; identical to SEQ ID NO: 140113
  derived and/or modified CDS sequence (opt3) from hemagglutinin__InfluenzaA__AHZ35644

SEQ ID NO: 140118 - RNA, 1701 nt, Artificial Sequence; identical to SEQ ID NO: 140113
  derived and/or modified CDS sequence (opt3) from hemagglutinin__InfluenzaA__AHZ35656

SEQ ID NO: 140119 - RNA, 1701 nt, Artificial Sequence; identical to SEQ ID NO: 140113
  derived and/or modified CDS sequence (opt3) from hemagglutinin__InfluenzaA__AHZ35668

SEQ ID NO: 140120 - RNA, 1701 nt, Artificial Sequence; identical to SEQ ID NO: 140114
  derived and/or modified CDS sequence (opt3) from hemagglutinin__InfluenzaA__AHZ35680

SEQ ID NO: 140121 - RNA, 1701 nt, Artificial Sequence; identical to SEQ ID NO: 140113
  derived and/or modified CDS sequence (opt3) from hemagglutinin__InfluenzaA__AHZ35692

SEQ ID NO: 140122 - RNA, 1701 nt, Artificial Sequence; identical to SEQ ID NO: 140113
  derived and/or modified CDS sequence (opt3) from hemagglutinin__InfluenzaA__AHZ35716

SEQ ID NO: 140123 - RNA, 1701 nt, Artificial Sequence; identical to SEQ ID NO: 140114
  derived and/or modified CDS sequence (opt3) from hemagglutinin__InfluenzaA__AHZ35728

SEQ ID NO: 140124 - RNA, 1701 nt, Artificial Sequence; identical to SEQ ID NO: 140113
  derived and/or modified CDS sequence (opt3) from hemagglutinin__InfluenzaA__AHZ35740

SEQ ID NO: 140125 - RNA, 1701 nt, Artificial Sequence; identical to SEQ ID NO: 140113
  derived and/or modified CDS sequence (opt3) from hemagglutinin__InfluenzaA__AHZ35752

SEQ ID NO: 140126 - RNA, 1701 nt, Artificial Sequence; identical to SEQ ID NO: 140113
  derived and/or modified CDS sequence (opt3) from hemagglutinin__InfluenzaA__AHZ35764

SEQ ID NO: 140127 - RNA, 1701 nt, Artificial Sequence; identical to SEQ ID NO: 140113
  derived and/or modified CDS sequence (opt3) from hemagglutinin__InfluenzaA__AHZ35776

SEQ ID NO: 140128 - RNA, 1701 nt, Artificial Sequence
  derived and/or modified CDS sequence (opt3) from hemagglutinin__InfluenzaA__AHZ35823
augaaggccauccuggugguccuccuuuacaccuucgcuauugcaaacgccgacacacugugcauaggcuaucacgcgaauaacagcacugauacgguugacaccguguuggagaaaaauguaacagugacucauuccgucaacuuacuggaagauaagcacaaugggaaacuauguaagcucagaggaguggcuccccugcaucuugguaaaugcaacaucgccggcuggauucuggggaauccugagugugaaucuuugucaaccgcaaguagcugguccuacaucguugagacaucuucgucagacaacggaaccugcuauccaggcgauuuuauuaauuacgaggagcucagggagcagcugagcaguguguccucuuucgaacgguuugagauguucccgaagacuagcuccuggcccaaccacgacucaaauaagggugucacagccgcuuguccucaugcaggggccaaaaguuuuuauaagaaccugaucuggcucgugaaaaagggaaauagcuacccaaaauuaucuaaguccuauauaaacgauaagggcaaagaaguacugguucuuuggggcauccaccaccccucaaccacggcugaccaacagagcuuguaccagaaugccgaugcguacguguucgucgggacuucccgcuauucuaagaaauuuaagccugagauugcaauccgaccaaaagugcgugaccaggagggaagaaugaacuacuauuggacccugguggaacccggugauaagauuacauucgaggccacuggcaaccuagucguuccuagguacgcuuuugccauggaacggaaugcaggguccggaaucauaauuagcgacaccccagugcaugauugcaacacaaccugucaaacgccgaaaggcgcuaucaauacuucgcuccccuuccagaacauucacccuaucacaaucgguaagugcccaaaguauguaaaaucuaccaagcugcgccuugccacugggcugagaaaugugcccuccauucagucaaggggauuguuuggcgcgauagccggcuucaucgaagggggauggacagguauggucgacggcugguacggguaucaucaccagaacgaacaaggaaguggcuacgcagcugaccucaaaagcacccagaaugccauugauaagaucacgaacaaagugaauaguguuauagagaagaugaacacccaguuuacagcuguggguaaggaguucaaucaccuggaaaaacggauugagaacuuaaauaagaaagucgacgauggguuccuggacaucuggacuuacaacgccgaacuccuugugcuguuggagaaugaacgcacccuagauuaucaugacucuaacguaaagaaccuguacgagaaaguucgaaaucagcucaagaacaaugcaaaggagaucggcaacggauguuuugaguucuaucacaaaugcgauaauacauguauggaaagcgugaagaacggcacuuacgacuauccuaaauacucagaagaggccaagcugaauagagaagagauugauggggucaaacuugagaguaccaggaucuaucaaauucuggcuauauacuccacaguggcgagcucuuugguccucgugguuucacugggagcaaucaguuuuuggaugugcagcaacgguuccuuacagugccggauuuguaucuga

SEQ ID NO: 140129 - RNA, 1701 nt, Artificial Sequence; identical to SEQ ID NO: 140128
  derived and/or modified CDS sequence (opt3) from hemagglutinin__InfluenzaA__AHZ35834

SEQ ID NO: 140130 - RNA, 1701 nt, Artificial Sequence; identical to SEQ ID NO: 140128
  derived and/or modified CDS sequence (opt3) from hemagglutinin__InfluenzaA__AHZ35845

SEQ ID NO: 140131 - RNA, 1701 nt, Artificial Sequence; identical to SEQ ID NO: 140128
  derived and/or modified CDS sequence (opt3) from hemagglutinin__InfluenzaA__AHZ35856

SEQ ID NO: 140132 - RNA, 1701 nt, Artificial Sequence
  derived and/or modified CDS sequence (opt3) from hemagglutinin__InfluenzaA__AHZ35867
augaagaccaacaucgcccugagcuacauucucugccuuguguccgcucagaaacugcccggcaaugacaacucuacagcaacuuuguguuuagggcaccaugccgucccuaauggaacgauaguuaagaccaucacaaacgaucaaauugaggugacuaaugcgaccgaacugguacagucaaguagcacaggugagaucugcaacuccccacaccagauucuagacggcgaaaauuguacccucaucgaugcucugcuuggggacccgcagugcgauggauuccaaaacaaaaagugggaccuguuuguggagagaucuaaagcccauucgaauuguuaucccuacgaugucccugacuaugcaucauugaggagccucguggccaguuccggcacucuggaguucaacaaugaaucuuuuaacuggacagguguuacccagaaugggacgagcuccgcuugcauacggcgcucaaacaauaguuucuuuagccgacugaacuggcucacucacuuaaacuucaaguacccagcacugaaugugaccaugcccaacaaugagcaguuugauaagcuguauaucuggggaguccaucacccuggcacagacaaagaucagauuuucuuguacgcccaagcugccggccguaucacugugucuaccaagagaucccagcaggcgguaauuccaaacaucgggucaaggccccggguucgcaauauaccuagcagagugaguauuuauuggacaaucgucaaaccaggagacauucugcuaaucaacucuaccgguaaucucaucgcaccgaggggcuacuuuaagauucgguccgggaaaagcucgauaaugcgcucugaugcccccaucggaaaguguaacuccgcuugcauuacgccuaauggcucaaucccaaacgacaagcccuuccagaaugugaaccgaauaacuuacggugccuguccuagauaugugaaacaaaauacacugaaacuugcaaccgggaugaggaacgucccagaaaaacagacucggggaauuuuuggcgcuaucgccggcuucaucgagaaugggugggaaggaaugguugacgguugguacggcuuucgucaccagaacagugaggggcgcggacaagcggccgaucuuaagagcacacaggcagcuauugaccagaucaacggcaaauugaauagacucauugguaagaccaacgagaaauuccaucagauagaaaaggaguucuccgaaguggaggggaggauccaagaucuggaaaaguauguagaggacacgaaaauugauuuauggucuuacaaugccgagcugcucgugguccuugaaaaccagcacaccaucgaccugacagauagcgagaugaauaaguuguuugaaaagacuaagaaacagcuacgggagaacgcugaagacaugggcaauggaugcuucaagaucuaucauaagugugauaacgccugcauuggcucaauacgaaaugggaccuacgaccacgauguguaucgcgacgaggcacugaacaauagauuucagaucaaaggaguugagcucaagagugguuacaaagacuggauucuguggaucuccuucgccauuagcugcuuucuucuguguguggcuuugcucggcuucaucaugugggcgugccaaaaggggaacauaagguguaauaucugcauuuga

SEQ ID NO: 140133 - RNA, 1701 nt, Artificial Sequence
  derived and/or modified CDS sequence (opt3) from hemagglutinin__InfluenzaA__AHZ35879
augaagaccaacaucgcccugagcuacauucucugccuuguguccgcucagaaacugcccggcaaugacaacucuacagcaacuuuguguuuagggcaccaugccgucccuaauggaacgauaguuaagaccaucacaaacgaucaaauugaggugacuaaugcgaccgaacugguacagucaaguagcacaggugagaucugcaacuccccacaccagauucuagacggcgaaaauuguacccucaucgaugcucugcuuggggacccgcagugcgauggauuccaaaacaaaaagugggaccuguuuguggagagaucuaaagcccauucgaauuguuaucccuacgaugucccugacuaugcaucauugaggagccucguggccaguuccggcacucuggaguucaacaaugaaucuuuuaacuggacagguguuacccagaaugggacgagcuccgcuugcauacggcgcucaaacaauaguuucuuuagccgacugaacuggcucacucacuuaaacuucaaguacccagcacugaaugugaccaugcccaacaaugagcaguuugauaagcuguauaucuggggaguccaucacccuggcacagacaaagaucagauuuucuuguacgcccaagcugccggccguaucacugugucuaccaagagaucccagcaggcgguaauuccaaacaucgggucaaggccccggguucgcaauauaccuagcagagugaguauuuauuggacaaucgucaaaccaggagacauucugcuaaucaacucuaccgguaaucucaucgcaccgaggggcuacuuuaagauucgguccgggaaaagcucgauaaugcgcucugaugcccccaucggaaaguguaacuccgcuugcauuacgccuaauggcucaaucccaaacgacaagcccuuccagaaugugaaccgaauaacuuacggugccuguccuagauaugugaaacaaaauacacugaaacuugcaaccgggaugaggaacgucccagaaaaacagacucggggaauuuuuggcgcuaucgccggcuucaucgagaaugggugggaaggaaugguugacgguugguacggcuuucgucaccagaacagugaggggcgcggacaagcggccgaucuuaagagcacacaggcagcuauugaccagaucaacggcaaauugaauagacucauugguaagaccaacgagaaauuccaucagauagaaaaggaguucuccgaaguggaggggaggauccaagaucuggaaaaguauguagaggacacgaaaauugauuuauggucuuacaaugccgagcugcucguggcucuugaaaaccagcacaccaucgaccugacagauagcgagaugaauaaguuguuugaaaagacuaagaaacagcuacgggagaacgccgaagacaugggcaauggaugcuucaagaucuaucauaagugugauaacgcaugcauuggcucaauacgaaaugggaccuacgaccacgaugucuaucgcgacgaggcccugaacaauagauuucagaucaaaggaguggagcucaagagugguuacaaagacuggauucuguggaucuccuucgcuauuagcugcuuucuucuguguguugcguugcucggcuucaucaugugggcaugccaaaaggggaacauaagguguaauaucugcauuuga

SEQ ID NO: 140134 - RNA, 1701 nt, Artificial Sequence; identical to SEQ ID NO: 140128
  derived and/or modified CDS sequence (opt3) from hemagglutinin__InfluenzaA__AHZ35891

SEQ ID NO: 140135 - RNA, 1701 nt, Artificial Sequence; identical to SEQ ID NO: 140128
  derived and/or modified CDS sequence (opt3) from hemagglutinin__InfluenzaA__AHZ35902

SEQ ID NO: 140136 - RNA, 1710 nt, Artificial Sequence
  derived and/or modified CDS sequence (opt3) from hemagglutinin__InfluenzaA__AHZ35913
augaaggccauccuggugguccuccuuuacaccuucgcuauugcaaacgccgacacacugugcauaggcuaucacgcgaauaacagcacugauacgguugacaccguguuggagaaaaauguaacagugacucauuccgucaacuuacuggaagauaagcacaaugggaaacuauguaagcucagaggaguggcuccccugcaucuugguaaaugcaacaucgccggcuggauucuggggaauccugagugugaaucuuugucaaccgcaaguagcugguccuacaucguugagacaucuucgucagacaacggaaccugcuauccaggcgauuuuauuaauuacgaggagcucagggagcagcugagcaguguguccucuuucgaacgguuugagauguucccgaagacuagcuccuggcccaaccacgacucaaauaagggugucacagccgcuuguccucaugcaggggccaaaaguuuuuauaagaaccugaucuggcucgugaaaaagggaaauagcuacccaaaauuaucuaaguccuauauaaacgauaagggcaaagaaguacugguucuuuggggcauccaccaccccucaaccacggcugaccaacagagcuuguaccagaaugccgaugcguacguguucgucgggacuucucgcuauucuaagaaauuuaagccugagauugcaauccgaccaaaagugcgugaccaggagggaagaaugaacuacuauuggacccugguggaacccggugauaagauuacauucgaggccacuggcaaccuagucguuccuagguacgcuuuugccauggaacggaaugcaggguccggaaucauaauuagcgacaccccagugcaugauugcaacacaaccugucaaacgccgaaaggcgcuaucaauacuucgcucacaucucugcccuuccagaacauucacccuaucaccaucgguaagugcccaaaguauguaaaauccacuaaacuucgccuggccacaggguugagaaaugugcccucaauucagaguaggggacucuuuggcgcgauagccggcuucaucgaagggggauggaccgguauggucgacggcugguacggguaucaucaccagaacgaacaaggaagcggcuacgcagcugaccugaaguccacgcagaaugccauugauaagaucaccaacaaagugaauaguguuauagagaagaugaacacacaguuuacugcuguggguaaggaguucaaucacuuagaaaaacggauugagaaccugaauaagaaagucgacgauggguuccucgacaucuggaccuacaacgccgaacuucugguguugcuagagaaugaacgcacacuggauuaucaugacagcaacguaaagaaccucuacgagcgaguuagaaaucagcugaaaaacaaugcaaaggagaucggcaacggauguuuugaguucuaucacaagugcgauaauacuuguauggaaucagugaaaaacggcaccuacgacuauccuaaguacagugaagaggccaaacuuaauagggaagagauugauggggucaagcuggaguccacacggaucuaucaaauuuuggcuauauacagcaccguggcgucuucacucguccuggugguuaguuuaggagcaaucagcuuuuggaugugcuccaacgguucucugcagugccguauuuguaucuga

SEQ ID NO: 140137 - RNA, 1701 nt, Artificial Sequence
  derived and/or modified CDS sequence (opt3) from hemagglutinin__InfluenzaA__AHZ35924
augaaggccauccuggugguccuccuuuacaccuucgcuacagcaaacgccgacacucugugcauuggcuaucacgcgaauaacagcacggauaccguugacacaguguuggagaaaaauguaacugugacccauuccgucaacuuacuggaagauaagcacaaugggaaacuauguaagcucagaggaguggcuccccugcaucuugguaaaugcaacauagccggcuggauccuggggaauccugagugugaaucuuugucaacagcaaguagcugguccuacauuguugagaccucuucgucagacaacggaacuugcuauccaggcgauuuuaucaauuacgaggagcucagggagcagcugagcaguguguccucuuucgaacgguuugagauuuucccgaagacaagcuccuggcccaaccacgacucaaauaagggugucaccgccgcuuguccucaagcaggggccaaaaguuuuuauaagaaccugaucuggcucgugaaaaagggaaauagcuacccaaaauuaucuaaguccuauauaaacgauaagggcaaagaaguacugguucuuuggggcauccaucaccccucaacgagcgcugaccagcagaguuuguaccagaaugccgaugcguacguguucgucgggacuucuaaguauuccaaaaaguuuaaaccugagauugcagugcgcccaaaggugcgagaccaagagggacguaugaacuacuauuggacccuggucgaacccggugauaaaaucacauucgaggccacuggcaaccuacucguuccuagauacgcuuuugccauggaaaggaaugcagggagcggaauuaucauaucggacaccccagugcacgauugcaacacaaccugucagacgccgaagggcgcuauuaauacuucucugcccuuccagaacauccauccuauuacaaucgguaagugcccaaaauauguaaaguccaccaaacuucggcuggccacuggguugcgcaaugugcccucaacacagaguagaggacucuuuggcgcgaucgccggcuucauugaagggggauggaccgguauggucgacggcugguacggguaucaccaucaaaacgcacagggaagcggcuacgcugccgaccugaaguccacgcagaaugcuauagauaaaaucaccaacaagguaaauucuguuauugaaaagaugaacacacaguuuacugccguggguaaagaguucaaucacuuagagaagaggaucgaaaaccugaauaaaaaggucgacgauggguuccucgacauauggaccuacaacgcagagcuucugguguugcuagaaaaugagcggacacuggauuaucacgacagcaacgugaaaaaccucuacgaaaagguucgcucacaacugaagaauaacgccaaagagauuggcaauggauguuuugaguucuaucauaagugcgauaacacuuguauggaaagugugaaaaauggcaccuacgacuauccuaaguacuccgaggaagcuaaacuuaaccgagaggaaaucgauggggucaagcuggagagcacaagaaucuaucagauuuuggcgaucuacucuaccguggcaucaagucucguccuggugguuagcuuaggagccauuuccuuuuggaugugcucuaaugguucgcugcagugcaggauauguaucuga

SEQ ID NO: 140138 - RNA, 1701 nt, Artificial Sequence
  derived and/or modified CDS sequence (opt3) from hemagglutinin__InfluenzaA__AHZ35935
augaaggccauccuggugguccuccuuuacaccuucgcuauugcaaacgccgacacacugugcauaggcuaucacgcgaauaacagcacugauacgguugacaccguguuggagaaaaauguaacagugacucauuccgucaacuuacuggaagauaagcacaaugggaaacuauguaagcucagaggaguggcuccccugcaucuugguaaaugcaacaucgccggcuggauucuggggaauccugagugugaaucuuugucaaccgcaaguagcugguccuacaucguugagacaucuucgucagacaacggaaccugcuauccaggcgauuuuauuaauuacgaggagcucagggagcagcugagcaguguguccucuuucgaacgguuugagauguucccgaagacuagcuccuggcccaaccacgacucaaauaagggugucacagccgcuuguccucaugcaggggccaaaaguuuuuauaagaaccugaucuggcucgugaaaaagggaaauagcuacccaaaauuaucuaaguccuauauaaacgauaagggcaaagaaguacugguucuuuggggcauccaccaccccucaaccacggcugaccaacagagcuuguaccagaaugccgaugcguacguguucgucgggaccagucgcuauucuaagaaauuuaagccugagauugcaauccgaccaaaagugcgugaccaggagggaagaaugaacuacuauuggacucugguggaacccggugauaagauuacauucgaggccacuggcaaccuagucguuccuagguacgcuuuugccauggaacggaaugcaggguccggaaucauaauuagcgacaccccagugcaugauugcaacacaaccugucaaacgccgaaaggcgcuaucaauacuucgcuccccuuccagaacauucacccuaucacaaucgguaagugcccaaaguauguaaaaucuaccaagcugcgccuugccacugggcugagaaauauucccuccauacagucaaggggauuguuuggcgcgaucgccggcuucauugaagggggauggacagguaugguggacggcugguacggguaucaucaccagaacgaacaaggaaguggcuacgcagcugaccucaaaagcacccagaaugccaucgauaagauaacgaacaaagucaauuccgugauugagaagaugaacacccaguuuacagcuguugguaaggaguucaaucaccuggaaaaacggaucgagaacuuaaauaagaaaguggacgauggguuccuggacaucuggacuuacaacgccgaacuccuuguccuguuggagaaugaacgcacccuagauuaucaugacucuaacgugaagaaccuguacgagaaaguacgaaaucagcucaagaacaaugcaaaggagauuggcaacggauguuuugaguucuaucacaaaugcgauaauacauguauggaaagcguuaagaacggcacuuacgacuauccuaaauacucagaagaggccaagcugaauagagaagagaucgauggggugaaacuugagaguaccaggauuuaucaaauacuggcuaucuacuccacagucgcgagcucuuuggugcucgucgugucacugggagcaauuaguuuuuggaugugcagcaacgguuccuuacagugccggaucuguaucuga

SEQ ID NO: 140139 - RNA, 1701 nt, Artificial Sequence; identical to SEQ ID NO: 140133
  derived and/or modified CDS sequence (opt3) from hemagglutinin__InfluenzaA__AHZ35946

SEQ ID NO: 140140 - RNA, 1701 nt, Artificial Sequence; identical to SEQ ID NO: 140128
  derived and/or modified CDS sequence (opt3) from hemagglutinin__InfluenzaA__AHZ35958

SEQ ID NO: 140141 - RNA, 1701 nt, Artificial Sequence; identical to SEQ ID NO: 140128
  derived and/or modified CDS sequence (opt3) from hemagglutinin__InfluenzaA__AHZ35980

SEQ ID NO: 140142 - RNA, 1701 nt, Artificial Sequence; identical to SEQ ID NO: 140128
  derived and/or modified CDS sequence (opt3) from hemagglutinin__InfluenzaA__AHZ35991

SEQ ID NO: 140143 - RNA, 1701 nt, Artificial Sequence; identical to SEQ ID NO: 140128
  derived and/or modified CDS sequence (opt3) from hemagglutinin__InfluenzaA__AHZ36002

SEQ ID NO: 140144 - RNA, 1701 nt, Artificial Sequence
  derived and/or modified CDS sequence (opt3) from hemagglutinin__InfluenzaA__AHZ36013
augaaggccauccuggugguccuccuuuacaccuucgcuauugcaaacgccgacacacugugcauaggcuaucacgcgaauaacagcacugauacgguugacaccguguuggagaaaaauguaacagugacucauuccgucaacuuacuggaagauaagcacaauagaaaacuauguaagcucagggguguggcuccccugcaucuuggaaaaugcaacaucgccgguuggauucugggcaauccugagugugaaucuuugucaaccgcaaguagcugguccuacaucguugagacaucuucgucagacaacgggaccugcuauccaggagauuuuauuaauuacgaagaacuccgggagcagcugagcaguguguccucuuucgaacgcuuugagauguucccgaagacuagcuccuggcccaaccacgacucaaauaagggcgucacagccgcuuguccucaugcaggggccaaaaguuuuuauaagaaccugaucuggcucgugaaaaaggggaauagcuacccaaaauuaucuaaguccuauauaaacgauaagggaaaagaaguacugguucuuuggggcauccaccaccccucaaccacggcugaccaacagagcuuguaccagaaugccgaugcguacguguucgucggcacuucccgauauucuaagaaauuuaagccugagauugcaauccguccaaaagugagagaccaggaggggaggaugaacuacuauuggacccugguggaacccggagauaagauuacauucgaggccacugguaaccuagucguuccucgguacgcuuuugccauggaacgcaaugcaggcuccgggaucauaauuagcgacaccccagugcaugauugcaacacaaccugucaaacgccgaaaggagcuaucaauacuucgcuccccuuccagaacauucacccuaucacaaucggcaagugcccaaaguauguaaaaucuaccaagcugagacuugccacuggucugaggaaugugcccuccauucagucacggggguuguuuggagcgauagccggcuucaucgagggcggguggacaggaauggucgacgguugguacggcuaucaucaccagaacgaacaagggaguggauacgcagcugaccucaaaagcacccagaaugccauugauaagaucacgaacaaagugaauaguguuauagagaagaugaacacccaguuuacagcugugggcaaggaguucaaucaccuggaaaaacgcauugagaacuuaaauaagaaagucgacgaugguuuccuggacaucuggacuuacaacgccgaacuccuugugcuguuggagaaugaacgaacccuagauuaucaugacucuaacguaaagaaccuguacgagaaaguuagaaaucagcucaagaacaaugcaaaggagaucgggaacggcuguuuugaguucuaucacaaaugcgauaauacauguauggagagcgugaagaacggaacuuacgacuauccuaaauacucagaagaggccaagcugaauagggaagagauugauggcgucaaacuugagaguacccggaucuaucaaauucuggcuauauacuccacaguggcgagcucuuugguccucgugguuucacugggggcaaucaguuuuuggaugugcagcaacggauccuuacagugccguauuuguaucuga

SEQ ID NO: 140145 - RNA, 1701 nt, Artificial Sequence
  derived and/or modified CDS sequence (opt3) from hemagglutinin__InfluenzaA__AHZ36024
augaaggccauccuggugguccuccuuuacaccuucgcuacagcaaacgccgacacucugugcauuggcuaucacgcgaauaacagcacggauaccguugacacaguguuggagaaaaauguaacugugacccauuccgucaacuuacuggaagauaagcacaaugggaaacuauguaagcucagaggaguggcuccccugcaucuugguaaaugcaacauagccggcuggauccuggggaauccugagugugaaucuuugucaacagcaaguagcugguccuacauuguugagaccucuucgucagacaacggaacuugcuauccaggcgauuuuaucaauuacgaggagcucagggagcagcugagcaguguguccucuuucgaacgguuugagauuuucccgaagacaagcuccuggcccaaccacgacucaaauaagggugucaccgccgcuuguccucaugcaggggccaaaaguuuuuauaagaaccugaucuggcucgugaaaaagggaaauagcuacccaaaauuaucuaaguccuauauaaacgauaagggcaaagaaguacugguucuuuggggcauccaccaccccucaacgacugcugaccaacagagcuuguaccagaaugccgaugcguacguguucgucgggaccagucgcuauucuaagaaauuuaagccugagauugcaauccgaccaaaagugcgugaccaggagggaagaaugaacuacuauuggacacugguggaacccggugauaagauuacuuucgaggccaccggcaaccuagucguuccuagguacgcuuuugccauggaacggaaugcaggguccggaaucauaauuagcgacacaccagugcaugauugcaacaccacgugucaaacuccgaaaggcgcuaucaauacaucgcuccccuuccagaacauucacccuaucaccaucgguaagugcccaaaguauguaaaaucuacuaagcugcgccuugccacagggcugagaaaugugcccuccauucagucaaggggauuguuuggcgcgauagccggcuucaucgaagggggauggaccgguauggucgacggcugguacggguaucaucaccagaacgaacaaggaaguggcuacgcagcugaccucaaaagcacgcagaaugccauugauaagaucaccaacaaaguuaauuccgugauagagaagaugaacacacaguuuacugcuguggguaaggaguucaaucaccuggaaaaacggauugagaacuuaaauaagaaagucgacgauggguuccuggacaucuggaccuacaacgccgaacuccuugugcuguuggagaaugaacgcacacuagauuaucaugacucuaacguaaagaaccuguacgagaaaguucgaaaucagcucaagaacaaugcaaaggagaucggcaacggauguuuugaguucuaucacaaaugcgauaauacuuguauggaaagcgugaagaacggcaccuacgacuauccuaaauacucagaagaggccaagcugaauagagaagagauugauggggucaaacuugagaguacaaggaccuaucaaauccuggcuauuuacuccacuguggcgagcucuuugguccucgugguuucacugggagcaauaaguuuuuggaugugcagcaacgguuccuuacagugccggaucuguauuuga

SEQ ID NO: 140146 - RNA, 1701 nt, Artificial Sequence
  derived and/or modified CDS sequence (opt3) from hemagglutinin__InfluenzaA__AHZ36035
augaagaccaucauugcccugagcuacauacucugccuuguguucgcucagaaacugcccggcaacgacaauuccacagcaacuuuguguuuagggcaccaugccgucccuaacggaacgaucguuaagaccauuacaaaugaucaaaucgaggugacuaacgcgaccgaacugauucagucuucaaguacaggugagaucugcaauagcccacaccagauacuagacggcgaaaacuguacccucaucgaugcucugcuuggggacccgcagugcgauggauuucaaaauaaaaagugggaccuguucguagagagauccaaagcccauucuaacuguuaucccuacgaugugccugacuaugcaucguugaggucacucgucgccagcaguggcacucuggaauuuaauaacgaguccuucaauuggacaggugugacccagaacgggacgucuagcgcuugcauucggcgcuccaauaacucauuuuucagucgacugaauuggcucacucacuuaaacuuuaaguacccagcacugaacguuaccaugcccaauaacgagcaguucgauaaguuguauaucuggggagugcaucacccuggcacagacaaagaucagauuuuucuuuacgcccaagcugccggccguaucacugucagcaccaagagaucucagcaggcggugauaccaaauauuggguccaggccccggguacgcaacaucccuucaagaguuagcauuuauuggacaaucgugaaaccaggagacauccugcuaauuaauaguaccgguaaccucauagcaccgaggggcuacuucaagauccggucugggaaauccagcauuaugcgcucggaugcccccaucggaaaguguaauucugcuugcauaacgccuaacggcuccauuccaaaugacaagcccuuucagaacgucaaucgaaucacuuacggugccuguccuagauaugugaaacaaaacacacugaaacuugcaaccgggaugaggaaugugccagaaaaacagacucggggaaucuucggcgcuauugccggcuuuaucgagaacgggugggaaggaauggucgacgguugguacggcuuccgucaccaaaauucagaggggcgcggacaggcggccgaucugaagaguacacaggcagcuauugaccagauaaacggcaaauugaacagacucaucgguaagaccaaugagaaauuccaucagauugaaaaggaguuuagcgaaguugaggggaggauccaagaucuggaaaaguauguggaggacacgaaaaucgauuuaugguccuacaacgccgagcugcucguagcucuugaaaaucagcacaccauugaccugacagauucugagaugaacaaguuguucgaaaagacuaagaaacagcuacgggagaaugccgaagacaugggcaacggaugcuuuaagauauaucauaagugugauaaugcaugcaucggcagcauucgaaacgggaccuacgaccacgauguguaucgcgacgaggcccugaauaacagauuccagaucaaaggagucgagcucaagucagguuacaaagacuggauucuguggaucaguuuugcuauauccugcuuccuucuguguguggcguugcucggcuuuaucaugugggcaugccaaaaggggaauauuagguguaacaucugcauuuga

SEQ ID NO: 140147 - RNA, 1701 nt, Artificial Sequence; identical to SEQ ID NO: 134903
  derived and/or modified CDS sequence (opt3) from hemagglutinin__InfluenzaA__AHZ36047

SEQ ID NO: 140148 - RNA, 1701 nt, Artificial Sequence; identical to SEQ ID NO: 140128
  derived and/or modified CDS sequence (opt3) from hemagglutinin__InfluenzaA__AHZ36059

SEQ ID NO: 140149 - RNA, 1701 nt, Artificial Sequence; identical to SEQ ID NO: 140145
  derived and/or modified CDS sequence (opt3) from hemagglutinin__InfluenzaA__AHZ36070

SEQ ID NO: 140150 - RNA, 1701 nt, Artificial Sequence; identical to SEQ ID NO: 140144
  derived and/or modified CDS sequence (opt3) from hemagglutinin__InfluenzaA__AHZ36081

SEQ ID NO: 140151 - RNA, 1701 nt, Artificial Sequence; identical to SEQ ID NO: 140145
  derived and/or modified CDS sequence (opt3) from hemagglutinin__InfluenzaA__AHZ36092

SEQ ID NO: 140152 - RNA, 1701 nt, Artificial Sequence; identical to SEQ ID NO: 140128
  derived and/or modified CDS sequence (opt3) from hemagglutinin__InfluenzaA__AHZ36103

SEQ ID NO: 140153 - RNA, 1701 nt, Artificial Sequence; identical to SEQ ID NO: 140145
  derived and/or modified CDS sequence (opt3) from hemagglutinin__InfluenzaA__AHZ36114

SEQ ID NO: 140154 - RNA, 1701 nt, Artificial Sequence; identical to SEQ ID NO: 140128
  derived and/or modified CDS sequence (opt3) from hemagglutinin__InfluenzaA__AHZ36125

SEQ ID NO: 140155 - RNA, 1701 nt, Artificial Sequence; identical to SEQ ID NO: 140128
  derived and/or modified CDS sequence (opt3) from hemagglutinin__InfluenzaA__AHZ36136

SEQ ID NO: 140156 - RNA, 1701 nt, Artificial Sequence; identical to SEQ ID NO: 134903
  derived and/or modified CDS sequence (opt3) from hemagglutinin__InfluenzaA__AHZ36147

SEQ ID NO: 140157 - RNA, 1701 nt, Artificial Sequence
  derived and/or modified CDS sequence (opt3) from hemagglutinin__InfluenzaA__AHZ36158
augaaggccauccuggugguccuccuuuacaccuucgcuauugcaaacgccgacacacugugcauaggcuaucacgcgaauaacagcacugauacgguugacaccguguuggagaaaaauguaacagugacucauuccgucaacuuacuggaagauaagcacaaugggaaacuauguaagcucagaggaguggcuccccugcaucuugguaaaugcaacaucgccggcuggauucuggggaauccugagugugaaucuuugucaaccgcaaguagcugguccuacaucguugagacaucuucgucagacaacggaaccugcuauccaggcgauuuuauuaauuacgaggagcucagggagcagcugagcaguguguccucuuucgaacgguuugagauguucccgaagacuagcuccuggcccaaccacgacucaaauaagggugucacagccgcuuguccucaugcaggggccaaaaguuuuuauaagaaccugaucuggcucgugaaaaagggaaauagcuacccaaaauuaucuaaguccuauauaaacgauaagggcaaagaaguacugguucuuuggggcauccaccaccccucaaccacggcugaccaacagagcuuguaccagaaugccgaugcguacguguucgucgggacuucccgcuauucuaagaaauuuaagccugagauugcaacccgaccaaaagugcgugaccaggagggaagaaugaacuacuauuggacacugguggaacccggugauaagaucacuuucgaggccaccggcaaccuagucguuccuagguacgcuuuugccauggaacggaaugcaggguccggaauuaucauaagcgacacaccagugcaugauugcaacaccacgugucaaacuccgaaaggcgcuauuaauacaucgcuccccuuccagaacauccacccuauuaccaucgguaagugcccaaaguauguaaaaucuacuaagcugcgccuugccacagggcugagaaaugugcccuccauccagucaaggggauuguuuggcgcgauugccggcuucauagaagggggauggaccgguauggucgacggcugguacggguaucaucaccagaacgaacaaggaaguggcuacgcagcugaccucaaaagcacgcagaaugccaucgauaagauuaccaacaaagugaauaguguuaucgagaagaugaacacacaguuuacugcuguggguaaggaguucaaucaccuggaaaaacggauagagaacuuaaauaagaaagucgacgauggguuccuggacauuuggaccuacaacgccgaacuccuugugcuguuggagaaugaacgcacacuagauuaucaugacucuaacguaaagaaccuguacgagaaaguucgaaaucagcucaagaacaaugcaaaggagaucggcaacggauguuuugaguucuaucacaaaugcgauaauacuuguauggaaagcgugaagaacggcaccuacgacuauccuaaauacucagaagaggccaagcugaauagagaagagaucgauggggucaaacuugagaguacaaggauuuaucaaauccuggcuauuuacuccaccguggcgagcucuuugguccucgugguuucacugggagcaauaaguuuuuggaugugcagcaacgguuccuuacagugccggaucuguauuuga

SEQ ID NO: 140158 - RNA, 1701 nt, Artificial Sequence; identical to SEQ ID NO: 140128
  derived and/or modified CDS sequence (opt3) from hemagglutinin__InfluenzaA__AHZ36169

SEQ ID NO: 140159 - RNA, 1701 nt, Artificial Sequence
  derived and/or modified CDS sequence (opt3) from hemagglutinin__InfluenzaA__AHZ36180
augaaggccauccuggugguccuccuuuacaccuucgcuauugcaaacgccgacacacugugcauaggcuaucacgcgaauaacagcacugauacgguugacaccguguuggagaaaaauguaacagugacucauuccgucaacuuacuggaagauaagcacaaugggaaacuauguaagcucagaggaguggcuccccugcaucuugguaaaugcaacaucgccggcuggauucuggggaauccugagugugaaucuuugucaaccgcaaguagcugguccuacaucguugagacaucuucgucagacaacggaaccugcuauccaggcgauuuuauuaauuacgaggagcucagggagcagcugagcaguguguccucuuucgaacgguuugagauguucccgaagacuagcuccuggcccaaccacgacucaaauaagggugucacagccgcuuguccucaugcaggggccaaaaguuuuuauaagaaccugaucuggcucgugaaaaagggaaauagcuacccaaaauuaucuaaguccuauauaaacgauaagggcaaagaaguacugguucuuuggggcauccaccaccccucaaccacggcugaccaacagagcuuguaccagaaugccgaugcguacguguucgucgggaccagucgcuauucuaagaaauuuaagccugagauugcaauccgaccaaaagugcgugaccaggagggaagaaugaacuacuauuggacucugguggaacccggugauaagauuacauucgaggccacuggcaaccuagucguuccuagguacgcuuuugccauggaacggaaugcaggguccggaaucauaauuagcgacaccccaauccaugauugcaacacaaccugucaaacgccgaaaggcgcuauuaauacuucgcuccccuuccagaacauccacccuaucacaauugguaagugcccaaaguaugugaaaucuaccaagcugcgccuugccacugggcugagaaauguacccuccauacagucaaggggauuguuuggcgcgaucgccggcuucauugaagggggauggacagguaugguggacggcugguacggguaucaucaccagaacgaacaaggaaguggcuacgcagcugaccucaaaagcacccagaaugccaucgauaagauaacgaacaaagucaauuccgugauugagaagaugaacacccaguuuacagcuguugguaaggaguucaaucaccuggaaaaacggaucgagaacuuaaauaagaaaguggacgauggguuccuggacaucuggacuuacaacgccgaacuccuuguccuguuggagaaugaacgcacccuagauuaucaugacucuaacgugaagaaccuguacgagaaaguacgaaaucagcucaagaacaaugcaaaggagauuggcaacggauguuuugaguucuaucacaaaugcgauaauacauguauggaaagcguuaagaacggcacuuacgacuauccuaaauacucagaagaggccaagcugaauagagaagagaucgauggggugaaacuugagaguaccaggauuuaucaaauacuggcuaucuacuccacagucgcgagcucuuuggugcucgucgugucacugggagcaauuaguuuuuggaugugcagcaacgguuccuuacagugccggaucuguaucuga

SEQ ID NO: 140160 - RNA, 1701 nt, Artificial Sequence; identical to SEQ ID NO: 140133
  derived and/or modified CDS sequence (opt3) from hemagglutinin__InfluenzaA__AHZ36191

SEQ ID NO: 140161 - RNA, 1701 nt, Artificial Sequence; identical to SEQ ID NO: 134903
  derived and/or modified CDS sequence (opt3) from hemagglutinin__InfluenzaA__AHZ36203

SEQ ID NO: 140162 - RNA, 1701 nt, Artificial Sequence; identical to SEQ ID NO: 140128
  derived and/or modified CDS sequence (opt3) from hemagglutinin__InfluenzaA__AHZ36215

SEQ ID NO: 140163 - RNA, 1701 nt, Artificial Sequence; identical to SEQ ID NO: 134903
  derived and/or modified CDS sequence (opt3) from hemagglutinin__InfluenzaA__AHZ36226

SEQ ID NO: 140164 - RNA, 1701 nt, Artificial Sequence; identical to SEQ ID NO: 140128
  derived and/or modified CDS sequence (opt3) from hemagglutinin__InfluenzaA__AHZ36238

SEQ ID NO: 140165 - RNA, 1701 nt, Artificial Sequence; identical to SEQ ID NO: 140128
  derived and/or modified CDS sequence (opt3) from hemagglutinin__InfluenzaA__AHZ36249

SEQ ID NO: 140166 - RNA, 1701 nt, Artificial Sequence
  derived and/or modified CDS sequence (opt3) from hemagglutinin__InfluenzaA__AHZ36260
augaaggccauccuggugguccuccuuuacaccuucgcuauugcaaacgccgacacacugugcauaggcuaucacgcgaauaacagcacugauacgguugacaccguguuggagaaaaauguaacagugacucauuccgucaacuuacuggaagauaagcacaaugggaaacuauguaagcucagaggaguggcuccccugcaucuugguaaaugcaacaucgccggcuggauucuggggaauccugagugugaaucuuugucaaccgcaaguagcugguccuacaucguugagacauuuucuucggacaacggaaccugcuauccaggcgauuucauuaauuacgaggagcucagggagcagcugucaagcgugaguuccuuugaacgguucgagauguuuccgaagacuucuagcuggcccaaccacgacuccaauaagggugucacagccgcuuguccucaugcaggggccaaaucauucuauaagaaccugaucuggcucgugaaaaagggaaauaguuacccaaaauuaagcaagucuuauauaaacgauaagggcaaagaaguacugguucuuuggggcauccaccaccccuccaccacggcugaccaacagucauuguaccagaaugccgaugcguacguguuugucgggacuagccgcuauaguaagaaauucaagccugagauugcaauccgaccaaaagugcgugaccaggagggaagaaugaacuacuauuggacccugguggaacccggugauaagauuacauuugaggccacuggcaaccuagucguuccuagguacgcuuucgccauggaacggaaugcagggucuggaaucauaauuuccgacaccccagugcaugauugcaacacaaccugucaaacgccgaaaggcgcuaucaauacuagccuccccuuucagaacauucacccuaucacaaucgguaagugcccaaaguauguaaaaucgaccaagcugcgccuugccacugggcugagaaaugugcccucuauucaguccaggggauuguucggcgcgauagccggcuuuaucgaagggggauggacagguauggucgacggcugguacggguaucaucaccagaacgaacaaggaucaggcuacgcagcugaccucaaaaguacccagaaugccauugauaagaucacgaacaaagugaauagcguuauagagaagaugaacacccaguucacagcuguggguaaggaguucaaucaccuggaaaaacggauugagaacuuaaauaagaaagucgacgauggguuucuggacaucuggacuuacaacgccgaacuccuugugcuguuggagaaugaacgcacccuagauuaucaugacuccaacguaaagaaccuguacgagaaaguucgaaaucagcucaagaacaaugcaaaggagaucggcaacggauguuucgaauuuuaucacaaaugcgauaauacauguauggagucugugaagaacggcacuuacgacuauccuaaauacagcgaagaggccaagcugaauagagaagagauugauggggucaaacuugagucaaccaggaucuaucaaauucuggcuauauacaguacaguggcguccagcuugguccucgugguuucucugggagcaaucucauucuggaugugcaguaacgguagcuuacagugccggauuuguaucuga

SEQ ID NO: 140167 - RNA, 1701 nt, Artificial Sequence; identical to SEQ ID NO: 140113
  derived and/or modified CDS sequence (opt3) from hemagglutinin__InfluenzaA__AHZ36271

SEQ ID NO: 140168 - RNA, 1701 nt, Artificial Sequence; identical to SEQ ID NO: 140128
  derived and/or modified CDS sequence (opt3) from hemagglutinin__InfluenzaA__AHZ36283

SEQ ID NO: 140169 - RNA, 1701 nt, Artificial Sequence; identical to SEQ ID NO: 140113
  derived and/or modified CDS sequence (opt3) from hemagglutinin__InfluenzaA__AHZ36294

SEQ ID NO: 140170 - RNA, 1701 nt, Artificial Sequence
  derived and/or modified CDS sequence (opt3) from hemagglutinin__InfluenzaA__AHZ36306
augaaggccauccuggugguccuccuuuacaccuucgcuauugcaaacgccgacacacugugcauaggcuaucacgcgaauaacagcacugauacgguugacaccguguuggagaaaaauguaacagugacucauuccgucaacuuacuggaagauaagcacaaugggaaacuauguaagcucagaggaguggcuccccugcaucuugguaaaugcaacaucgccggcuggauucuggggaauccugagugugaaucuuugucaaccgcaaguagcugguccuacaucguugagacaucuucgucagacaacggaaccugcuauccaggcgauuuuauuaauuacgaggagcucagggagcagcugagcaguguguccucuuucgaacgguuugagauguucccgaagacuagcuccuggcccaaccacgacucaaauaagggugucacagccgcuuguccucaugcaggggccaaaaguuuuuauaagaaccugaucuggcucgugaaaaagggaaauagcuacccaaaauuaucuaaguccuauauaaacgauaagggcaaagaaguacugguucuuuggggcauccaccaccccucaaccacggcugaccaacagagcuuguaccagaaugccgaugcguacguguucgucgggacuucccgcuauucuaagaaauuuaagccugagauugcaauccgaccaaaagugcgugaccaggagggaagaaugaacuacuauuggacccugguggaacccggugauaagauuacauucgaggccacuggcaaccuagucguuccuagguacgcuuuugccauggaacggaaugcaggguccggaaucauaauuagcgacaccccagugcaugauugcaacacaaccugucaaacgccgaaaggcgcuaucaauacuucgcuccccuuccagaacauucacccuaucacaaucgguaagugcccaaaguauguaaaaucuaagaaacugcgccuugccaccgggcugagaaaugugcccuccauucagucaaggggauuguuuggcgcgauagccggcuucaucgaagggggauggacugguauggucgacggcugguacggguaucaucaccagaacgaacaaggaaguggcuacgcagcugaccucaagagcacacagaaugccauugauaaaaucaccaacaaggugaauaguguuauagagaagaugaacacgcaguuuaccgcuguggguaaagaguucaaucaccuggaaaagcggauugagaacuuaaauaaaaaggucgacgauggguuccuggacaucuggacauacaacgccgaacuccuugugcuguuggagaaugaacgcacucuagauuaucaugacucuaacguaaagaaccuguacgagaagguucgaaaucagcucaagaacaaugcaaaagagaucggcaacggauguuuugaguucuaucacaagugcgauaauaccuguauggaaagcgugaaaaacggcacauacgacuauccuaaguacucagaagaggccaaacugaauagagaagagauugauggggucaaacuugagaguacuaggaucuaucaaauucuggcuauauacuccaccguggcgagcucuuugguccucgugguuucacugggagcaaucaguuuuuggaugugcagcaacgguuccuuacagugccggauuuguaucuga

SEQ ID NO: 140171 - RNA, 1701 nt, Artificial Sequence; identical to SEQ ID NO: 140128
  derived and/or modified CDS sequence (opt3) from hemagglutinin__InfluenzaA__AHZ36317

SEQ ID NO: 140172 - RNA, 1701 nt, Artificial Sequence; identical to SEQ ID NO: 140128
  derived and/or modified CDS sequence (opt3) from hemagglutinin__InfluenzaA__AHZ36328

SEQ ID NO: 140173 - RNA, 1701 nt, Artificial Sequence
  derived and/or modified CDS sequence (opt3) from hemagglutinin__InfluenzaA__AHZ36339
augaaggccauccuggugguccuccuuuacaccuucgcuauugcaaacgccgacacacugugcauaggcuaucacgcgaauaacagcacugauacgguugacaccguguuggagaagaauguaacagugacucauuccgucaacuuacuggaagauaagcacaaugggaaacuauguaagcucagaggaguggcuccccugcaucuugguaaaugcaacaucgccggcuggauucuggggaauccugagugugaaucuuugucaaccgcaaguagcugguccuacaucguugagacaucuucgucagacaacggaaccugcuauccaggcgauuuuauuaauuacgaggagcucagggagcagcugagcaguguguccucuuucgaacgguuugagauguucccgaagacuagcuccuggcccaaccacgacucaaauaagggugucacagccgcuuguccucaugcaggggccaaaaguuuuuauaagaaccugaucuggcucgugaaaaagggaaauagcuacccaaaauuaucuaaguccuauauaaacgauaagggcaaagaaguacugguucuuuggggcauccaccaccccucaaccacggcugaccaacagagcuuguaccagaaugccgaugcguacguguucgucgggaccagucgcuauucuaagaaauuuaagccugagauugcaauccgaccaaaagugcgugaccaggagggaagaaugaacuacuauuggacucugguggaacccggugauaagauuacauucgaggccacuggcaaccuagucguuccuagguacgcuuuugccauggaacggaaugcaggguccggaaucauaauuagcgacaccccagugcaugauugcaacacaaccugucaaacgccgaaaggcgcuguaaauacuucgcuccccuuccagaacauccacccuauuacaaucgguaagugcccaaaguaugugaaaucuaccaagcugcgccuugccacugggcugagaaauguccccuccauccagucaaggggauuguuuggcgcgauugccggcuucauagaagggggauggacagguaugguggacggcugguacggguaucaucaccagaacgaacaaggaaguggcuacgcagcugaccucaaaagcacccagaaugccaucgauaagauuacgaacaaaguuaauuccgugaucgagaagaugaacacccaguuuacagcugucgguaaggaguucaaucaccuggaacggcgcauagagaacuuaaauaaaaagguggacgauggguuccuggacauuuggacuuacaacgccgaacuccuuguacuguuggagaaugaacgaacccuagauuaucaugacucuaacguuaaaaaccuguacgagaaggugagaaaucagcucaaaaacaaugcaaaggagaucggcaacggauguuuugaguucuaucacaagugcgauaauacauguauggaaagcgucaaaaacggcacuuacgacuauccuaaguacucagaagaggccaaacugaauagggaagagaucgauggggugaaacuugagaguacccggauuuaucaaauccuggcuauuuacuccacagucgcgagcucuuuggugcucguugugucacugggagcaauaaguuuuuggaugugcagcaacgguuccuuacagugccguaucuguauuuga

SEQ ID NO: 140174 - RNA, 1701 nt, Artificial Sequence
  derived and/or modified CDS sequence (opt3) from hemagglutinin__InfluenzaA__AHZ36362
augaaggccauccuggugguccuccuuuacaccuucgcuauugcaaacgccgacacacugugcauaggcuaucacgcgaauaacagcacugauacgguugacaccguguuggagaaaaauguaacagugacucauuccaucaacuuacuggaagauaagcacaaugggaaacuauguaagcucagaggagucgcuccccugcaucuugguaaaugcaacauugccggcuggauccuggggaauccugagugugaaucuuugucaaccgcaaguagcugguccuacauuguggagacaucuucgucagacaacggaaccugcuauccaggcgauuuuaucaauuacgaggagcucagggagcagcugagcaguguuuccucuuucgaacgguuugagauguucccgaagacuagcuccuggcccaaccacgacucaaauaagggugugacagccgcuuguccucaugcaggggccaaaaguuuuuauaagaaccugauauggcucgucaaaaagggaaauagcuacccaaaauuaucuaaguccuauaucaacgauaagggcaaagaagugcugguacuuuggggcauucaccaccccucaaccacggcugaccaacagagcuuguaccagaaugccgaugcguacguuuucguggggacuucccgcuauucuaagaaauuuaagccugagaucgcaauucgaccaaaaguccgugaccaggagggaagaaugaacuacuauuggacccugguggaacccggugauaagaucacauucgaggccacuggcaaccuaguggucccuagguacgcuuuugccauggaacggaaugcaggguccggaauaauuaucagcgacaccccaguucaugauugcaacacaaccugucaaacgccgaaaggcgcugugaauacuucgcuccccuuccagaacauucacccuaucacaaucgguaagugcccaaaguauguaaaaucuaccaagcugcgccuugccacugggcugagaaaugugcccuccauucagucaaggggauuguuuggcgcgauagccggcuucaucgaagggggauggacagguauggucgacggcugguacggguaucaucaccagaacgaacaaggaaguggcuacgcagcugaccucaaaagcacccagaaugccauugauaagaucacgaacaaagugaauaguguuauagagaagaugaacacccaguuuacagcuguggguaaggaguucaaucaccuggaacggcgcauugagaacuuaaauaaaaaggucgacgauggguuccuggacaucuggacuuacaacgccgaacuccuugugcuguuggagaaugaacgaacccuagauuaucaugacucuaacguaaagaaccuguacgagaagguuagaaaucagcucaaaaacaaugcaaaggagaucggcaacggauguuuugaguucuaucacaagugcgauaauacauguauggaaagcgugaaaaacggcacuuacgacuauccuaaguacucagaagaggccaaacugaauagggaagagauugauggggucaaacuugagaguacccggaucuaucaaauucuggcuauauacuccacaguggcgagcucuuugguccucgugguuucacugggagcaaucaguuuuuggaugugcagcaacgguuccuuacagugccguauuuguaucuga

SEQ ID NO: 140175 - RNA, 1701 nt, Artificial Sequence
  derived and/or modified CDS sequence (opt3) from hemagglutinin__InfluenzaA__AHZ36385
augaagaccaucauugcccugagcuacauacucugccuuaucuucgcucaggagauucccggcaacgacaauuccacagcaacucuguguuuggggcaccaugccgugccuaacggaacgaucgucaaaaccauuacaaaugaucaaaucgaaguuacuaacgcgaccgaguuagugcagucuucaaguacaggugaaauaugcaauagcccacaccagauccuggacggcgagaacuguacccuaauugaugcucuccugggggacccgcagugcgaugacuuucaaaauaagaaaugggaucuuuucguagaaagauccaaggcccauucuaacuguuaucccuacgacgugccugauuaugcaucgcugaggucauuggucgccagcaguggaacucucgaguuuaauaacgaguccuucaauuggacaggcgugacccagaacgguacgucuagcgcuugcauccggcgcuccaauaacucauuuuucagucgacugaauuggcugacucaccucaacuuuaaauacccagcauuaaacguuaccaugcccaauaacgaacaguucgacaagcuguauauuuggggagugcaucacccugggacagauaaggaccagaucuuucuuuacgcccaagcuagcggccguauaacugucucuaccaaaagaucccagcaggccgugauuccaaauaucggcucaaggccccggguacgcaacauuccuagcagaguuaguaucuauuggacaaucgugaagccaggggauauuuugcugauaaauucuaccggaaaccuaaucgcgccgagggguuacuucaaaauucgguccggcaagagcucgaucaugcgcucugacgcacccauagggaaauguaauuccgccugcauuacgccuaacggaucaaucccaaaugacaagcccuuucagaacgucaaucgaaucacuuacggcgcuuguccuagauaugugaagcaaaacacacucaaacuggccaccgguaugaggaaugugccagagaagcagacucgggggauuuucggagcaaucgcuggcuuuauugaaaacggcugggaggggauggucgauggaugguacgguuuccgucaccagaauagugagggccgcgggcaagccgcggaccuuaaaagcacacaggccgcaauagaucagaucaacggaaagcugaacagauugauuggcaaaaccaaugaaaaguuccaucagaucgagaaagaauuuuccgagguugaagguaggauccaagaccucgagaaguauguggaggauacgaagauugaccuguggucuuacaacgcugaauuacugguagcccucgagaaucagcacaccauagaucuuacagacagcgaaaugaacaaacuguucgagaagacuaaaaagcaguugcgggaaaaugcugaggauauggggaacggcugcuuuaaaaucuaucauaagugugacaaugccugcauuggaucaauccgaaacggcaccuacgaucacgacguguaucgcgacgaggcacuaaauaacagauucaagauuaaaggggucgaacugaagaguggauacaaagauuggauccucuggauauccuuugccaucagcugcuuccugcuuuguguggcucuguuggguuuuauuaugugggcgugccagaagggcaauaucagguguaacauuugcaucuga

SEQ ID NO: 140176 - RNA, 1701 nt, Artificial Sequence
  derived and/or modified CDS sequence (opt3) from hemagglutinin__InfluenzaA__AHZ36397
augaagaccaucauugcccugagcuacauacucugccuuaucuucgcucaggagauucccggcaacgacaauuccacagcaacucuguguuuggggcaccaugccgugccuaacggaacgaucgucaaaaccauuacaaaugaucaaaucgaaguuacuaacgcgaccgaguuagugcagucuucaaguacaggugaaauaugcaauagcccacaccagauccuggacggcgagaacuguacccuaauugaugcucuccugggggacccgcagugcgaugacuuucaaaauaagaaaugggaucuuuucguagaaagauccaaggcccauucuaacuguuaucccuacgacgugccugauuaugcaucgcugaggucauuggucgccagcaguggaacucucgaguuuaauaacgaguccuucaauuggacaggcgugacccagaacgguacgucuagcgcuugcauccggcgcuccaauaacucauuuuucagucgacugaauuggcugacucaccucaacuuuaaauacccagcauuaaacguuaccaugcccaauaacgaacaguucgacaagcuguauauuuggggagugcaucacccugggacagauaaggaccagaucuuucuuuacgcccaagcuagcggccguauaacugucucuaccaaaagaucccagcaggccgugauuccaaauaucggcucaaggccccggguacgcaacauuccuagcagaguuaguaucuauuggacaaucgugaagccaggggauauuuugcugauaaauucuaccggaaaccuaaucgcgccgagggguuacuucaaaauucgguccggcaagagcucgaucaugcgcucugacgcacccauagggaaauguaauuccgccugcauuacgccuaacggaucaaucccaaaugacaagcccuuucagaacgucaaucgaaucacuuacggcgcuuguccuagauaugugaagcaaaacacacucaaacuggccaccgguaugaggaaugugccagagaagcagacucgggggauuuucggagcaaucgcuggcuuuauugaaaacggcugggaggggauggucgauggaugguacgguuuccgucaccagaauagugagggccgcgggcaagccgcggaccuuaaaagcacacaggccgcaauagaucagaucaacggaaagcugaacagauugauuggcaaaaccaaugaaaaguuccaucagaucgagaaagaauuuuccgagguugaagguaggauccaagaccucgagaaguauguggaggauacgaagauugaccuguggucuuacaacgcugaauuacugguagcccucgagaaucagcacaccauagaucuuacagacagcgaaaugaacaaacuguucgagaagacuaaaaagcaguugcgggaaaaugcugaggauauggggaacggcugcuuuaaaaucuaucauaagugugacaaugccugcauuggaucaauccgaaacggcaccuacgaucacaauguguaucgcgacgaggcacuaaacaauagauucaagauuaaaggggucgaacugaagaguggauacaaagacuggauccucuggauauccuuugccaucagcugcuuccugcuuuguguggcucuguuggguuuuauuaugugggcgugccagaagggcaacaucagguguaauauuugcaucuga

SEQ ID NO: 140177 - RNA, 1701 nt, Artificial Sequence; identical to SEQ ID NO: 140113
  derived and/or modified CDS sequence (opt3) from hemagglutinin__InfluenzaA__AHZ36409

SEQ ID NO: 140178 - RNA, 1701 nt, Artificial Sequence; identical to SEQ ID NO: 140114
  derived and/or modified CDS sequence (opt3) from hemagglutinin__InfluenzaA__AHZ36433

SEQ ID NO: 140179 - RNA, 1701 nt, Artificial Sequence
  derived and/or modified CDS sequence (opt3) from hemagglutinin__InfluenzaA__AHZ36445
augaagaccaucauugcccugagcuacauacucugccuuaucuucgcucaggagauucccggcaacgacaauuccacagcaacucuguguuuggggcaccaugccgugccuaacggaacgaucgucaaaaccauuacaaaugaucaaaucgaaguuacuaacgcgaccgaguuagugcagucuucaaguacaggugaaauaugcaauagcccacaccagauccuggacggcgagaacuguacccuaauugaugcucuccugggggacccgcagugcgaugacuuucaaaauaagaaaugggaucuuuucguagaaagauccaaggcccauucuaacuguuaucccuacgacgugccugauuaugcaucgcugaggucauuggucgccagcaguggaacucucgaguuuaauaacgaguccuucaauuggacaggcgugacccagaacgguacgucuagcgcuugcauccggcgcuccaauaacucauuuuucagucgacugaauuggcugacucaccucaacuuuaaauacccagcauuaaacguuaccaugcccaauaacgaacaguucgacaagcuguauauuuggggagugcaucacccugggacagauaaggaccagaucuuucuuuacgcccaagcuagcggccguauaacugucucuaccaaaagaucccagcaggccgugauuccaaauaucggcucaaggccccggguacgcaacauuccuagcagaguuaguaucuauuggacaaucgugaagccaggggauauuuugcugauaaauucuaccggaaaccuaaucgcgccgagggguuacuucaaaauucgguccggcaagagcucgaucaugcgcucugacgcacccauagggaaauguaauuccgccugcauuacgccuaacggaucaaucccaaaugacaagcccuuucagaacgucaaucgaaucacuuacggcgcuuguccuagauaugugaagcaaaacacacucaaacuggccaccgguaugaggaaugugccagagaagcagacucgggggauuuucggagcaaucgcuggcuuuauugaaaacggcugggaggggauggucgauggaugguacgguuuccgucaccagaauagugagggccgcgggcaagccgcggaccuuaaaagcacacaggccgcaauagaucagaucaacggaaagcugaacagauugauuggcaaaaccaaugaaaaguuccaucagaucgagaaagaauuuuccgagguugaagguaggauccaagaccucgagaaguauguggaggauacgaagauugaccuguggucuuacaacgcugaauuacugguagcccucgagaaucagcacaccauagaucuuacagacagcgaaaugaacaaacuguucgagaagacuaaaaagcaguugcgggaaaaugcugaggauauggggaacggcugcuuuaaaaucuaucauaagugugacgaugccugcauuggaucaauccgaaauggcaccuacgaccacgacguguaucgcgaugaggcacuaaacaauagauuccagauuaagggggucgaacugaaaaguggauacaaggacuggauccucuggauauccuuugccaucagcugcuuccugcuuuguguggcucuguuggguuuuauuaugugggcgugccaaaaaggcaacaucagguguaauauuugcaucuga

SEQ ID NO: 140180 - RNA, 1701 nt, Artificial Sequence; identical to SEQ ID NO: 140113
  derived and/or modified CDS sequence (opt3) from hemagglutinin__InfluenzaA__AHZ36457

SEQ ID NO: 140181 - RNA, 1701 nt, Artificial Sequence; identical to SEQ ID NO: 140113
  derived and/or modified CDS sequence (opt3) from hemagglutinin__InfluenzaA__AHZ36469

SEQ ID NO: 140182 - RNA, 1701 nt, Artificial Sequence
  derived and/or modified CDS sequence (opt3) from hemagglutinin__InfluenzaA__AHZ36481
augaagaccaucauugcccugagcuacauacucugccuuaucuucgcucaggagauucccggcaacgacaauuccacagcaacucuguguuuggggcaccaugccgugccuaacggaacgaucgucaaaaccauuacaaaugaucaaaucgaaguuacuaacgcgaccgaguuagugcagucuucaaguacaggugaaauaugcaauagcccacaccagauccuggacggcgagaacuguacccuaauugaugcucuccugggggacccgcagugcgaugacuuucaaaauaagaaaugggaucuuuucguagaaagauccaaggcccauucuaacuguuaucccuacgacgugccugauuaugcaucgcugaggucauuggucgccagcaguggaacucucgaguuuaauaacgaguccuucaauuggacaggcgugacccagaacgguacgucuagcgcuugcauccggcgcuccaauaacucauuuuucagucgacugaauuggcugacucaccucaacuuuaaauacccagcauuaaacguuaccaugcccaauaacgaacaguucgacaagcuguauauuuggggagugcaucacccugggacagauaaggaccagaucuuucuuuacgcccaagcuagcggccguauaacugucucuaccaaaagaucccagcaggccgugauuccaaauaucggcucaaggccccggguacgcaacauuccuagcagaguuaguaucuauuggacaaucgugaagccaggggauauuuugcugauaaauucuaccggaaaccuaaucgcgccgagggguuacuucaaaauucggaauggcaaguccagcaucaugcgcucggacgcacccauagggaaauguaacucugccugcauuacgccuaauggauccaucccaaacgacaagcccuuucagaaugucaaccgaaucacuuacggcgcuuguccuagauaugugaagcaaaauacacucaaacuggccaccgguaugaggaacgugccagagaagcagacucgggggauuuucggagcaaucgcuggcuuuauugaaaauggcugggaggggauggucgauggaugguacgguuuccgucaccagaacucagagggccgcgggcaagccgcggaccuuaaaaguacacaggccgcaauagaucagaucaacggaaagcugaauagauugauuggcaaaaccaacgaaaaguuccaucagaucgagaaagaauuuagcgagguugaagguaggauccaagaccucgagaaguauguggaggauacgaagauugaccugugguccuacaaugcugaauuacugguagcccucgagaaccagcacaccauagaucuuacagacucugaaaugaauaaacuguucgagaagacuaaaaagcaguugcgggaaaacgcugaggauauggggaauggcugcuuuaaaaucuaucauaagugugacaacgccugcauuggaagcauccgaaauggcaccuacgaucacgacguguaucgcgacgaggcacuaaacaauagauuccagauuaagggggucgaacugaaaucaggauacaaggauuggauccucuggauaaguuuugccaucuccugcuuccugcuuuguguggcucuguuggguuuuauuaugugggcgugccaaaaaggcaacaucagguguaauauuugcaucuga

SEQ ID NO: 140183 - RNA, 1701 nt, Artificial Sequence; identical to SEQ ID NO: 140114
  derived and/or modified CDS sequence (opt3) from hemagglutinin__InfluenzaA__AHZ36493

SEQ ID NO: 140184 - RNA, 1701 nt, Artificial Sequence; identical to SEQ ID NO: 140114
  derived and/or modified CDS sequence (opt3) from hemagglutinin__InfluenzaA__AHZ36505

SEQ ID NO: 140185 - RNA, 1701 nt, Artificial Sequence; identical to SEQ ID NO: 140114
  derived and/or modified CDS sequence (opt3) from hemagglutinin__InfluenzaA__AHZ36517

SEQ ID NO: 140186 - RNA, 1701 nt, Artificial Sequence
  derived and/or modified CDS sequence (opt3) from hemagglutinin__InfluenzaA__AHZ36529
augaagaccaucauugcccugagcuacauacucugccuuaucuucgcucaggagauucccggcaacgacaauuccacagcaacucuguguuuggggcaccaugccgugccuaacggaacgaucgucaaaaccauuacaaaugaucaaaucgaaguuacuaacgcgaccgaguuagugcagucuucaaguacaggugaaauaugcaauagcccacaccagauccuggacggcgagaacuguacccuaauugaugcucuccugggggacccgcagugcgaugacuuucaaaauaagaaaugggaucuuuucguagaaagauccaaggcccauucuaacuguuaucccuacgacgugccugauuaugcaucgcugaggucauuggucgccagcaguggaacucucgaguuuaauaacgaguccuucaauuggacaggcgugacccagaacgguacgucuagcgcuugcauccggcgcuccaauaacucauuuuucagucgacugaauuggcugacucaccucaacuuuaaauacccagcauuaaacguuaccaugcccaauaacgaacaguucgacaagcuguauauuuggggagugcaucacccugggacagauaaggaccagaucuuucuuuacgcccaagcuagcggccguauaacugucucuaccaaaagaucccagcaggccgugauuccaaauaucggcucaaggccccggguacgcaacauuccuagcagaguuaguaucuauuggacaaucgugaagccaggggauauuuugcugauaaauucuaccggaaaccuaaucgcgccgagggguuacuucaaaauucgguccggcaagagcucgaucaugcgcucugacgcacccauagggaaauguaauuccucaugcauuacgccuaacggaaguaucccaaaugacaagcccuuucagaacgucaaucgaaucacuuacggcgccuguccuagauaugugaagcaaaacacacucaaacuggcuaccgguaugaggaaugugccagagaagcagacucgggggauuuucggagccaucgcaggcuuuauugaaaacggcugggaggggauggucgauggaugguacgguuuccgucaccagaauagcgagggccgcgggcaagcugccgaccuuaaauccacacaggcggccauagaucagaucaacggaaagcugaacagauugauuggcaaaaccaaugaaaaguuccaucagaucgagaaagaauuuucugagguugaagguaggauccaagaccucgagaaguauguggaggauacgaagauugaccuguggagcuacaacgcagaauuacugguagcucucgagaaucagcacaccauagaucuuacagacucagaaaugaacaaacuguucgagaagacuaaaaagcaguugcgggaaaaugccgaggauauggggaacggcugcuuuaaaaucuaucauaagugugacaaugcuugcauuggaaguauccgaaacggcaccuacgaucacgacguguaucgcgacgaggcccuaaauaacagauuccagauuaagggggucgaacugaaauccggauacaaggauuggauccucuggaucagcuuugcaauaucuugcuuccugcuuuguguggcccuguuggguuuuauuaugugggcuugccaaaaaggcaauaucagguguaacauuugcaucuga

SEQ ID NO: 140187 - RNA, 1701 nt, Artificial Sequence; identical to SEQ ID NO: 140113
  derived and/or modified CDS sequence (opt3) from hemagglutinin__InfluenzaA__AHZ36541

SEQ ID NO: 140188 - RNA, 1701 nt, Artificial Sequence
  derived and/or modified CDS sequence (opt3) from hemagglutinin__InfluenzaA__AHZ36553
augaagaccaucauugcccugagcuacauacucugccuuaucuucgcucaggagauucccggcaacgacaauuccacagcaacucuguguuuggggcaccaugccgugccuaacggaacgaucgucaaaaccauuacaaaugaucaaaucgaaguuacuaacgcgaccgaguuagugcagucuucaaguacaggugaaauaugcaauagcccacaccagauccuggacggcgagaacuguacccuaauugaugcucuccugggggacccgcagugcgaugacuuucaaaauaaggaaugggaucuuuucguagagagauccaaagcccauucuaacuguuaucccuacgacgugccugauuaugcaucgcugaggucauuggucgccagcaguggaacucucgaguuuaagaaugaauccuucaacuggacaggcgugacccagaaugguacgucuagcgcuugcauccggcgcuccaacaauucauuuuucagucgacugaacuggcugacucaccucaauuuuaaauacccagcauuaaacguuaccaugcccaacaaugagcaguucgacaagcuguauauuuggggagugcaucacccugggacagauaaggaccagaucuuucuuuacgcccaagcuagcggccguauaacugucucuaccaaaagaucccagcaggccgugauuccaaacaucggcucaaggccccggguacgcaauauuccuagcagaguuaguaucuauuggacaaucgugaagccaggggauauuuugcugauaaacucuaccggaaaucuaaucgcgccgagggguuacuucaaaauucgguccggcaagagcucgaucaugcgcucugacgcacccauagggaaauguaacuccgccugcauuacgccuaauggaucaaucccaaacgacaagcccuuucagaaugucaaccgaaucacuuacggcacauguccuagauaugugaagcaaaauacccucaaacuggcuacugguaugaggaacgugccagaaaagcagacacgggggauuuucggagccaucgcaggcuuuauugagaauggcugggaggggauggucgauggaugguacgguuuccgucaccagaacagugaaggccgcgggcaagcugccgaccuuaaaagcacccaggcggccauagaucagaucaauggaaagcugaacagauugauuggcaaaacgaacgagaaguuccaucagaucgaaaaagaguuuuccgaaguugaggguaggauccaagaccucgagaaguauguggaagauaccaagauugaccuguggucuuacaaugcagaguuacugguagcucucgaaaaccagcacacaauagaucuuacugacagcgagaugaauaaacuguucgaaaagaccaaaaagcaguugcgggagaacgccgaggauauggggaauggcugcuuuaaaaucuaucauaagugugacaacgcuugcauuggaucaauccgaaauggcacauacgaucacgacguguaucgcgacgaagcccuaaacaauagauuccagauuaagggggucgagcugaaaaguggauacaaggauuggauccucuggauauccuuugcaaucagcugcuuccugcuuuguguggcccuguuggguuuuauuaugugggcuugccaaaaaggcaacaucagguguaauauuugcaucuga

SEQ ID NO: 140189 - RNA, 1701 nt, Artificial Sequence; identical to SEQ ID NO: 140113
  derived and/or modified CDS sequence (opt3) from hemagglutinin__InfluenzaA__AHZ36565

SEQ ID NO: 140190 - RNA, 1701 nt, Artificial Sequence; identical to SEQ ID NO: 140113
  derived and/or modified CDS sequence (opt3) from hemagglutinin__InfluenzaA__AHZ36577

SEQ ID NO: 140191 - RNA, 1701 nt, Artificial Sequence; identical to SEQ ID NO: 140113
  derived and/or modified CDS sequence (opt3) from hemagglutinin__InfluenzaA__AHZ36589

SEQ ID NO: 140192 - RNA, 1701 nt, Artificial Sequence; identical to SEQ ID NO: 140188
  derived and/or modified CDS sequence (opt3) from hemagglutinin__InfluenzaA__AHZ36601

SEQ ID NO: 140193 - RNA, 1701 nt, Artificial Sequence
  derived and/or modified CDS sequence (opt3) from hemagglutinin__InfluenzaA__AHZ36613
augaagaccaucauugcccugagcuacauacucugccuuaucuucgcucaggagauucccggcaacgacaauuccacagcaacucuguguuuggggcaccaugccgugccuaacggaacgaucgucaaaaccauuacaaaugaucaaaucgaaguuacuaacgcgaccgaguuagugcagucuucaaguacaggugaaauaugcaauagcccacaccagauccuggacggcgagaacuguacccuaauugaugcucuccugggggacccgcagugcgaugacuuucaaaauaaggaaugggaucuuuucguagagagauccaaagcccauucuaacuguuaucccuacgacgugccugauuaugcaucgcugaggucauuggucgccagcaguggaacucucgaguuuaauaacgaauccuucaauuggacaggcgugacccagaacgguacgucuagcgcuugcauccggcgcuccaauaacucauuuuucagucgacugaauuggcugacucaccucaacuuuaaguacccagcauuaaacguuaccaugcccaauaacgagcaguucgacaaacuguauauuuggggagugcaucacccugggacagauaaggaccagaucuuucuuuacgcccaagcuagcggccguauaacugucucuaccaagagaucccagcaggccgugauuccaaauaucggcucaaggccccggguacgcaacauuccuagcagaguuaguaucuauuggacaaucgugaaaccaggggauauuuugcugauaaauucuaccggaaaccuaaucgcgccgagggguuacuucaagauucgguccggcaaaagcucgaucaugcgcucugacgcacccauagggaaguguaauuccgccugcauuacgccuaacggaucaaucccaaaugacaaacccuuucagaacgucaaucgaaucacuuacggcacauguccuagauaugugaagcaaaacacccucaagcuggcuacugguaugaggaaugugccagaaaaacagacacgggggauuuucggagccaucgcaggcuuuauugagaacggcugggaggggauggucgauggaugguacgguuuccgucaccagaauagugaaggccgcgggcaagcugccgaccuuaagagcacccaggcggccauagaucagaucaacggaaaacugaacagauugauuggcaagacgaaugagaaauuccaucagaucgaaaaggaguuuuccgaaguugaggguaggauccaagaccucgagaaauauguggaagauaccaagauugaccuguggucuuacaacgcagaguuacugguagcucucgaaaaucagcacacaauagaucuuacugacagcgagaugaacaagcuguucgagaaaaccaagaaacaguugcgggaaaaugccgaggauauggggaacggcugcuuuaagaucuaucauaaaugugacaaugcuugcauuggaucaauccgaaacggcacauacgaucacgacguguaucgcgacgaagcccuaaauaacagauuccagauuaagggggucgagcugaagaguggauacaaagauuggauccucuggauauccuuugcaacuagcugcuuccugcuuuguguggcccuguuggguuuuaucaugugggcuugccaaaagggcaauauuagguguaacaucugcauuuga

SEQ ID NO: 140194 - RNA, 1701 nt, Artificial Sequence; identical to SEQ ID NO: 140113
  derived and/or modified CDS sequence (opt3) from hemagglutinin__InfluenzaA__AHZ36625

SEQ ID NO: 140195 - RNA, 1701 nt, Artificial Sequence; identical to SEQ ID NO: 140114
  derived and/or modified CDS sequence (opt3) from hemagglutinin__InfluenzaA__AHZ36637

SEQ ID NO: 140196 - RNA, 1701 nt, Artificial Sequence; identical to SEQ ID NO: 140114
  derived and/or modified CDS sequence (opt3) from hemagglutinin__InfluenzaA__AHZ36649

SEQ ID NO: 140197 - RNA, 1701 nt, Artificial Sequence; identical to SEQ ID NO: 138042
  derived and/or modified CDS sequence (opt3) from hemagglutinin__InfluenzaA__AHZ36661

SEQ ID NO: 140198 - RNA, 1701 nt, Artificial Sequence; identical to SEQ ID NO: 138042
  derived and/or modified CDS sequence (opt3) from hemagglutinin__InfluenzaA__AHZ36673

SEQ ID NO: 140199 - RNA, 1701 nt, Artificial Sequence
  derived and/or modified CDS sequence (opt3) from hemagglutinin__InfluenzaA__AHZ36685
augaagaccaucauugcccugagcuacauacucugccuuguguucgcucagaaacugcccggcaacgacaauuccacagcaacuuuguguuuagggcaccaugccgucccuaacggaacgaucguuaagaccauuacaaaugauagaaucgaggugacuaacgcgaccgaacugguacaaaauucuucaauuggugagaucugcgacaguccacaccagauacuagauggcgaaaacuguacacucaucgacgcucugcuuggggauccgcagugcgacggauuucagaauaaaaagugggaucuguucguggagaggagcaaagccuauuccaacuguuaccccuaugacgucccugauuacgcaucuuugcggucgcucguggccucaagcggcacccuggaauuuaauaacgagaguuucaauugggcugguguuacucaaaacgggacauccucugcaugcauucgcggaagcaauuccucauuuuucagucgacugaacuggcucacccauuuaaauuuuaaguauccagcccugaacgugacgaugcccaacaaugagcaguucgacaaguuguacaucuggggcguccaccauccuggcacugauaaagaccagauuuuucuuuaugcucagagcucugggcguaucaccguguccacaaagagaucacaacaggccguaauaccaaacauuggaagcaggccccggauccgcaauauuccuaguagaaucucuaucuacuggacuauuguuaaaccaggugauauacugcuaaucaacuccaccggcaaucucauugcgccgaggggguacuucaagauccggagcggaaaaucgucuauaaugcgcuccgacgcacccauuggcaaguguaagucagaaugcaucacaccuaacgguaguaucccaaaugacaaacccuuucagaacgugaaucgaauuaccuauggggccuguccuagauacgucaagcagagcacgcugaaacuugcuacuggaaugaggaacgugccagagaagcaaacacggggcaucuucggcgccauugcaggguuuauagaaaauggaugggaggguaugguggauggcugguauggguuccgucaccagaacuccgagggacgcggccaggcugccgaccugaaaucuacccaagcggccaucgaucagauuaaugguaaguugaacagacucaucgggaaaacuaaugaaaaguuccaccagaucgagaaggaauuuagcgaggucgaaggcaggauucaggaccuggagaaauacguugaggauacaaagauagacuuauggucauauaacgcagaacugcucguggcucuugagaaccaacauaccaucgaucugacggacagugaaaugaauaaauuguucgagaagaccaaaaagcagcuacgggaaaacgccgaggauaugggaaauggcugcuuuaagauuuaccacaaaugugacaacgcuugcaucggguccauucgaaauggaacauaugaucaugacguauaccgcgacgaggcccugaacaauagauuccagaucaagaggguggaacucaaaagcgguuacaaggauuggauacuguggaucucuuuugcaauuucaugcuuccuucugugugucgccuugcucggcuuuaucaugugggcuugccagaaagggaacauucgguguaauaucugcauauga

SEQ ID NO: 140200 - RNA, 1683 nt, Artificial Sequence; identical to SEQ ID NO: 138036
  derived and/or modified CDS sequence (opt3) from hemagglutinin__InfluenzaA__AHZ39698

SEQ ID NO: 140201 - RNA, 1683 nt, Artificial Sequence
  derived and/or modified CDS sequence (opt3) from hemagglutinin__InfluenzaA__AHZ39722
augaacacccagauccugguguucgcccucauugcuauaauccccacaaaugcagacaagauuugccuuggccaccaugccgucagcaacgggacuaaaguuaauacgcugaccgagagaggaguggaaguagugaacgcgacagagacugucgaaaggaccaauaucccucggauuuguuccaaggguaaacgcacaguggauuugggccaaugcggguuacugggaaccaucacuggcccaccgcagugugaccaguuucuagaguucucugcugaucucauaaucgaacgacgugaggguucagacguuugcuaccccgggaaguuugugaacgaggaagcccugagacagauucuuagggagaguggaggcaucgauaaagaagcaaugggcuucacauauagcgggauucggaccgacggagccacguccgcuugucgcagaucugguucgucauuuuacgcagagaugaaguggcuguugagcaauacugaugacgccgcuuucccucaaaugaccaagaguuauaaaaacacaaggaaguccccagcccucaucgucuggggcauacaccauucugugagcacugcggagcagaccaaacuguacggguccggaaauaagcugguaacaguuggcucaaguaacuaucagcagagcuuugugcccucuccuggugcacggccacaagucaaugggcucuccggacgcauugauuuccacugguuaaugcugaaccccaaugacaccgugacguuuucauucaacggcgccuuuaucgcuccugaucgagccagcuuccuuagaggcaaaaguauggggauucagucuggagugcaggucgacgcaaauugcgaaggugauuguuaccauuccggcgggacuaucaucagcaacuugccauuucagaacauugacucgagggcuguuggaaagugcccgcgguaugugaagcaacguucucugcuacucgccacaggcaugaaaaauguacccgagauaccuaagggucgcgggcuguucggcgcgaucgccggauucauugaaaacggcugggaggggcuuaucgacggaugguacgguuuuagacaccagaaugcacagggcgaagggaccgcugccgauuacaaauccacucaaucagcuauagaccagauuacaggaaagcugaacagguugaucgagaaaaccaaucagcaguucgagcucaucgauaacgaauuuaaugagguggaaaagcaaauuggcaacgucaucaauuggacgcgggacaguauuaccgagguguggagcuauaacgccgaacuguuaguugcaauggagaaucagcacacaauagaucuggccgacuccgagauggauaaacucuacgaacgagugaagcgccagcuuagagagaacgcugaagaggacgguacuggguguuucgaaaucuuucauaagugcgaugacgauuguauggcgucuauuaggaauaacaccuaugaccacagcaaauaccgggaggaggcaaugcagaaucgcauccaaaucgacccagucaagcugucaaguggcuauaaagaugugauuuugugguucuccuuuggagccagcugcuucauacuacuggcuaucguaaugggccucguuuuuauuugcgugaagaacgggaacaugagauguacaaucugcauuuga

SEQ ID NO: 140202 - RNA, 1683 nt, Artificial Sequence; identical to SEQ ID NO: 140201
  derived and/or modified CDS sequence (opt3) from hemagglutinin__InfluenzaA__AHZ39734

SEQ ID NO: 140203 - RNA, 1683 nt, Artificial Sequence
  derived and/or modified CDS sequence (opt3) from hemagglutinin__InfluenzaA__AHZ39746
augaacacccagauccugguguucgcccucauugcuauaauccccacaaaugcagacaagauuugccuuggccaccaugccgucagcaacgggacuaaaguuaauacgcugaccgagagaggaguggaaguagugaacgcgacagagacugucgaaaggaccaauaucccucggauuuguuccaaggguaaacgcacaguggauuugggccaaugcggguuacugggaaccaucacuggcccaccgcagugugaccaguuucuagaguucucugcugaucucauaaucgaacgacgugaggguucagacguuugcuaccccgggaaguuugugaacgaggaagcccugagacagauucuuagggagaguggaggcaucgauaaagaagcaaugggcuucacauauagcgggauucggaccaauggagccacguccgcuugucgcagaucugguucgucauuuuacgcagagaugaaguggcuguugagcaacacugacaaugccgcuuucccucaaaugaccaagaguuauaaaaacacaaggaaguccccagcccucaucgucuggggcauacaccauucugugagcacugcggagcagaccaaacuguacggguccggaaauaagcugguaacaguuggcucaaguaacuaucagcagagcuuugugcccucuccuggugaacggccacaagucaaugggcucuccggacgcauugauuuccacugguuaaugcugaaccccaaugacaccgugacguuuucauucaacggcgcauuuaucgccccugaucgagcuagcuuccuuagaggcaaaaguauggggauucagucuggagugcaggucgacgccaacugcgagggugauuguuaccauuccggcgggacuaucaucagcaauuugccauuucagaacauugacucgagggcaguuggaaagugcccgcgguaugugaagcaacguucucugcuacucgcuacaggcaugaaaaauguacccgaaauaccuaagggucgcgggcuguucggcgccaucgcgggauucauugagaacggcugggaagggcuuaucgauggaugguacgguuuuagacaccagaaugcccagggcgaggggaccgcagcugacuacaaauccacucaaucagccauagaccagauuacaggaaagcugaacagguugaucgagaaaaccaaucagcaguucgaacucaucgauaacgaguuuaaugaaguggagaagcaaauuggcaacgucaucaauuggacgcgggacaguauuaccgaaguguggagcuauaacgcugagcuguuaguugccauggagaaucagcacacaauagaucuggcagacuccgaaauggauaaacucuacgagcgagugaagcgccagcuuagagaaaacgccgaggaagacgguacuggguguuucgagaucuuucauaagugcgaugacgauuguauggcuucuauuaggaauaacaccuaugaccacagcaaauaccgggaggaagcgaugcagaaccgcauccaaaucgauccagucaagcugucaaguggcuauaaagacgugauuuugugguucuccuuuggagcaagcugcuucauacuacuggccaucguaaugggccucguuuuuauuugcgugaagaaugggaacaugagauguacaaucugcauuuga

SEQ ID NO: 140204 - RNA, 1683 nt, Artificial Sequence; identical to SEQ ID NO: 140201
  derived and/or modified CDS sequence (opt3) from hemagglutinin__InfluenzaA__AHZ39758

SEQ ID NO: 140205 - RNA, 1683 nt, Artificial Sequence; identical to SEQ ID NO: 140201
  derived and/or modified CDS sequence (opt3) from hemagglutinin__InfluenzaA__AHZ39770

SEQ ID NO: 140206 - RNA, 1683 nt, Artificial Sequence; identical to SEQ ID NO: 140201
  derived and/or modified CDS sequence (opt3) from hemagglutinin__InfluenzaA__AHZ39782

SEQ ID NO: 140207 - RNA, 1701 nt, Artificial Sequence; identical to SEQ ID NO: 137931
  derived and/or modified CDS sequence (opt3) from hemagglutinin__InfluenzaA__AHZ39794

SEQ ID NO: 140208 - RNA, 1701 nt, Artificial Sequence; identical to SEQ ID NO: 138045
  derived and/or modified CDS sequence (opt3) from hemagglutinin__InfluenzaA__AHZ39806

SEQ ID NO: 140209 - RNA, 1701 nt, Artificial Sequence
  derived and/or modified CDS sequence (opt3) from hemagglutinin__InfluenzaA__AHZ39818
augaagaccaucauugcccugagcuacauacucugccuuguguucgcucagaaacugcccggcaacgacaauuccacagcaacuuuguguuuagggcaccaugccgucccuaacggaacgaucguuaagaccauuacaaaugaucaaaucgaggugacuaacgcgaccgaacugguacagucuucaaguacaggugagauuugcaauagcccacaccagauccuagacggcgaaaacuguacccucauagaugcucugcuuggggacccgcagugcgauggauuucaaaauaaaaagugggaccuguucguggagagauccaaagcccauucuaacuguuaucccuacgaugucccugacuaugcaucguugaggucacucguggccagcaguggcacucuggaauuuaauaacgaguccuucaauuggacagguguuacccagaacgggacgucuagcgcuugcauccggcgcuccaauaacucauuuuucagucgacugaauuggcucacucacuuaaacuuuaaguacccagcacugaacgugaccaugcccaauaacgagcaguucgauaaguuguauauuuggggaguccaucacccuggcacagacaaagaucagacuuuucuuuacgcccaagcugccggccguaucaccgugagcacaaagagaucucagcaggcgguaauuccaaauaucggguccaggccccggguucgcaacauaccuucaagagugagcauuuauuggaccaucgucaaaccaggagacauucugcuaaucaauaguacggguaaccucaucgcaccgaggggcuacuucaagauucggucugggaaauccagcauaaugcgcucggaugcccccaucggaaaguguaauucugcuugcauuacuccuaacggcuccaucccaaaugacaagcccuuucagaacgugaaucgaauaacauacggugccuguccuagauaugugaaacaaaacacccugaaacuugcaacugggaugaggaaugucccagaaaaacagacacggggaauuuucggcgcuaucgccggcuuuaucgagaacgggugggaaggaaugguugacgguugguacggcuuccgucaccaaaauucagaggggcgcggacaggcggccgaucugaagaguacccaggcagcuauugaccagaucaacggcaaauugaacagacucauugguaagacgaaugagaaauuccaucagauagaaaaggaguuuagcgaaguggaggggaggauccaagaucuggaaaaguauguagaggacaccaaaauugauuuaugguccuacaacgccgagcugaucguggcucucgaaaaucagcacacaaucgaccuuacugauucugagaugaacaagcuguucgaaaagaccaagaaacaguugcgggagaaugccgaagacaugggcaacggaugcuuuaagauuuaucauaagugugauaaugcaugcauaggcagcauccgaaacgggacauacgaccacgaugucuaucgcgacgaggcccuaaauaacagauuccagauuaaaggaguggagcugaagucagguuacaaagacuggauccucuggauuaguuuugcuaucuccugcuuccugcuuuguguugugcuguugggcuuuauaaugugggcgugccaaaaggggaauaucagguguaacauuugcaucuga

SEQ ID NO: 140210 - RNA, 1701 nt, Artificial Sequence; identical to SEQ ID NO: 137931
  derived and/or modified CDS sequence (opt3) from hemagglutinin__InfluenzaA__AHZ39841

SEQ ID NO: 140211 - RNA, 1701 nt, Artificial Sequence; identical to SEQ ID NO: 137951
  derived and/or modified CDS sequence (opt3) from hemagglutinin__InfluenzaA__AHZ39853

SEQ ID NO: 140212 - RNA, 1701 nt, Artificial Sequence; identical to SEQ ID NO: 137931
  derived and/or modified CDS sequence (opt3) from hemagglutinin__InfluenzaA__AHZ39865

SEQ ID NO: 140213 - RNA, 1701 nt, Artificial Sequence
  derived and/or modified CDS sequence (opt3) from hemagglutinin__InfluenzaA__AHZ39877
augaagaccaucauugcccugagcuacauacucugccuuguguucgcucagaaacugcccggcaacgacaauuccacagcaacuuuguguuuagggcaccaugccgucccuaacggaacgaucguuaagaccauuacaaaugauagaaucgaggugacuaacgcgaccgaacugguacaaaauucuucaauuggugagaucugcgacaguccacaccagauacuagauggcgaaaacuguacacucaucgacgcucugcuuggggauccgcagugcgacggauuucagaauaaaaagugggaucuguucguggagaggagcaaagccuauuccaacuguuaccccuaugacgucccugauuacgcaucuuugcggucgcucguggccucaagcggcacccuggaauuuaauaacgagaguuucaauuggacugguguuacacaaaacgggaccuccucugcuugcauucgccgaagcaauuccucauuuuucagucgucugaacuggcucacgcauuuaaauuuuaaguauccagcacugaacgugacuaugcccaacaaugagcaguucgacaaacuuuacaucuggggaguccaccauccuggcaccgauaaagaccagaucuuuuuguaugcccagagcucuggcagaauuacaguguccacuaagaggucacaacaggcuguaauaccaaacauugggagccggccccgcaucagaaauauuccuaguaggaucucuaucuacuggaccauuguuaaaccaggagauauacugcuaaucaacuccacagguaaucucauugccccgcggggcuacuucaagauccgcagcgggaaaucgucuauaaugcgauccgacgcgcccauuggaaaguguaagucagaaugcaucaccccuaacggcaguaucccaaaugacaaacccuuucagaacgugaauagaauuacguauggugcauguccuagguacgucaagcagagcacucugaaacuugccacagggaugcggaacgugccagagaagcaaacccguggaaucuucggcgcuauugccggcuuuauagaaaaugggugggagggaaugguggaugguugguauggcuuccgccaccagaacuccgaggggagaggacaggcagcugaccugaaaucuacucaagccgcgaucgaucagauuaauggcaaguugaacaggcucaucgguaaaacaaaugaaaaguuccaccagaucgagaaggaauuuagcgaggucgaagggcggauucaggaccuggagaaauacguugaggauaccaagauagacuuauggucauauaacgccgaacugcucguggcacuugagaaccaacauacgaucgaucugaccgacagugaaaugaauaaauuguucgagaagacaaagaagcagcuacgagaaaacgcugaggauaugggcaauggaugcuuuaagauuuaccacaaaugugacaacgccugcaucggcuccauucgcaaugggacuuaugaucauaacguauacagagacgaggcucugaauaacagguuccagaucaagggaguggaacucaaaagcgguuacaaggacuggauacuguggaucucuuuugccaccucaugcuuccuucugugugucgcauugcucggcuuuauuaugugggccugccagaaagggaauauccgguguaacauuugcaucuga

SEQ ID NO: 140214 - RNA, 1701 nt, Artificial Sequence; identical to SEQ ID NO: 137951
  derived and/or modified CDS sequence (opt3) from hemagglutinin__InfluenzaA__AHZ39889

SEQ ID NO: 140215 - RNA, 1701 nt, Artificial Sequence; identical to SEQ ID NO: 137932
  derived and/or modified CDS sequence (opt3) from hemagglutinin__InfluenzaA__AHZ39913

SEQ ID NO: 140216 - RNA, 1701 nt, Artificial Sequence
  derived and/or modified CDS sequence (opt3) from hemagglutinin__InfluenzaA__AHZ39925
augaagaccaucauugcccugagcuacauacucugccuuguguucgcucagaaacugcccggcaacgacaauuccacagcaacuuuguguuuagggcaccaugccgucccuaacggaacgaucguuaagaccauuacaaaugauagaaucgaggugacuaacgcgaccgaacugguacaaaauucuucaauuggugagaucugcgacaguccacaccagauacuagauggcgaaaacuguacacucaucgacgcucugcuuggggauccgcagugcgacggauuucagaauaaaaagugggaucuguucguggagaggagcaaagccuauuccaacuguuaccccuaugacgucccugauuacgcaucuuugcggucgcucguggccucaagcggcacccuggaauuuaauaacgagaguuucaauuggacugguguuacacaaaacgggaccuccucugcuugcauucgccgaagcaauuccucauuuuucagucgucugaacuggcucacgcauuuaaauuuuaaguauccagcacugaacgugacuaugcccaacaaugagcaguucgacaaacuuuacaucuggggaguccaccauccuggcaccgauaaagaccagaucuuuuuguaugcccagagcucuggcagaauuacaguguccacuaagaggucacaacaggcuguaauaccaaacauugggagccggccccgcaucagagauauuccuaguaggaucucuaucuacuggaccauuguuaaaccaggagacauacugcuaaucaauuccacagguaaccucauugccccgcggggcuacuucaagauccgcagcgggaaaucgucuauaaugcgauccgacgcgcccauuggaaaguguaagucagaaugcaucaccccuaauggcaguaucccaaacgauaaacccuuucagaaugugaacagaauuacguauggugcauguccuagguacgucaagcagagcacucugaaacuugccacagggaugcggaaugugccagagaagcaaacccguggaaucuucggcgcuauugccggcuuuauagaaaacgggugggagggaaugguggacgguugguauggcuuccgccaccaaaauuccgaggggagaggacaggcagcugaucugaaaucuacucaggccgcgaucgaccagauuaacggcaaguugaauaggcucaucgguaaaacaaacgaaaaguuccaccagaucgagaaggaauuuagcgaggucgaagggcggauucaggaucuggagaaauacguugaggacaccaagauagauuuauggucauauaaugccgaacugcucguggcacuugagaaccaacauacgaucgaccugaccgauagugaaaugaacaaauuguucgagaagacaaagaagcagcuacgagaaaaugcugaggacaugggcaacggaugcuuuaagauuuaccacaaaugugauaaugccugcaucggcuccauucgcaacgggacuuaugaccaugacguauacagagaugaggcucugaauaacagguuccagaucaagggaguggaacucaaaagcgguuacaaggacuggauacuguggaucucuuuugccauuucaugcuuccuucugugugucgcauugcucggcuuuaucaugugggccugccagaaagggaauauucgguguaacaucugcauauga

SEQ ID NO: 140217 - RNA, 1701 nt, Artificial Sequence; identical to SEQ ID NO: 137931
  derived and/or modified CDS sequence (opt3) from hemagglutinin__InfluenzaA__AHZ39937

SEQ ID NO: 140218 - RNA, 1701 nt, Artificial Sequence; identical to SEQ ID NO: 137931
  derived and/or modified CDS sequence (opt3) from hemagglutinin__InfluenzaA__AHZ39949

SEQ ID NO: 140219 - RNA, 1701 nt, Artificial Sequence; identical to SEQ ID NO: 137931
  derived and/or modified CDS sequence (opt3) from hemagglutinin__InfluenzaA__AHZ39961

SEQ ID NO: 140220 - RNA, 1701 nt, Artificial Sequence; identical to SEQ ID NO: 137931
  derived and/or modified CDS sequence (opt3) from hemagglutinin__InfluenzaA__AHZ39973

SEQ ID NO: 140221 - RNA, 1701 nt, Artificial Sequence
  derived and/or modified CDS sequence (opt3) from hemagglutinin__InfluenzaA__AHZ39985
augaagaccaucauugcccugagcuacauacucugccuuguguucgcucagaaacugcccggcaacgacaauuccacagcaacuuuguguuuagggcaccaugccgucccuaacggaacgaucguuaagaccauuacaaaugauagaaucgaggugacuaacgcgaccgaacugguacaaaauucuucaauuggugagaucugcgacaguccacaccagauacuagauggcgaaaacuguacacucaucgacgcucugcuuggggauccgcagugcgacggauuucagaauaaaaagugggaucuguucguggagaggagcaaagccuauuccaacuguuaccccuaugacgucccugauuacgcaucuuugcggucgcucguggccucaagcggcacccuggaauuuaauaacgagaguuucaauuggacugguguuacacaaaacgggaccuccucugcuugcauucgccgaagcaauuccucauuuuucagucgucugaacuggcucacgcauuuaaauuuuaaguauccagcacugaacgugacuaugcccaacaaugagcaguucgacaaacuuuacaucuggggaguccaccauccuggcaccgauaaagaccagaucuuuuuguaugcccagagcucuggcagaauuacaguguccacuaagaggucacaacaggcuguaauaccaaacauugggagccggccccgcaucagaaauauuccuaguaggaucucuaucuacuggaccauuguuaaaccaggagauauacugcuaaucaacuccacagguaaucucauugccccgcggggcuacuucaagauccgcagcgggaaaucgucuauaaugcgauccgacgcgucaauuggaaaguguaagagugaaugcaucacccccaacggcagcaucccuaaugacaaaccauuucagaacgugaauagaauuacguauggugcaugucccagguacgucaagcaguccacucugaaacuugccacagggaugcggaacgugccugagaagcaaacccguggaaucuucggcgcuauugccggcuuuauagaaaaugggugggagggaaugguggaugguugguauggcuuccgccaccagaacucugaggggagaggacaggcagcugaccugaaaagcacucaagccgcgaucgaucagauuaauggcaaguugaacaggcucaucgguaaaacaaaugaaaaguuccaccagaucgagaaggaauuuucagaggucgaagggcggauucaggaccuggagaaauacguugaggauaccaagauagacuuauggaguuauaacgccgaacugcucguggcacuugagaaccaacauacgaucgaucugaccgacuccgaaaugaauaaauuguucgagaagacaaagaagcagcuacgagaaaacgcugaggauaugggcaauggaugcuuuaagauuuaccacaaaugugacaacgccugcaucggcagcauucgcaaugggacuuaugaucauaacguauacagagacgaggcucugaauaacagguuccagaucaagggaguggaacucaaaucugguuacaaggacuggauacuguggaucucauuugccaccaguugcuuccuucugugugucgcauugcucggcuuuauuaugugggccugccagaaagggaauauccgguguaacauuugcaucuga

SEQ ID NO: 140222 - RNA, 1701 nt, Artificial Sequence; identical to SEQ ID NO: 137931
  derived and/or modified CDS sequence (opt3) from hemagglutinin__InfluenzaA__AHZ39997

SEQ ID NO: 140223 - RNA, 1701 nt, Artificial Sequence
  derived and/or modified CDS sequence (opt3) from hemagglutinin__InfluenzaA__AHZ40009
augaagaccaucauugcccugagcuacauacucugccuuguguucgcucagaaacugcccggcaacgacaauuccacagcaacuuuguguuuagggcaccaugccgucccuaacggaacgaucguuaagaccauuacaaaugauagaaucgaggugacuaacgcgaccgaacugguacaaauuucuucaaucggugagauaugcgacaguccacaccagauccuagauggcgaaaauuguacacucauugacgcucugcuuggggauccgcagugcgacggauuucagaacaaaaagugggaucuguucguggagaggagcaaagccuauuccaauuguuaccccuaugacgucccugauuacgcaucuuugcggucgcucguggccucaagcggcacccuggaauuuaacaaugagaguuucaacuggacugguguuacacaaaaugggaccuccucugcuugcauccgcaagagcaacuccucauuuuucagucgacugaauuggcucacgcauuuaaacuuuaaguauccagcacugaaugugacuaugcccaacaacgagcaguucgacaaacuuuacauuuggggaguccaccauccuggcaccgauaaggaccagaucuuuuuguaugcccagagcucuggccguauaacaguguccacuaaaagaucacaacaggcuguaauuccaaauaucgggagcaggccccggauucgcaacaucccuaguagaaucucuauuuacuggaccauaguuaagccaggagauauccugcuaauuaauuccacagguaaccucaucgccccgaggggcuacuucaaaauacggagcgggaagucgucuauuaugcgcuccgacgcgcccaucggaaaguguaaaucagaaugcaucaccccuaauggcaguauuccaaacgacaagcccuuucagaaugugaaccgaaucacguauggugcauguccuagauacgucaaacagagcacucugaaacuugccacagggaugaggaaugugccagagaagcaaacccggggaauuuucggcgcuauagccggcuuuaucgaaaacgggugggagggaaugguggaugguugguauggcuuccgucaccaaaauuccgaggggcgcggacaggcagcugaccugaagucuacucaggccgcgauugaucagaucaacggcaaauugaauagacucaucgguaagacaaacgaaaaguuccaccagauugagaaagaauuuagcgaggucgaagggaggauacaggaccuggagaaguacguugaggauaccaaaaucgacuuauggucauauaaugccgaacugcucguggcacuugagaaccaacauacgauugaucugaccgacagugaaaugaacaaguuguucgagaaaacaaagaagcagcuacgggaaaaugcugaggauaugggcaacggaugcuuuaaaaucuaccacaagugugacaaugccugcauuggcuccauccgaaacgggacuuaugaucaugacguauaccgcgacgaggcucugaauaacagauuccagauaaaaggaguggaacucaagagcgguuacaaagauuggauccuguggauuucuuuugccaucucaugcuuccuucugugugucgcauugcucggcuuuauuaugugggccugccagaaggggaauaucagguguaacauaugcauuuga

SEQ ID NO: 140224 - RNA, 1701 nt, Artificial Sequence; identical to SEQ ID NO: 137931
  derived and/or modified CDS sequence (opt3) from hemagglutinin__InfluenzaA__AHZ40021

SEQ ID NO: 140225 - RNA, 1701 nt, Artificial Sequence; identical to SEQ ID NO: 137906
  derived and/or modified CDS sequence (opt3) from hemagglutinin__InfluenzaA__AHZ40033

SEQ ID NO: 140226 - RNA, 1701 nt, Artificial Sequence; identical to SEQ ID NO: 137931
  derived and/or modified CDS sequence (opt3) from hemagglutinin__InfluenzaA__AHZ40045

SEQ ID NO: 140227 - RNA, 1701 nt, Artificial Sequence; identical to SEQ ID NO: 137931
  derived and/or modified CDS sequence (opt3) from hemagglutinin__InfluenzaA__AHZ40060

SEQ ID NO: 140228 - RNA, 1701 nt, Artificial Sequence; identical to SEQ ID NO: 137931
  derived and/or modified CDS sequence (opt3) from hemagglutinin__InfluenzaA__AHZ40072

SEQ ID NO: 140229 - RNA, 1701 nt, Artificial Sequence; identical to SEQ ID NO: 137931
  derived and/or modified CDS sequence (opt3) from hemagglutinin__InfluenzaA__AHZ40084

SEQ ID NO: 140230 - RNA, 1701 nt, Artificial Sequence; identical to SEQ ID NO: 137931
  derived and/or modified CDS sequence (opt3) from hemagglutinin__InfluenzaA__AHZ40096

SEQ ID NO: 140231 - RNA, 1701 nt, Artificial Sequence; identical to SEQ ID NO: 137932
  derived and/or modified CDS sequence (opt3) from hemagglutinin__InfluenzaA__AHZ40108

SEQ ID NO: 140232 - RNA, 1701 nt, Artificial Sequence; identical to SEQ ID NO: 138045
  derived and/or modified CDS sequence (opt3) from hemagglutinin__InfluenzaA__AHZ40120

SEQ ID NO: 140233 - RNA, 1701 nt, Artificial Sequence
  derived and/or modified CDS sequence (opt3) from hemagglutinin__InfluenzaA__AHZ40130
augaagaccaucauugcccugagcuacauacucugccuuguguucgcucagaaacugcccggcaacgacaauuccacagcaacuuuguguuuagggcaccaugccgucccuaacggaacgaucguuaagaccauuacaaaugauagaaucgaggugacuaacgcgaccgaacugguacaaaauucuucaauuggugagaucugcgacaguccacaccagauacuagauggcgaaaacuguacacucaucgacgcucugcuuggggauccgcagugcgacggauuucagaauaaaaagugggaucuguucguggagaggagcaaagccuauuccaacuguuaccccuaugacgucccugauuacgcaucuuugcggucgcucguggccucaagcggcacccuggaauuuaauaacgagaguuucaauuggacugguguuacacaaaacgggaccuccucugcuugcauucgccgaagcaauuccucauuuuucagucgucugaacuggcucacgcauuuaaauuuuaaguauccagcacugaacgugacuaugcccaacaaugagcaguucgacaaacuuuacaucuggggaguccaccauccuggcaccgauaaagaccagaucuuuuuguaugcccagagcucuggcagaauuacaguguccacuaagaggucacaacaggcuguaauaccaaacauugggagccggccccgcaucagaaauauuccuaguaggaucucuaucuacuggaccauuguuaaaccaggagauauacugcuaaucaacuccacagguaaucucauugccccgcggggcuacuucaagauccgcagcgggaaaucgucuauaaugcgauccgacgcgcccauuggaaaguguaagucagaaugcaucaccccuaacggcaguaucccaaaugacaaacccuuucagaacgugaauagaauuacguauggugcauguccuagguacgucaagcagagcacucugaaacuugccacagggaugcggaacgugccagagaagcaaacccguggaaucuucggcgcuauugccggcuuuauagaaaaugggugggagggaaugguggaugguugguauggcuuccgccaccagaacuccgaggggagaggacaggcagcugaccugaaaucuacucaagccgcgaucgaucagauuaauggcaaguugaacaggcucaucgguaaaacaaaugaaaaguuccaccagaucgagaaggaauuuagcgaggucgaagggcggauucaggaccuggagaaauacguugaggauaccaagauagacuuauggucauauaacgccgaacugcucguggcacuugagaaccaacauacgaucgaucugaccgacagugaaaugaauaaauuguucgagaagacaaagaagcagcuacgagaaaacgcugaggauaugggcaauggaugcuuuaagauuuaccacaaaugugacaacgccugcaucggcuccauucgcaaugggacuuaugaucauaacguauacagagacgaggcucugaauaacagguuccagaucaagggaguggaacucaaaagcgguuacaagaauuggauacuguggaucucuuuugccauuucaugcuuccuucugugugucgcauugcucggcuuuaucaugugggccugccagaaagggaacauucgguguaauaucugcauauga

SEQ ID NO: 140234 - RNA, 1701 nt, Artificial Sequence
  derived and/or modified CDS sequence (opt3) from hemagglutinin__InfluenzaA__AHZ40142
augaagaccaucauugcccugagcuacauacucugccuuguguucgcucagaaacugcccggcaacgacaauuccacagcaacuuuguguuuagggcaccaugccgucccuaacggaacgaucguuaagaccauuacaaaugauagaaucgaggugacuaacgcgaccgaacugguacaaaauucuucaauuggugagaucugcgacaguccacaccagauacuagauggcgaaaacuguacacucaucgacgcucugcuuggggauccgcagugcgacggauuucaggauaaaaagugggaccuguucguggagaggagcaaagccuauuccaauuguuaccccuaugaugucccugacuacgcaucuuugcggucgcucguggccucaagcggcacccuggaauuuaacaaugagaacuucaauuggacugguguuacacaaaacgggaccaguuccgcuugcauucgccgaucuaauagcuccuuuuucucacgucugaacuggcucacgcauuuaaauuuuaaguauccagcacugaacgugacuaugcccaacaaugagcaguucgauaaguuguacaucuggggaguccaccauccuggcaccgacaaagaucagauuuuucuuuaugcccagaguagcggcagaaucacagugucuacuaagaggucccaacaggcuguaauaccaaacauugggucacggccccgcaucagaaauauuccuagcaggaucaguaucuacuggaccauuguuaaaccaggagacauacugcuaaucaacucuacagguaaucucauugccccgcggggcuacuucaagauccgcuccgggaaaagcucgauaaugcgaucugacgcgcccauuggaaaguguaaguccgaaugcaucaccccuaacggcucaaucccaaaugauagacccuuucagaacgugaauaggauuacguauggugcauguccucgguacgucaaacagaguacucugaaacuugccacagggaugcguaacgugccagagaagcaaacccgcggaaucuucggcgcuauugccggcuuuauagaaaaugggugggagggaaugguggacgguugguauggcuucagacaccagaacagcgaggggaggggacaggcagcugaucugaaguccacucaagccgcgaucgaccagauuaauggcaaauugaaccggcucaucgguaagacaaaugaaaaauuccaccagaucgagaaggaauuuucugaggucgaagggcgcauucaggaucuggagaaguacguugaggacaccaaaauagauuuauggagcuauaacgccgaacugcucguggcacuugagaaccaacauacgaucgaccugaccgauucagaaaugaauaaguuguucgagaaaacaaagaaacagcuacgagaaaacgcugaggacaugggcaauggaugcuuuaagauuuaccacaagugugauaacgccugcaucggcaguauuagaaaugggacuuaugaccaugacguauacagggaugaggcucugaacaaucgguuccagaucaaaggaguggaacucaaguccgguuacaaagacuggauacuguggaucagcuuugccauuucuugcuuccuucugugugucgcauugcucggcuuuaucaugugggccugccagaaggggaacauucgcuguaauaucugcauauga

SEQ ID NO: 140235 - RNA, 1701 nt, Artificial Sequence
  derived and/or modified CDS sequence (opt3) from hemagglutinin__InfluenzaA__AHZ40154
augaagaccaucauugcccugagcuacauacucugccuuggcuucgcucaggagcugcccgggaacgacaauuccacagcaacuuuguguuuaggacaccaugccgugccuaacgguacgaucgucaaaaccauuacaaaugaucaaaucgaaguuacuaacgcgaccgagcuggugcagucuucaaguacaggcgaaauuugcaauagcccacaccagauccuagacggggagaacuguacccucauagaugcucugcuuggagacccgcagugcgauggcuuucaaaauaagaaaugggaccuguucguagaaagauccaaggcccauucuaacuguuaucccuacgaugugccugacuaugcaucguugaggucacucgucgccagcagugguacucuggaguuuaauaacgaguccuucaauuggacaggggugacccagaacggaacgucuagcgcuugcauccggggcuccaauaacucauuuuucagucgccugaauuggcucacucacuuaaacuuuaaauacccagcacugaacguuaccaugcccaauaacgaacaguucgauaaacuuuauauuuggggcgugcaucacccugggacagacaaggaucagaucuuuuuguacgcccaagcuagcggacgaauuacugucucuaccaagcguucccagcaggccgugaucccaaauauagguucaagacccaggguacggaacauuccuagccgcguuaguaucuauuggacaauugugaagccaggcgacaugcugcuaaucaauucuaccgggaaccucaucgcgccgagaggauacuucaaaauuagguccggcaagagcucgauaaugcggucugaugcacccaucgguaaauguaauuccgccugcauuacgccuaacgggucaaucccaaaugacaagcccuuucagaacgucaaucgcauaacuuacggagcuuguccucgauaugugaagcaaaacacacugaaacuugccaccggcaugagaaaugugccagagaagcagacuaggggcauuuucggggcaaucgcuggauuuaucgaaaacgguugggagggcauggucgacgggugguacggauuccggcaccagaauagugagggccguggucaagccgcggaucugaaaagcacacaggccgcaauugaccagaucaacgggaaguugaaccgccucauuggcaaaaccaaugaaaaguuccaucagauagagaaagaauuuuccgagguugaaggaagaauccaagaucuggagaaguauguggaggacacgaagauugauuuauggucuuacaacgcugaacugcucguagcccuugagaaucagcacaccaucgaccugacagauagcgaaaugaacaaauuguucgagaagacuaaaaagcagcuaagggaaaaugcugaggacaugggcaacgggugcuuuaaaaucuaucauaaguguaauaacgccugcauuggaucaauacggaaugguaccuacgaucacgacguguaucgagaugaggcacugaacaaucgcuuccagaucaagggcgucgaacucaaaaguggguacaaggacuggauucuguggaucuccuuugccauuagcugcuuccuucuguguguggcuuugcucggauuuaucaugugggcgugccaaaaaggcaacauaagauguaauaucugcauuuga

SEQ ID NO: 140236 - RNA, 1701 nt, Artificial Sequence
  derived and/or modified CDS sequence (opt3) from hemagglutinin__InfluenzaA__AHZ40166
augaaggccauccuggugguccuccuuuacaccuucgcuacagcaaacgccgacacucugugcauuggcuaucacgcgaauaacagcacggauaccguugacacaguguuggagaagaauguaacugugacccauuccgucaacuuacuggaagauaagcacaaugggaaacuauguaagcucagaggaguggcuccccugcaucuugguaaaugcaacauagccggcuggauccuggggaauccugagugugaaucuuugucaacagcaaguagcugguccuacauuguugagaccucuucgucagacaacggaacuugcuauccaggcgauuuuaucaauuacgaagaacucagggagcagcugagcaguguguccucuuucgaacgguuugagauuuucccgaagacaagcuccuggcccaaccacgacucaaauaagggugucaccgccgcuuguccucaugcaggggccaaaaguuuuuauaagaaccugaucuggcucgugaaaaagggaaauagcuacccaaaauuaucuaaguccuauauaaacgauaagggcaaagaaguacugguucuuuggggcauccaccaccccucaacgacugcugaccaacagagcuuguaccagaaugccgaugcguacguguucgucgggaccagucgcuauucuaagaaauuuaagccugagauugcaauccgaccaaaagugcgugaccaggagggaagaaugaacuacuauuggacacugauugaacccggugauaagaucacuuucgaggccaccggcaaccuaguggucccuagguacgcuuuugccauggaacggaaugcaggguccggaauaauuaucagcgacacaccaguucaugauugcaacaccacgugucaaacuccggagggcgcuauuaauacaucgcuccccuuccagaacauccacccuaucaccauuggucgcugcccaaaauaugugaagucuacuaagcugagacuugccacagggcugaggaauguacccuccauacagucacggggauuguuuggcgcgaucgccggcuucauugaagggggauggaccgguaugguggacggcugguacggguaucaucaccagaacgagcaaggaaguggcuacgcagcugaccucaaaagcacgcagaaugccaucgauaagauaaccaacaaagucaauuccgugauugagaagaugaacacacaguuuacugcuguugguaaagaguucaaucaccuggagaagcgcaucgaaaacuuaaauaagaaaguggacgauggguuccuggacaucuggaccuacaacgccgagcuccuuguccuguuggaaaaugagcgaacacuagauuaucaugacucuaacgugaagaaccuguacgagaaaguaagaaaucagcucaagaacaaugcaaaagaaauuggcaacggauguuuugaguucuaucacaagugcgauaauacuuguauggaaagcguuaagaacggcaccuacgacuauccuaaauacucagaggaagccaagcugaauagggagaaaaucgauggggugaaacuugagaguacacggauuuaucaaauacuggcuaucuacuccaccgucgcgagcucuuuggugcucgucgugucacugggagcaauuaguuuuuggaugugcagcaacgguuccuuacagugccguaucuguaucuga

SEQ ID NO: 140237 - RNA, 1701 nt, Artificial Sequence; identical to SEQ ID NO: 137931
  derived and/or modified CDS sequence (opt3) from hemagglutinin__InfluenzaA__AHZ40177

SEQ ID NO: 140238 - RNA, 1701 nt, Artificial Sequence; identical to SEQ ID NO: 137931
  derived and/or modified CDS sequence (opt3) from hemagglutinin__InfluenzaA__AHZ40189

SEQ ID NO: 140239 - RNA, 1701 nt, Artificial Sequence; identical to SEQ ID NO: 137931
  derived and/or modified CDS sequence (opt3) from hemagglutinin__InfluenzaA__AHZ40201

SEQ ID NO: 140240 - RNA, 1701 nt, Artificial Sequence; identical to SEQ ID NO: 137916
  derived and/or modified CDS sequence (opt3) from hemagglutinin__InfluenzaA__AHZ40213

SEQ ID NO: 140241 - RNA, 1701 nt, Artificial Sequence; identical to SEQ ID NO: 137883
  derived and/or modified CDS sequence (opt3) from hemagglutinin__InfluenzaA__AHZ40225

SEQ ID NO: 140242 - RNA, 1701 nt, Artificial Sequence
  derived and/or modified CDS sequence (opt3) from hemagglutinin__InfluenzaA__AHZ40237
augaagaccaucauugcccugagcuacauacucugccuuguguucgcucagaaacugcccggcaacgacaauuccacagcaacuuuguguuuagggcaccaugccgucccuaacggaacgaucguuaagaccauuacaaaugaucaaaucgaggugacuaacgcgaccgaacugguacaaaauucuucaauuggugagaucugcgacaguccacaccagauacuagauggcgaaaacuguacacucaucgacgcucugcuuggggauccgcagugcgacggauuucagaauaaaaagugggaucuguucguggagagaagcaaagccuauuccaacuguuaccccuaugacgucccugauuacgcaucuuugaggucgcucguggccucaagcggcacccuggaauuuaauaacgagaguuucaauugggcugguguuacucagaacgggacauccucugcaugcauucggggaagcaauuccucauuuuucagucgccugaacuggcucacccauuuaaauuuuaaguauccagcccugaacgugacgaugcccaacaaugagcaguucgacaaacuuuacaucuggggcguccaccauccuggcacugauaaagaccagaucuuuuuguaugcucaaagcucugggcgaauuaccguguccacaaagcguucacagcaggccguaauaccaaacauuggaagcagacccaggauccggaauauuccuagucgcaucucuaucuacuggacuauuguuaaaccaggugauauacugcuaaucaacuccaccggcaaucucauugcgccgagaggguacuucaagaucaggagcggaaaaucgucuauaaugcgguccgacgcacccauuggcaaguguaagucagaaugcaucacaccuaacgguaguaucccaaccgacaaacccuuucagaaugugaaccgcauuacguauggggccuguccucgauacgucaagcaaagcacucugaaacuugcuacaggaaugagaaaugugccagagaagcagaccaggggcaucuucggcgccauugcaggguuuauagaaaacggaugggaggguaugguggauggcugguauggguuccggcaccaaaauuccgagggacguggccaggcugccgaccugaaaucuacucaggcggccaucgaucagauuaacgguaaguugaaucgccucaucgggaaaacaaacgaaaaguuccaccagaucgagaaggaauuuagcgaggucgaaggcaggauucaagaccuggagaaauacguugaggauaccaagauagacuuauggucauauaaugcagaacugcucguggcucuugagaaccagcauacgaucgaucugaccgacagugaaaugaacaaauuguucgagaagacaaagaagcagcuaagagaaaaugccgaggauaugggaaacggcugcuuuaagauuuaccacaaaugugacaaugcuugcaucggguccauucggaacggaacuuaugaucaugacguauaccgagacgaggcccugaauaaccgcuuccagaucaaggguguggaacucaaaagcggcuacaaggauuggauacuguggaucucuuuugcaauuucaugcuuccuucugugugucgccuugcucggguuuaucaugugggcuugccaaaaaggaaauauuagauguaacaucugcauauga

SEQ ID NO: 140243 - RNA, 1701 nt, Artificial Sequence; identical to SEQ ID NO: 137939
  derived and/or modified CDS sequence (opt3) from hemagglutinin__InfluenzaA__AHZ40249

SEQ ID NO: 140244 - RNA, 1701 nt, Artificial Sequence; identical to SEQ ID NO: 137906
  derived and/or modified CDS sequence (opt3) from hemagglutinin__InfluenzaA__AHZ40261

SEQ ID NO: 140245 - RNA, 1701 nt, Artificial Sequence; identical to SEQ ID NO: 138045
  derived and/or modified CDS sequence (opt3) from hemagglutinin__InfluenzaA__AHZ40273

SEQ ID NO: 140246 - RNA, 1701 nt, Artificial Sequence
  derived and/or modified CDS sequence (opt3) from hemagglutinin__InfluenzaA__AHZ40285
augaagaccaucauugcccugagcuacauacucugccuuguguucgcucagaaacugcccggcaacgacaauuccacagcaacuuuguguuuagggcaccaugccgucccuaacggaacgaucguuaagaccauuacaaaugaucaaaucgaggugacuaacgcgaccgaacugguacagucuucaaguacaggugagauuugcgacagcccacaccagauccuagauggcgaaaauuguacccucauagacgcucugcuuggggauccgcagugcgacggauuucaaaacaaaaagugggaucuguucguggagagauccaaagccuauucuaauuguuaccccuaugacgucccugauuacgcaucguugaggucacucguggccagcaguggcacucuggaauuuaacaaugaguccuucaacuggacagguguuacccagaaugggacgucuagcgcuugcauccggcgcuccgacucaaguuucuuuagccgacugaacuggcucacucauuuaaauuuuaaguauccagcacugaacgugaccaugcccaauaacgagcaguucgauaaacuuuacauuuggggaguccaccauccuggcacagacaaggaucagaucuuuuuguaugcccaggcuucuggccguauuacuguguccaccaagagaucacaacagagcguaaucccaaacauagggaguaggccccggauucgcaauaucccuucuagaauuuccaucuacuggacaaucguuaaaccaggagacauucugcuaauaaacagcaccgguaaucucaucgccccgaggggcuacuucaagauucagucggggaaaucuuccaucaugcggucagacacgcccauaggaaaguguaacagugaaugcauuacuccuaauggcagcaucccaaacgauaagcccuuucaaaaugugaaccgcaucacauauggugcguguccucgauacgucaaacagaauacccugaaacuugcaacugggaugagaaacgugccagagaagcagacaaggggaauuuucggcgccaucgcuggcuuuauugaaaaugggugggagggaaugguggacgguugguauggcuuccggcaccaaaacuccgaggggcguggacaggccgcagaucugaagucuacccaggcugccauagaccagaucaauggcaaauugaaccgccucauugguaagacgaaugaaaaauuccaccaaaucgagaaggaauuuagcgaggucgaagggagaauccaggaucuggagaaguacguugaggacaccaaaauugauuuauggucauauaacgcggaacugcucguggcccuugagaaccagcauacaauagaccugacugauagugaaaugaauaaguuguucgagaaaaccaagaaacagcuaagggaaaacgcagaggacaugggcaauggaugcuuuaagaucuaccacaagugugauaacgcuugcauuggcuccauccggaaugggacauauaaccaugacguauaccgagacgaggcccugaauaaccgcuuccaaauuaaaggaguggaacucaagagcgguuacaaagauuggauccuguggauaucuuuugcuaucucaugcuuccuucugugugucgccuugcucggcuuuauuaugugggcaugccagaaggggaauaucagauguaacauuugcaucuga

SEQ ID NO: 140247 - RNA, 1701 nt, Artificial Sequence; identical to SEQ ID NO: 138042
  derived and/or modified CDS sequence (opt3) from hemagglutinin__InfluenzaA__AHZ40297

SEQ ID NO: 140248 - RNA, 1701 nt, Artificial Sequence
  derived and/or modified CDS sequence (opt3) from hemagglutinin__InfluenzaA__AHZ40309
augaagaccaucauugcccugagcuacauacucugccuuguguucgcucagaaacugcccggcaacgacaauuccacagcaacuuuguguuuagggcaccaugccgucccuaacggaacgaucguuaagaccauuacaaaugauagaaucgaggugacuaacgcgaccgaacugguacaaaauucuucaauuggugagaucugcgacaguccacaccagauacuagauggcgaaaacuguacacucaucgacgcucugcuuggggauccgcagugcgacggauuucagaauaaaaagugggaucuguucguggagaggagcaaagccuauuccaacuguuaccccuaugacgucccugauuacgcaucuuugcggucgcucguggccucaagcggcacccuggaauuuaauaacgagaguuucaauuggacugguguuacacaaaacgggaccuccucugcuugcauucgccgaagcaauaacuccuuuuucucacgucugaauuggcucacgcauuuaaacuuuaaguauccagcacugaacgugacuaugcccaauaacgagcaguucgacaaacuuuacaucuggggaguccaccauccuggcaccgauaaagaccagaucuuuuuguaugcccagaguagcggcagaauuacagugucuacuaagaggucccaacaggcuguaauaccaaauauugggucacggccccgcaucagaaacauuccuagcaggaucaguaucuacuggaccauuguuaaaccaggagauauacugcuaaucaauucuacagguaaccucauugccccgcggggcuacuucaagauccgcaaugggaaauccagcauaaugcgaucggacgcgcccauuggaaaguguaagucugaaugcaucaccccuaacggcuccaucccaaaugacaaacccuuucagaacgugaauagaauuacguauggugcauguccuagguacgucaagcagucaacucugaaacuugccacagggaugcggaacgugccagagaagcaaacccguggaaucuucggcgcuauugccggcuuuauagaaaaugggugggagggaaugguggaugguugguauggcuuccgccaccagaacagugaggggagaggacaggcagcugaccugaaaagcacucaagccgcgaucgaucagauuaauggcaaguugaacaggcucaucgguaaaacaaacgaaaaguuccaccagaucgagaaggaauuuuccgaggucgaagggcggauucaggaccuggagaaauacguugaggauaccaagauagacuuauggucuuauaaugccgaacugcucguggcacuugagaaccaacauacgaucgaucugaccgacagcgaaaugaauaaauuguucgagaagacaaagaagcagcuacgagaaaacgcugaggauaugggcaauggaugcuuuaagauuuaccacaaaugugacaacgccugcaucggcucaauucgcaaugggacuuaugaucaugacguauacagagacgaggcucugaacaauagguuccagaucaagggaguggaacucaaaagugguuacaaggauuggauacuguggaucuccuuugccauuagcugcuuccuucugugugucguguugcucggcuuuaucaugugggcaugccagaaagggaacauucgguguaauaucugcauauga

SEQ ID NO: 140249 - RNA, 1701 nt, Artificial Sequence; identical to SEQ ID NO: 137931
  derived and/or modified CDS sequence (opt3) from hemagglutinin__InfluenzaA__AHZ40321

SEQ ID NO: 140250 - RNA, 1701 nt, Artificial Sequence; identical to SEQ ID NO: 137931
  derived and/or modified CDS sequence (opt3) from hemagglutinin__InfluenzaA__AHZ40333

SEQ ID NO: 140251 - RNA, 1701 nt, Artificial Sequence
  derived and/or modified CDS sequence (opt3) from hemagglutinin__InfluenzaA__AHZ40345
augaagaccaucauugcccugagcuacauacucugccuuguguucgcucagaaacugcccggcaacgacaauuccacagcaacuuuguguuuagggcaccaugccgucccuaacggaacgaucguuaagaccauuacaaaugauagaaucgaggugacuaacgcgaccgaacugguacaaaauucuucaauuggugagaucugcgacaguccacaccagauacuagauggcgaaaacuguacacucaucgacgcucugcuuggggauccgcagugcgacggauuucagaauaaaaagugggaucuguucguggagaggagcaaagccuauuccaacuguuaccccuaugacgucccugauuacgcaucuuugcggucgcucguggccucaagcggcacccuggaauuuaauaacgagaguuucaauuggacugguguuacacaaaacgggaccuccucugcuugcauucgccgaagcaauuccucauuuuucagucgucugaacuggcucacgcauuuaaauuuuaaguauccagcacugaacgugacuaugcccaacaaugagcaguucgacaaacuuuacaucuggggaguccaccauccuggcaccgauaaagaccagaucuuuuuguaugcccagagcucuggcagaauuacaguguccacuaagaggucacaacaggcuguaauaccaaacauugggagccggccccgcaucagaaauauuccuaguaggaucucuaucuacuggaccauuguuaaaccaggagauauacugcuaaucaacuccacagguaaucucauugccccgcggggcuacuucaagauccgcagcgggaaaucgucuauaaugcgauccgacgcgcccauuggaaaguguaagucagaaugcaucaccccuaacggcaguaucccaagcgacaaacccuuucagaaugugaacagaauuacguauggugcauguccuagguacgucaagcaguccacucugaaacuugccacagggaugcggaaugugccagagaagcaaacccguggaaucuucggcgcuauugccggcuuuauagaaaacgggugggagggaaugguggaugguugguauggcuuccgccaccaaaauucugaggggagaggacaggcagcugaccugaaaagcacucaggccgcgaucgaucagauuaacggcaaguugaauaggcucaucgguaaaacaaacgaaaaguuccaccagaucgagaaggaauuuucagaggucgaagggcggauucaggaccuggagaaauacguugaggauaccaagauagacuuauggaguuauaaugccgaacugcucguggcacuugagaaccaacauacgaucgaucugaccgacuccgaaaugaacaaauuguucgagaagacaaagaagcagcuacgagaaaaugcugaggauaugggcaacggaugcuuuaagauuuaccacaaaugugacaaugccugcaucggcagcauucgcaacgggacuuaugaucaugacguauacagagacgaggcucugaauaacagguuccagaucaagggaguggaacucaaaucugguuacaaggauuggauacuguggaucucauuugccauuaguugcuuccuucugugugucgcauugcucggcuuuaucaugugggccugccagaaagggaauauucgguguaacaucugcauauga

SEQ ID NO: 140252 - RNA, 1701 nt, Artificial Sequence; identical to SEQ ID NO: 137932
  derived and/or modified CDS sequence (opt3) from hemagglutinin__InfluenzaA__AHZ40357

SEQ ID NO: 140253 - RNA, 1701 nt, Artificial Sequence
  derived and/or modified CDS sequence (opt3) from hemagglutinin__InfluenzaA__AHZ40369
augaagaccaucauugcccugagcuacauacucugccuuguguucgcucagaaacugcccggcaacgacaauuccacagcaacuuuguguuuagggcaccaugccgucccuaacggaacgaucguuaagaccauuacaaaugauagaaucgaggugacuaacgcgaccgaacugguacaaaauucuucaauuggugagaucugcgacaguccacaccagauacuagauggcgaaaacuguacacucaucgacgcucugcuuggggauccgcagugcgacggauuucagaauaaaaagugggaucuguucguggagaggagcaaagccuauuccaacuguuaccccuaugacgucccugauuacgcaucuuugcggucgcucguggccucaagcggcacccuggaauuuaauaacgagaguuucaauuggacugguguuacacaaaacgggaccuccucugcuugcauucgccgaagcaauuccucauuuuucagucgucugaacuggcucacgcauuuaaauuuuaaguauccagcacugaacgugacuaugcccaacaaugagcaguucgacaaguuguacaucuggggaguccaccauccuggcaccgauaaagaccagauuuuucuuuaugcccagagcucuggcagaaucacaguguccacuaagaggucacaacaggcuguaauaccaaacauugggagccggccccgcaucagaaauauuccuaguaggaucucuaucuacuggaccauuguuaaaccaggagauauacugcuaaucaacuccacagguaaucucauugccccgcggggcuacuucaagauccgcagcgggcgaucgucuauaaugagauccgacgcgcccauuggaaaauguaagucagaaugcaucaccccuaacggcaguaucccaaaugacaagcccuuucagaacgugaauaggauuacguauggugcauguccucgguacgucaaacagagcacucugaaacuugccacagggaugcguaacgugccagagaagcaaacccgcggaaucuucggcgcuauugccggcuuuauagaaaaugggugggagggaaugguggaugguugguauggcuucagacaccagaacuccgaggggaggggacaggcagcugaccugaagucuacucaagccgcgaucgaucagauuaauggcaaauugaaccggcucaucgguaagacaaaugaaaaauuccaccagaucgagaaggaauuuagcgaggucgaagggcgcauucaggaccuggagaaguacguugaggauaccaaaauagacuuauggucauauaacgccgaacugcucguggcacuugagaaccaacauacgaucgaucugaccgacagugaaaugaauaaguuguucgagaaaacaaagaaacagcuacgagaaaacgcugaggauaugggcaauggaugcuuuaagauuuaccacaagugugacaacgccugcaucggcuccauuagaaaugggacuuaugaucaugacguauacagggacgaggcucugaacaaucgguuccagaucaaaggaguggaacucaagagcgguuacaaagauuggauacuguggaucucuuuugccauuucaugcuuccuucugugugucgcauugcucggcuuuaucaugugggccugccagaaggggaacauucgcuguaauaucugcauauga

SEQ ID NO: 140254 - RNA, 1701 nt, Artificial Sequence; identical to SEQ ID NO: 138042
  derived and/or modified CDS sequence (opt3) from hemagglutinin__InfluenzaA__AHZ40381

SEQ ID NO: 140255 - RNA, 1701 nt, Artificial Sequence; identical to SEQ ID NO: 137931
  derived and/or modified CDS sequence (opt3) from hemagglutinin__InfluenzaA__AHZ40393

SEQ ID NO: 140256 - RNA, 1701 nt, Artificial Sequence; identical to SEQ ID NO: 137931
  derived and/or modified CDS sequence (opt3) from hemagglutinin__InfluenzaA__AHZ40405

SEQ ID NO: 140257 - RNA, 1701 nt, Artificial Sequence; identical to SEQ ID NO: 137931
  derived and/or modified CDS sequence (opt3) from hemagglutinin__InfluenzaA__AHZ40417

SEQ ID NO: 140258 - RNA, 1701 nt, Artificial Sequence
  derived and/or modified CDS sequence (opt3) from hemagglutinin__InfluenzaA__AHZ40429
augaagaccaucauugcccugagcuacauacucugccuuguguucgcucaggagcugcccggcaacgacgauuccacagcaacuuuguguuuagggcaccaugccgucccuaauggaacgaucguuaaaaccauuacaaacgaccaaaucgaagugacuaaugcgaccgagcugguacagucuucaaguacaggugaaauuugcaacagcccacaccagauccuagauggcgagaauuguacccucauagacgcucugcuuggggauccgcagugcgacggauuucaaaacaagaaaugggaucuguucguggaaagauccaaggcccauucuaauuguuaucccuacgacgucccugauuaugcaucguugaggucacucguggccagcaguggcacucuggaguuuaaaaacgaguccuucaauuggacagguguuacccagaacgggacgucuagcgcuugcauccggcgcuccaauaacucauuuuucagucgacugaauuggcucacucacuuaaacuuuaaguacccagcacugaaugugaccaugcccaacaacgaacaguucgacaagcuguauauuuggggaguccaucacccuggcacagauaaagaccagaucuuuuuguacgcccaagcuagcggccguauuacugugucuaccaagagaucccagcaggccguaaucccaaauauagggucaaggccccggguucgcaacauuccuagcagagugaguaucuauuggacaauugucaaaccaggagauauccugcuaaucaauucuaccgguaaccucauugcgccgaggggcuacuucaagauacgguccgggaaaagcucgaucaugcgcucugacgcacccauuggaaaguguaauuccgccugcaucacgccuaacggcucaauaccaaaugacaagcccuuucagaacgugaaucgaauuacuuacggugcuuguccuagauaugugaaacaaaacacacugaaacuugccaccgggaugaggaaugucccagagaagcagacucggggaaucuucggcgcaaucgcuggcuuuauugaaaacgggugggagggaaugguugaugguugguacggcuuccgucaccagaauagugaggggcgcggacaagccgcggaccuuaagagcacacaggccgcaaucgaucagauuaacggcaaauugaauagacucauagguaagaccaacgaaaaauuccaucagaucgagaaggaauuuuccgagguggaagggaggauucaagaccuggagaaguauguagaggauacgaaaaucgacuuauggucuuacaacgcugaacugcucguggcccuugagaaucagcacaccaucgaucugacagacagcgaaaugaacaaguuguucgagaaaacuaagaaacagcuacgggaaaaugcugaggauaugggcaacggaugcuuuaagauuuaucauaagugugacaaugccugcauaggcucaauccgaaacgggaccuacgaucacgacgucuaucgcgacgaggcacugaauaacagauuccagauuaaaggaguggaacucaagagugguuacaaagauuggauccuguggauuuccuuugccaucagcugcuuccuucuguguguugcuuugcucggcuuuauaaugugggcgugccaaaaggggaauaucagguguaacauuugcaucuga

SEQ ID NO: 140259 - RNA, 1701 nt, Artificial Sequence; identical to SEQ ID NO: 137931
  derived and/or modified CDS sequence (opt3) from hemagglutinin__InfluenzaA__AHZ40441

SEQ ID NO: 140260 - RNA, 1701 nt, Artificial Sequence; identical to SEQ ID NO: 138074
  derived and/or modified CDS sequence (opt3) from hemagglutinin__InfluenzaA__AHZ40453

SEQ ID NO: 140261 - RNA, 1701 nt, Artificial Sequence
  derived and/or modified CDS sequence (opt3) from hemagglutinin__InfluenzaA__AHZ40465
augaagaccaucauugcccugagcuacauacucugccuuguguucgcucagaaacugcccggcaacgacaauuccacagcaacuuuguguuuagggcaccaugccgucccuaacggaacgaucguuaagaccauuacaaaugauagaaucgaggugacuaacgcgaccgaacugguacaaaauucuucaauuggugagaucugcgacaguccacaccagauacuagauggcgaaaacuguacacucaucgacgcucugcuuggggauccgcagugcgacggauuucagaauaaaaagugggaucuguucguggagaggagcaaagccuauuccaacuguuaccccuaugacaugccugauuacgcaucuuugcggucgcucgucgccucaagcggcacccuggaauuuaauaacgagaguuucaauuggacuggugugacacaaaacgggaccuccucugcuugcauucgccgaagcaauuccucauuuuucagucgucugaacuggcucacgcauuuaaauuuuaaguauccagcacugaacguuacuaugcccaacaaugagagauucgacaaacuuuacaucuggggagugcaccauccuggcaccgauaaagaccagaucuuuuuguaugcccagagcucuggcaggauuacagucuccacuaagcggucacagcaagcugugauaccaaacauugggagccgccccagaaucaggaauauuccuagucggaucucuaucuacuggaccauuguaaaaccaggagauauacugcuaaucaacuccacagguaaucucauugccccgcgcggcuacuucaagauccgaagcgggaaaucgucuauaaugagauccgacgcgcccauuggaaaguguaagucagaaugcaucaccccuaacggcaguaucccaaaugacaaacccuuucagaacguuaauaggauuacguauggugcauguccucgguacgugaagcagagcacucugaaacuugccacagggaugcguaacgucccagagaagcagacccgcggaaucuucggcgcuauugccggcuuuauagaaaaugggugggagggaaugguggaugguugguauggcuucagacaccaaaacuccgaggggaggggacaggcagcugaccugaaaucuacucaggccgcgaucgaucaaauuaauggcaaguugaaccggcucaucgguaaaacaaaugaaaaguuccaccagaucgagaaggaauuuagcgagguggaagggcgcauucaggaccuggagaaauacgucgaggauaccaagauagacuuauggucauauaacgccgaacugcucguugcacuugagaaccagcauacgaucgaucugaccgacagugaaaugaauaaauuguucgagaagacaaagaagcaacuacgagaaaacgcugaggauaugggcaauggaugcuuuaagauuuaccacaaaugugacaacgccugcaucggcuccauuagaaaugggacuuaugaucauaacguguacagggacgaggcucugaauaaccgguuccagaucaagggaguagaacucaaaagcgguuacaaggacuggauacuguggaucucuuuugccauuucaugcuuccuucuguguguggcauugcucggcuuuaucaugugggccugccagaaagggaauauucgcuguaacaucugcauauga

SEQ ID NO: 140262 - RNA, 1701 nt, Artificial Sequence; identical to SEQ ID NO: 137932
  derived and/or modified CDS sequence (opt3) from hemagglutinin__InfluenzaA__AHZ40477

SEQ ID NO: 140263 - RNA, 1701 nt, Artificial Sequence; identical to SEQ ID NO: 138108
  derived and/or modified CDS sequence (opt3) from hemagglutinin__InfluenzaA__AHZ40489

SEQ ID NO: 140264 - RNA, 1701 nt, Artificial Sequence; identical to SEQ ID NO: 137931
  derived and/or modified CDS sequence (opt3) from hemagglutinin__InfluenzaA__AHZ40500

SEQ ID NO: 140265 - RNA, 1701 nt, Artificial Sequence; identical to SEQ ID NO: 137931
  derived and/or modified CDS sequence (opt3) from hemagglutinin__InfluenzaA__AHZ40512

SEQ ID NO: 140266 - RNA, 1701 nt, Artificial Sequence
  derived and/or modified CDS sequence (opt3) from hemagglutinin__InfluenzaA__AHZ40524
augaagaccaucauugcccugagcuacauacucugccuuguguucgcucagaaacugcccggcaacgacaauuccacagcaacuuuguguuuagggcaccaugccgucccuaacggaacgaucguuaagaccauuacaaaugauagaaucgaggugacuaacgcgaccgaacugguacaaaauucuucaauuggugagaucugcgacaguccacaccagauacuagauggcgaaaacuguacacucaucgacgcucugcuuggggauccgcagugcgacggauuucagaauaaaaagugggaucuguucguggagaggagcaaagccuauuccaacuguuaccccuaugacgucccugauuacgcaucuuugcggucgcucguggccucaagcggcacccuggaauuuaauaacgagaguuucaauugggcugguguuacucaaaacgggacauccucugcaugcauucgcggaagcaauuccucauuuuucagucgacugaacuggcucacccauuuaaauuuuaaguauccagcccugaacgugacgaugcccaacaaugagcaguucgacaaguuguacaucuggggcguccaccauccuggcacugauaaagaccagauuuuucuuuaugcucagagcucugggcguaucaccguguccacaaagagaucacaacaggccguaauaccaaacauuggaagcaggccccggauccgcaauauuccuaguagaaucucuaucuacuggacuauuguuaaaccaggugauauacugcuaaucaacuccaccggcaaucucauugcgccgaggggguacuucaagauccggagcggaaaaucgucuauaaugcgcuccgacgcacccauuggcaaguguaagucagaaugcaucacaccuaacgguaguaucccaaaugacaaacccuuucagaacgugaaucgaauuaccuauggggccuguccuagauacgucaagcagagcacgcugaaacuugcuacuggaaugaggaacgugccagagcggcaaacacguggcaucuucggcgccauugcaggguuuauagaaaauggaugggaggguaugguggauggcugguauggguuccgccaccagaacuccgagggaagaggccaggcugccgaccugaagucuacccaagcggccaucgaucagauuaaugguaaauugaacaggcucaucgggaagacuaaugaaaaauuccaccagaucgagaaggaauuuagcgaggucgaaggccggauucaggaccuggagaaguacguugaggauacaaaaauagacuuauggucauauaacgcagaacugcucguggcucuugagaaccaacauaccaucgaucugacggacagugaaaugaauaaguuguucgagaaaaccaagaaacagcuacgagaaaacgccgaggauaugggaaauggcugcuuuaagauuuaccacaagugugacaacgcuugcaucggguccauucgcaauggaacauaugaucaugacguauacagagacgaggcccugaacaauagguuccagaucaaagguguggaacucaagagcggcuacaaagauuggauacuguggaucucuuuugcaauuucaugcuuccuucugugugucgccuugcucggguuuaucaugugggcuugccagaagggaaacauucgguguaauaucugcauauga

SEQ ID NO: 140267 - RNA, 1701 nt, Artificial Sequence; identical to SEQ ID NO: 139818
  derived and/or modified CDS sequence (opt3) from hemagglutinin__InfluenzaA__AHZ40536

SEQ ID NO: 140268 - RNA, 1701 nt, Artificial Sequence; identical to SEQ ID NO: 137931
  derived and/or modified CDS sequence (opt3) from hemagglutinin__InfluenzaA__AHZ40548

SEQ ID NO: 140269 - RNA, 1701 nt, Artificial Sequence; identical to SEQ ID NO: 137906
  derived and/or modified CDS sequence (opt3) from hemagglutinin__InfluenzaA__AHZ40572

SEQ ID NO: 140270 - RNA, 1701 nt, Artificial Sequence; identical to SEQ ID NO: 137906
  derived and/or modified CDS sequence (opt3) from hemagglutinin__InfluenzaA__AHZ40583

SEQ ID NO: 140271 - RNA, 1701 nt, Artificial Sequence
  derived and/or modified CDS sequence (opt3) from hemagglutinin__InfluenzaA__AHZ40595
augaaggccauccugguggucaugcucuacaccuucgcuacagcaaacgccgacacucuuugcauuggcuaucacgcgaauaacagcacggauaccguugacacagugcuggagaaaaauguaacugugacccauuccgucaacuuguuagaagauaagcacgacgggaaacuguguaagcuaagaggaguggcuccccuccaucuggguaaaugcaauauagccggcuggauccuugggaacccugagugugaaucucugucaacagcaaguagcugguccuacauuguugagaccucuggaucggauaauggcacuugcuauccaggugacuuuaucgauuacgaagaguugagggagcagcucucaagcgugaguuccuucgaacgguuugagauuuucccgaagacaucuagcuggcccaaccacgacuccaauaagggggucaccgccgcuuguccucaugcaggagccaaaggcuuuuauaagaaccugaucuggcuggugaaaaagggcaauucauacccaaaacucaguauaagcuauaucaacgauaaggggaaggaaguauuaguucugugggguauucaccaccccucuacgacugcugaccaacagucccuuuaccagaaugccgauaccuacguguucgucggaacaucacgcuauagcaaaaaguuuaaaccugagaucgcgauucgaccaaaggugcgugaccaggagggcagaaugaacuacuauuggacuuugguggaacccggggauaaaaucaccuucgaggcaacaggaaaucuggucguuccuagguacgccuuugcuaugaagcggaacgccggcagugguauaauuaucucugacaccccagugcaugacugcaacacgacuugucaaacaccgaaaggggcaauuaauaccucccuacccuuccagaacauccacccuaucacuauuggaaagugcccaaaguauguaaaaagcacaaagcuccgccuggcuaccggccuuagaaaugugcccucgauacagucuaggggccuguuuggggccaucgcgggauucauugaagguggcuggacggggauggucgauggaugguacggcuaucaucaccagaacgagcaagguuccggguacgccgcagacuugaaaucaacccagaaugcuaucgauaagauaacaaacaaagugaauaguguuauugaaaagaugaacacucaguuuaccgccgugggcaaggaguucaaucaccucgagaaacggaucgaaaaccugaauaagaaagucgacgauggauucuuagacaucuggacauacaacgcugagcugcucgugcuucuggaaaaugagcgcacuuuggauuaucaugacagcaacguaaagaaucuauacgaaaaaguucgaaaccagcugaagaacaaugccaaggagauuggcaacggguguuuugaguucuaucacaaaugcgauaauaccuguauggaauccgugaagaacggaacauacgacuauccuaaauacucugaggaagcaaagcucaauagagagaaaaucgauggugucaagcuggaaagcaccaggauuuaucaaauacuugccaucuacucaacugcugcgaguucccugguguuggucgugagccucggcgcaauuucuuuuuggaugugcucaaacgggagucugcagugccggaucuguaucuga

SEQ ID NO: 140272 - RNA, 1701 nt, Artificial Sequence
  derived and/or modified CDS sequence (opt3) from hemagglutinin__InfluenzaA__AHZ40606
augaagaccaucauugcccugagcuacauacucugccuuguguucgcucagaaacugcccggcaacgacaauuccacagcaacuuuguguuuagggcaccaugccgucccuaacggaacgaucguuaagaccauuacaaaugauagaaucgaggugacuaacgcgaccgaacugguacaaaauucuucaauuggugagaucugcgacaguccacaccagauacuagauggcgaaaacuguacacucaucgacgcucugcuuggggauccgcagugcgacggauuucagaauaaaaagugggaucuguucguggagaggagcaaagccuauuccaacuguuaccccuaugacgucccugauuacgcaucuuugcggucgcucguggccucaagcggcacccuggaauuuaauaacgagaguuucaauuggacugguguuacacaaaacgggaccuccucugcuugcauucgccgaagcaauuccucauuuuucagucgucugaacuggcucacgcauuuaaauuuuaaguauccagcacugaacgugacuaugcccaacaaugagcaguucgacaaacuuuacaucuggggaguccaccauccuggcaccgauaaagaccagaucuuuuuguaugcccagagcucuggcagaauuacaguguccacuaagaggucacaacaggcuguaauaccaaacauugggagccggccccgcaucagaaauauuccuaguaggaucucuaucuacuggaccauuguuaaaccaggagauauacugcuaaucaacuccacagguaaucucauugccccgcggggcuacuucaagauccgcagcgggaaaucgucuauaaugcgauccgacgcgcccauuggaaaguguaagucagaaugcaucaccccuaacggcaguaucccaaaugacaaacccuuucagaacgugaauagaauuacguauggugcauguccuagguacgucaagcagagcacucugaaacuugccacagggaugcggaacgugccagagaagcaaacccguggaaucuucggcgcuauugccggcuuuauagaaaaugggugggagggaaugauggaugguugguauggcuuccgccaccagaacuccgaggggagaggacaggcagcugaccugaaaucuacucaagccgcgaucgaucagauuaauggcaaguugaacaggcucaucgguaaaacaaaugaaaaguuccaccagaucgagaaggaauuuagcgagguggaagggcggauucaggaccuggagaaauacgucgaggauaccaagauagacuuauggucauauaacgccgaacugcucguugcacuugagaaccaacauacgaucgaucugaccgacagugaaaugaauaaauuguucgagaagacaaagaagcagcuacgagaaaacgcugaggauaugggcaauggaugcuuuaagauuuaccacaaaugugacaacgccugcaucggcuccauucgcaaugggacuuaugaucaugacguguacagagacgaggcucugaacaauagguuccagaucaagggaguagaacucaaaagcgguuacaaggauuggauacuguggaucucuuuugccauuucaugcuuccuucuguguguggcauugcucggcuuuaucaugugggccugccagaaagggaacauucgguguaauaucugcauauga

SEQ ID NO: 140273 - RNA, 1701 nt, Artificial Sequence; identical to SEQ ID NO: 137931
  derived and/or modified CDS sequence (opt3) from hemagglutinin__InfluenzaA__AHZ40618

SEQ ID NO: 140274 - RNA, 1701 nt, Artificial Sequence; identical to SEQ ID NO: 137970
  derived and/or modified CDS sequence (opt3) from hemagglutinin__InfluenzaA__AHZ40626

SEQ ID NO: 140275 - RNA, 1701 nt, Artificial Sequence; identical to SEQ ID NO: 137931
  derived and/or modified CDS sequence (opt3) from hemagglutinin__InfluenzaA__AHZ40638

SEQ ID NO: 140276 - RNA, 1701 nt, Artificial Sequence; identical to SEQ ID NO: 137906
  derived and/or modified CDS sequence (opt3) from hemagglutinin__InfluenzaA__AHZ40650

SEQ ID NO: 140277 - RNA, 1701 nt, Artificial Sequence
  derived and/or modified CDS sequence (opt3) from hemagglutinin__InfluenzaA__AHZ40662
augaagaccaucauugcccugagcuacauacucugccuuguguucgcucaggagcugcccggcaacgacgauuccacagcaacuuuguguuuagggcaccaugccgucccuaauggaacgaucguuaaaaccauuacaaacgacagaaucgaagugacuaaugcgaccgagcugguacaaucuucaaguacaggugaaauuugcaacagcccacaccagauccuagauggcgagaauuguacccucauagacgcucugcuuggggauccgcagugcgacggauuucagaacaagaaaugggaucuguucguggaaagguccaaggcccauucuaauuguuaucccuacgacgucccugauuaugcaucguugcggucacucguggccagcaguggcacucuggaguuuaacaaugaguccuucaacuggacagguguuacccaaaaugggacgucuagcgcuugcauccgccgauccaacaauucauuuuucagucgucugaacuggcucacucacuuaaauuuuaaauacccagcacugaacgugaccauucccaacaaugaacaguucgacaaguuguauaucuggggaguccaucacccuggcacagauaaggaccagauuuuucuuuacgcccaggcuagcggcagaaucacugugucuaccaaaaggucccaacagacaguaauaccaaacauugggucacggccccgcguuagaaauaucccuagcagggugaguauuuauuggaccaucgucaagccaggagauauccugcuaauuaacucuacggguaaucucauagccccgcggggcuacuucaaaauccgcuccggaaagagcucgauuaugcgaucugacgcgcccaucgggaaauguaacuccgcaugcauaacuccuaauggcucaauuccaaacgacaagcccuuucagaaugugaacagaaucacauacggugccuguccuagguaugugaagcagaauacccugaaacuugcuacugggaugcggaacgucccagagaagcaaacacguggaaucuucggcgccauugcaggcuuuaucgaaaaugggugggagggaaugguugaugguugguacggcuuccgccaccagaacagugaggggagaggacaggcugccgaccugaaaagcacccaagcggccauugaucagauaaauggcaaguugaacaggcucaucgguaaaacgaacgaaaaguuccaucagauugagaaagaauuuuccgagguggaagggcggauccaggaccuggagaaguauguagaggauaccaagaucgacuuauggucuuacaaugcagaacugcucguggcucuugagaaccaacacacaauugaucugacugacagcgaaaugaauaaauuguucgagaagaccaaaaagcagcuacgagaaaacgccgaggauaugggcaauggaugcuuuaaaauauaucauaagugugacaacgcuugcaucggcucaauucgcaaugggacauacgaucacgacgucuauagagacgaggcccugaacaauagguuccagaucaagggaguggaacucaaaagugguuacaaggauuggauucuguggaucuccuuugcaauaagcugcuuccuucuguguguugccuugcucggcuuuaucaugugggcuugccagaaagggaacauucgguguaauaucugcauuuga

SEQ ID NO: 140278 - RNA, 1701 nt, Artificial Sequence; identical to SEQ ID NO: 137951
  derived and/or modified CDS sequence (opt3) from hemagglutinin__InfluenzaA__AHZ40674

SEQ ID NO: 140279 - RNA, 1701 nt, Artificial Sequence; identical to SEQ ID NO: 137931
  derived and/or modified CDS sequence (opt3) from hemagglutinin__InfluenzaA__AHZ40686

SEQ ID NO: 140280 - RNA, 1701 nt, Artificial Sequence; identical to SEQ ID NO: 137916
  derived and/or modified CDS sequence (opt3) from hemagglutinin__InfluenzaA__AHZ40698

SEQ ID NO: 140281 - RNA, 1701 nt, Artificial Sequence; identical to SEQ ID NO: 137916
  derived and/or modified CDS sequence (opt3) from hemagglutinin__InfluenzaA__AHZ40710

SEQ ID NO: 140282 - RNA, 1701 nt, Artificial Sequence; identical to SEQ ID NO: 138042
  derived and/or modified CDS sequence (opt3) from hemagglutinin__InfluenzaA__AHZ40722

SEQ ID NO: 140283 - RNA, 1701 nt, Artificial Sequence; identical to SEQ ID NO: 137939
  derived and/or modified CDS sequence (opt3) from hemagglutinin__InfluenzaA__AHZ40734

SEQ ID NO: 140284 - RNA, 1701 nt, Artificial Sequence; identical to SEQ ID NO: 138042
  derived and/or modified CDS sequence (opt3) from hemagglutinin__InfluenzaA__AHZ40746

SEQ ID NO: 140285 - RNA, 1701 nt, Artificial Sequence; identical to SEQ ID NO: 140235
  derived and/or modified CDS sequence (opt3) from hemagglutinin__InfluenzaA__AHZ40758

SEQ ID NO: 140286 - RNA, 1701 nt, Artificial Sequence; identical to SEQ ID NO: 130715
  derived and/or modified CDS sequence (opt3) from hemagglutinin__InfluenzaA__AHZ40782

SEQ ID NO: 140287 - RNA, 1701 nt, Artificial Sequence; identical to SEQ ID NO: 130715
  derived and/or modified CDS sequence (opt3) from hemagglutinin__InfluenzaA__AHZ40793

SEQ ID NO: 140288 - RNA, 1701 nt, Artificial Sequence; identical to SEQ ID NO: 130715
  derived and/or modified CDS sequence (opt3) from hemagglutinin__InfluenzaA__AHZ40804

SEQ ID NO: 140289 - RNA, 1701 nt, Artificial Sequence
  derived and/or modified CDS sequence (opt3) from hemagglutinin__InfluenzaA__AHZ40815
augaaggccauccuggugguccuccuuuacaccuucgcuacagcaaacgccgacacucugugcauuggcuaucacgcgaauaacagcacggauaccguugacacaguguuggagaagaauguaacugugacccauuccgucaacuuacuggaagauaagcacaaugggaaacuauguaagcucagaggaguggcuccccugcaucuugguaaaugcaacauagccggcuggauccuggggaauccugagugugaaucuuugucaacagcaaguagcugguccuacauuguugagaccccaucuucggacaacggaacuugcuauccgggcgauuuuaucgacuacgaggagcucagggagcagcugucaagcgugaguuccuucgaacgguuugagauuuuccccaagacaucuagcuggccuaaucacgauuccaacaagggugucaccgccgcuuguccacaugcaggggccaaaucauuuuauaagaaucugaucuggcucgugaaaaagggaaacaguuaccccaaauuaagcaagucuuauauaaaugacaagggcaaagaaguacugguucuuuggggcauccaccacccuuccacgucagcugaucaacagagcuuguaccagaacgccgacgcguacguguucgucgggaguucucgcuauuccaagaaauuuaagccagagauugcaauccgacccaaagugcgugauagagagggaaggaugaauuacuauuggacucugguggaaccuggugacaagauuaccuucgaggccacaggcaaccuagucguuccacgguacgcuuuugccauggaacgcaacgcagggagcggaaucauaauuucggauacuccggugcaugacugcaauaccacaugucagacccccaaaggcgcuaucaacacgucucucccuuuccaaaauauucacccaaucacuaucgguaagugccccaaguauguaaaauccacaaagcugagacuugccaccgggcugaggaacauuccuucaauacagagucggggauuguuuggcgcgaucgccggcuucauugaagggggauggacugguaugguggacggcugguacggguaucaucaccagaaugaacagggaagcggcuacgcagcugaucucaaauccacacaaaacgccaucgacgagauaaccaauaaggucaacucugugauugagaaaaugaauacgcaguuuaccgcuguugguaaggaguucaaccaccuggaaaagcgcaucgaaaauuuaaacaaaaagguggaugacggguuccuggauaucuggacauacaaugccgagcuccuuguccuguuggaaaacgagcgaacucuagacuaucaugauagcaaugugaaaaaccuguacgagaagguaagaucacagcucaaaaacaaugcaaaggaaauuggcaacggauguuuugaguucuaucacaagugcgacaauaccuguauggaaaguguuaaaaacggcacauacgauuauccaaaguacuccgaggaagccaaacugaauagggaggagaucgacggggugaaacuugaaagcacucggauuuaucagauacuggcuaucuacucuaccgucgcgucaaguuuggugcucgucgugagccugggagcaauuuccuuuuggaugugcucuaacgguucguuacaaugccguaucuguaucuga

SEQ ID NO: 140290 - RNA, 1701 nt, Artificial Sequence
  derived and/or modified CDS sequence (opt3) from hemagglutinin__InfluenzaA__AHZ40826
augaaggccauccuggugguccuccuuuacaccuucgcuacagcaaacgccgacacucugugcauuggcuaucacgcgaauaacagcacggauaccguugacacaguguuggagaaaaauguaacugugacccauuccgucaacuuacuggaagauaagcacaaugggaaacuauguaagcucagaggaguggcuccccugcaucuugguaaaugcaacauagccggcuggauccuggggaauccugagugugaaucuuugucaacagcaaguagcugguccuacauuguugagaccccaucuucggacaacggaacuugcuauccgggcgauuuuaucgacuacgaggagcucagggagcagcugucaagcgugaguuccuucgaacgguuugagauuuuccccaagacaucuagcuggccuaaucacgauuccaacaagggugucaccgccgcuuguccacaugcaggggccaaaucauuuuauaagaaucugaucuggcucgugaaaaagggaaacaguuaccccaaauuaagcaagucuuauauaaaugacaagggcaaagaaguacugguucuuuggggcauccaccacccuuccacgucagcugaucaacagagcauuuaccagaacgccgacgcguacguguucgucgggaguucucgcuauuccaagaaauuuaagccagagaucgcaauucgacccaaagugcgugaucaggagggaagaaugaauuacuauuggacuuugguggaaccuggugacaagaucaccuucgaggccacaggcaaccuggucguuccaagguacgcuuuugccauggaacggaacgcagggagcggaauaauuaucucggauacuccggugcaugacugcaauaccacaugucaaacccccaaaggcgcuauuaacacgucucuaccuuuccagaauauccacccaaucacuauugguaagugccccaaguauguaaaauccacaaagcuccgccuggccaccgggcuuagaaacauaccuucaauccagaguaggggacuguuuggcgcgauugccggcuucaucgaagggggauggacugguaugguggacggcugguacggguaucaucaccagaaugaacaaggaagcggcuacgcagcugauuugaaauccacacagaacgccauagacgagauuaccaauaaggucaacucugugaucgagaaaaugaauacgcaguuuaccgcuguugguaaggaguucaaccaccucgaaaagcggaucgaaaaucugaacaaaaagguggaugacggguucuuagauauuuggacauacaaugccgagcugcucguccuucuggaaaacgagcgcacuuuggacuaucaugauagcaaugugaaaaaccuauacgagaagguacgaucacagcugaaaaacaaugcaaaggaaaucggcaacggauguuuugaguucuaucacaagugcgacaauaccuguauggaaaguguuaaaaacggcacauacgauuauccaaaguacuccgaggaagccaaacucaauagagaggagauugacggggugaagcuggaaagcacuaggauauaucaaauccuugcuauuuacucuaccgucgcgucaagucugguguuggucgugagccucggagcaaucuccuuuuggaugugcucuaacgguucgcugcagugccggaucuguauuuga

SEQ ID NO: 140291 - RNA, 1701 nt, Artificial Sequence
  derived and/or modified CDS sequence (opt3) from hemagglutinin__InfluenzaA__AHZ40848
augaaggccauccuggugguccuccuuuacaccuucgcuacagcaaacgccgacacucugugcauuggcuaucacgcgaauaacagcacggauaccguugacacaguguuggagaaaaauguaacugugacccauuccgucaacuuacuggaagauaagcacaaugggaaacuauguaagcucagaggaguggcuccccugcaucuugguaaaugcaacauagccggcuggauccuggggaauccugagugugaaucuuugucaacagcaaguagcugguccuacauuguugagaccccaucuucggacaacggaacuugcuauccgggcgauuuuaucgacuacgaagaacucagggagcagcugucaagcgugaguuccuucgaacgguuugagauuuuccccaagacaucuagcuggccuaaucacgauuccaacaagggugucaccgccgcuuguccacaugcaggggccaaaucauuuuauaagaaucugaucuggcucgugaaagaaggaaacaguuaccccaaguuaagcaaaucuuauauaaaugacaagggcaaggagguacugguucuuuggggcauccaccacccuuccacgucagcugagcaacagagcuuguaccagaacgccgaugcguacguguucgucgggaguucucgcuauuccaaaaaguuuaaaccagaaauugcagcccgacccaaggugcguggacaggcugguagaaugaauuacuauuggacucugguggagccuggcgacaaaaucaccuucgaagccacagggaaccuagucguuccaagguacgcauuugcuauggagcggaacgccggaagcggcauuaucauaucggauacuccggugcaugacugcaauaccacaugucaaacccccaagggugcgauuaacacgucucucccuuuccagaauauccacccaauuacuaucgggaaaugccccaaguauguaaaguccacaaaacugcgccuugccaccggacugagaaacaucccuucaauucagaguaggggcuuguuuggcgcaauagcuggguucaucgaaggagguuggacuggcaugguggaugggugguacggauaucaucaccagaaugagcaaggcagcgguuacgccgcugaccucaaguccacacagaacgccauugacgagaucaccaauaaagucaacucugugauagaaaagaugaauacgcaguuuaccgcaguugggaaagaguucaaccaccuggaaaagcggauugagaauuuaaacaagaaaguggaugacggcuuccuggauaucuggacauacaaugccgaacuccuuguccuguuggagaacgagcgcacucuagacuaucaugauagcaaugugaagaaccuguacgaaaaaguacgaucacagcucaagaacaaugcuaaagagaucggaaacggcuguuuugaguucuaucacaagugcgacaauaccuguauggagaguguuaagaacgggacauacgauuauccaaaauacuccgaagaggcgaagcugaauagagaggaaauugacggagugaaacuugagagcacuaggaucuaucaaauucuggcaauauacucuaccgucgccucaaguuuggugcucgucgugagccugggugcuaucuccuuuuggaugugcucuaacggcucguuacagugccggauuuguaucuga

SEQ ID NO: 140292 - RNA, 1701 nt, Artificial Sequence
  derived and/or modified CDS sequence (opt3) from hemagglutinin__InfluenzaA__AHZ40881
augaaggccauccuggugguccuccuuuacaccuucgcuacagcaaacgccgacacucugugcauuggcuaucacgcgaauaacagcacggauaccguugacacaguguuggagaagaauguaacugugacccauuccgucaacuuacuggaagauaagcacaaugggaaacuauguaagcucagaggaguggcuccccugcaucuugguaaaugcaacauagccggcuggauccuggggaauccugagugugaaucuuugucaacagcaaguagcugguccuacauuguugagaccccaucuucggacaacggaacuugcuauccgggcgauuuuaucgacuacgaagaacucagggagcagcugucaagcgugaguuccuucgaacgguuugagauuuuccccaagacaucuagcuggccuaaucacgauuccaacaagggugucaccgccgcuuguccacaugcaggggccaaaucauuuuauaagaaucugaucuggcucgugaaaaagggaaacaguuaccccaaauuaagcaagucuuauauaaaugacaagggcaaagaaguacugguucuuuggggcauccaccacccuuccacgucagcugagcaacagagcuuguaccagaacgccgaugcguacguguucgucgggaguucucgcuauuccaagaaauuuaagccagagauugcagcccgacccaaagugcguggacaggcugguagaaugaauuacuauuggacucugguggaaccuggcgacaagaucaccuucgaggccacagggaaccuagucguuccaagguacgcauuugcuauggaacggaacgccggaagcggcauuaucauaucggauacuccggugcaugacugcaauaccacaugucaaacccccaaaggugcgauuaacacgucucucccuuuccagaauauccacccaauuacuaucgggaagugccccaaguauguaaaauccacaaagcugcgccuugccaccggacugagaaacaucccuucaauucagaguaggggcuuguuuggcgcaauagcuggguucaucgagggagguuggacuggcaugguggaugggugguacggauaucaucaccagaaugaacaaggcagcgguuacgccgcugaccucaaauccacacagaacgccauugacgagaucaccaauaaggucaacucugugauagagaaaaugaauacgcaguuuaccgcaguugggaaggaguucaaccaccuggagaagcggauugaaaauuuaaacaaaaagguggaugacggcuuccuggauaucuggacauacaaugccgagcuccuuguccuguuggaaaacgagcgcacucuagacuaucaugauagcaaugugaaaaaccuguacgagaagguacgaucacagcucaaaaacaaugcuaaggaaaucggaaacggcuguuuugaguucuaucacaagugcgacaauaccuguauggaaaguguuaaaaacgggacauacgauuauccaaaguacuccgaggaagcgaaacugaauagagaggagauugacggagugaaacuugaaagcacuaggaucuaucaaauucuggcaauauacucuaccgucgccucaaguuuggugcucgucgugagccugggugcuaucuccuuuuggaugugcucuaacggcucguuacagugccggauuuguaucuga

SEQ ID NO: 140293 - RNA, 1701 nt, Artificial Sequence; identical to SEQ ID NO: 140292
  derived and/or modified CDS sequence (opt3) from hemagglutinin__InfluenzaA__AHZ40892

SEQ ID NO: 140294 - RNA, 1701 nt, Artificial Sequence; identical to SEQ ID NO: 140291
  derived and/or modified CDS sequence (opt3) from hemagglutinin__InfluenzaA__AHZ40914

SEQ ID NO: 140295 - RNA, 1701 nt, Artificial Sequence; identical to SEQ ID NO: 140292
  derived and/or modified CDS sequence (opt3) from hemagglutinin__InfluenzaA__AHZ40925

SEQ ID NO: 140296 - RNA, 1701 nt, Artificial Sequence
  derived and/or modified CDS sequence (opt3) from hemagglutinin__InfluenzaA__AHZ40936
augaaggccauccuggugguccuccuuuacaccuucgcuacagcaaacgccgacacucugugcauuggcuaucacgcgaauaacagcacggauaccguugacacaguguuggagaagaauguaacugugacccauuccgucaacuuacuggaagauaagcacaaugggaaacuauguaagcucagaggaguggcuccccugcaucuugguaaaugcaacauagccggcuggauccuggggaauccugagugugaaucuuugucaacagcaaguagcugguccuacauuguugagaccccaucuucggacaacggaacuugcuauccgggcgauuuuaucgacuacgaggagcucagggagcagcugucaagcgugaguuccuucgaacgguuugagauuuuccccaagacaucuagcuggccuaaucacgauuccaacaagggugucaccgccgcuuguccacaugcaggggccaaaucauuuuauaagaaucugaucuggcucgugaaaaagggaaacaguuaccccaaauuaagcaagucuuauauaaaugacaagggcaaagaaguacugguucuuuggggcauccaccacccuuccacgucagcugagcaacagagcuuguaccagaacgccgaugcguacguguucgucgggaguucucgcuauuccaagaaauuuaagccagagauugcagcccgacccaaagugcgugaccaggcuggaagaaugaauuacuauuggacucugguggaaccuggugauaagaucaccuucgaggccacaggcaaccuagucguuccaagguacgcauuugcuauggaacggaacgccgggagcggaauuaucauaucggacacuccggugcaugauugcaauaccacaugucaaacccccaaaggcgcgauuaacacgucucucccuuuccagaauauccacccaauuacuaucgguaagugccccaaguauguaaaauccacaaagcugcgccuugccaccgggcugagaaacaucccuucaauucagaguaggggauuguuuggcgcaauagcuggcuucaucgaagggggauggacugguaugguggacggcugguacggguaucaucaccagaaugaacaaggaagcggcuacgccgcugaccucaaauccacacagaacgccauugaugagaucaccaauaaggucaacucugugauagagaaaaugaauacgcaguuuaccgcaguugguaaggaguucaaccaccuggaaaagcggauugaaaauuuaaacaaaaagguggacgauggguuccuggacaucuggacauacaaugccgagcuccuuguccuguuggaaaacgagcgcacucuagauuaucaugacagcaaugugaaaaaccuguacgagaagguacgaucacagcucaaaaacaaugcuaaggaaaucggcaacggauguuuugaguucuaucacaagugcgauaauaccuguauggaaaguguuaaaaacggcacauacgacuauccaaaguacuccgaggaagcgaaacugaauagagaggagauugauggggugaaacuugaaagcacuaggaucuaucaaauucuggcaauauacucuaccgucgccucaaguuuggugcucgucgugagccugggagcuaucuccuuuuggaugugcucuaacgguucguuacagugccggauuuguaucuga

SEQ ID NO: 140297 - RNA, 1701 nt, Artificial Sequence; identical to SEQ ID NO: 140291
  derived and/or modified CDS sequence (opt3) from hemagglutinin__InfluenzaA__AHZ40947

SEQ ID NO: 140298 - RNA, 1701 nt, Artificial Sequence; identical to SEQ ID NO: 140292
  derived and/or modified CDS sequence (opt3) from hemagglutinin__InfluenzaA__AHZ40958

SEQ ID NO: 140299 - RNA, 1701 nt, Artificial Sequence; identical to SEQ ID NO: 140296
  derived and/or modified CDS sequence (opt3) from hemagglutinin__InfluenzaA__AHZ40969

SEQ ID NO: 140300 - RNA, 1701 nt, Artificial Sequence; identical to SEQ ID NO: 140296
  derived and/or modified CDS sequence (opt3) from hemagglutinin__InfluenzaA__AHZ40980

SEQ ID NO: 140301 - RNA, 1701 nt, Artificial Sequence; identical to SEQ ID NO: 140296
  derived and/or modified CDS sequence (opt3) from hemagglutinin__InfluenzaA__AHZ40991

SEQ ID NO: 140302 - RNA, 1701 nt, Artificial Sequence; identical to SEQ ID NO: 140296
  derived and/or modified CDS sequence (opt3) from hemagglutinin__InfluenzaA__AHZ41002

SEQ ID NO: 140303 - RNA, 1701 nt, Artificial Sequence; identical to SEQ ID NO: 140296
  derived and/or modified CDS sequence (opt3) from hemagglutinin__InfluenzaA__AHZ41013

SEQ ID NO: 140304 - RNA, 1701 nt, Artificial Sequence; identical to SEQ ID NO: 140292
  derived and/or modified CDS sequence (opt3) from hemagglutinin__InfluenzaA__AHZ41024

SEQ ID NO: 140305 - RNA, 1701 nt, Artificial Sequence; identical to SEQ ID NO: 140292
  derived and/or modified CDS sequence (opt3) from hemagglutinin__InfluenzaA__AHZ41035

SEQ ID NO: 140306 - RNA, 1701 nt, Artificial Sequence; identical to SEQ ID NO: 140292
  derived and/or modified CDS sequence (opt3) from hemagglutinin__InfluenzaA__AHZ41046

SEQ ID NO: 140307 - RNA, 1701 nt, Artificial Sequence; identical to SEQ ID NO: 140292
  derived and/or modified CDS sequence (opt3) from hemagglutinin__InfluenzaA__AHZ41057

SEQ ID NO: 140308 - RNA, 1701 nt, Artificial Sequence; identical to SEQ ID NO: 140292
  derived and/or modified CDS sequence (opt3) from hemagglutinin__InfluenzaA__AHZ41068

SEQ ID NO: 140309 - RNA, 1701 nt, Artificial Sequence; identical to SEQ ID NO: 140296
  derived and/or modified CDS sequence (opt3) from hemagglutinin__InfluenzaA__AHZ41079

SEQ ID NO: 140310 - RNA, 1701 nt, Artificial Sequence; identical to SEQ ID NO: 140292
  derived and/or modified CDS sequence (opt3) from hemagglutinin__InfluenzaA__AHZ41090

SEQ ID NO: 140311 - RNA, 1701 nt, Artificial Sequence; identical to SEQ ID NO: 140296
  derived and/or modified CDS sequence (opt3) from hemagglutinin__InfluenzaA__AHZ41101

SEQ ID NO: 140312 - RNA, 1701 nt, Artificial Sequence; identical to SEQ ID NO: 140292
  derived and/or modified CDS sequence (opt3) from hemagglutinin__InfluenzaA__AHZ41112

SEQ ID NO: 140313 - RNA, 1701 nt, Artificial Sequence; identical to SEQ ID NO: 140292
  derived and/or modified CDS sequence (opt3) from hemagglutinin__InfluenzaA__AHZ41123

SEQ ID NO: 140314 - RNA, 1701 nt, Artificial Sequence; identical to SEQ ID NO: 140292
  derived and/or modified CDS sequence (opt3) from hemagglutinin__InfluenzaA__AHZ41134

SEQ ID NO: 140315 - RNA, 1701 nt, Artificial Sequence; identical to SEQ ID NO: 140292
  derived and/or modified CDS sequence (opt3) from hemagglutinin__InfluenzaA__AHZ41145

SEQ ID NO: 140316 - RNA, 1701 nt, Artificial Sequence; identical to SEQ ID NO: 140292
  derived and/or modified CDS sequence (opt3) from hemagglutinin__InfluenzaA__AHZ41156

SEQ ID NO: 140317 - RNA, 1701 nt, Artificial Sequence; identical to SEQ ID NO: 140292
  derived and/or modified CDS sequence (opt3) from hemagglutinin__InfluenzaA__AHZ41167

SEQ ID NO: 140318 - RNA, 1701 nt, Artificial Sequence; identical to SEQ ID NO: 140292
  derived and/or modified CDS sequence (opt3) from hemagglutinin__InfluenzaA__AHZ41178

SEQ ID NO: 140319 - RNA, 1701 nt, Artificial Sequence; identical to SEQ ID NO: 140292
  derived and/or modified CDS sequence (opt3) from hemagglutinin__InfluenzaA__AHZ41189

SEQ ID NO: 140320 - RNA, 1701 nt, Artificial Sequence; identical to SEQ ID NO: 140291
  derived and/or modified CDS sequence (opt3) from hemagglutinin__InfluenzaA__AHZ41246

SEQ ID NO: 140321 - RNA, 1701 nt, Artificial Sequence; identical to SEQ ID NO: 140296
  derived and/or modified CDS sequence (opt3) from hemagglutinin__InfluenzaA__AHZ41263

SEQ ID NO: 140322 - RNA, 1701 nt, Artificial Sequence; identical to SEQ ID NO: 140292
  derived and/or modified CDS sequence (opt3) from hemagglutinin__InfluenzaA__AHZ41281

SEQ ID NO: 140323 - RNA, 1701 nt, Artificial Sequence; identical to SEQ ID NO: 140292
  derived and/or modified CDS sequence (opt3) from hemagglutinin__InfluenzaA__AHZ41292

SEQ ID NO: 140324 - RNA, 1701 nt, Artificial Sequence; identical to SEQ ID NO: 140291
  derived and/or modified CDS sequence (opt3) from hemagglutinin__InfluenzaA__AHZ41303

SEQ ID NO: 140325 - RNA, 1701 nt, Artificial Sequence; identical to SEQ ID NO: 140291
  derived and/or modified CDS sequence (opt3) from hemagglutinin__InfluenzaA__AHZ41314

SEQ ID NO: 140326 - RNA, 1701 nt, Artificial Sequence; identical to SEQ ID NO: 140291
  derived and/or modified CDS sequence (opt3) from hemagglutinin__InfluenzaA__AHZ41325

SEQ ID NO: 140327 - RNA, 1701 nt, Artificial Sequence; identical to SEQ ID NO: 140291
  derived and/or modified CDS sequence (opt3) from hemagglutinin__InfluenzaA__AHZ41336

SEQ ID NO: 140328 - RNA, 1701 nt, Artificial Sequence; identical to SEQ ID NO: 140291
  derived and/or modified CDS sequence (opt3) from hemagglutinin__InfluenzaA__AHZ41347

SEQ ID NO: 140329 - RNA, 1701 nt, Artificial Sequence; identical to SEQ ID NO: 140292
  derived and/or modified CDS sequence (opt3) from hemagglutinin__InfluenzaA__AHZ41358

SEQ ID NO: 140330 - RNA, 1701 nt, Artificial Sequence; identical to SEQ ID NO: 140292
  derived and/or modified CDS sequence (opt3) from hemagglutinin__InfluenzaA__AHZ41366

SEQ ID NO: 140331 - RNA, 1701 nt, Artificial Sequence; identical to SEQ ID NO: 140296
  derived and/or modified CDS sequence (opt3) from hemagglutinin__InfluenzaA__AHZ41377

SEQ ID NO: 140332 - RNA, 1701 nt, Artificial Sequence; identical to SEQ ID NO: 140292
  derived and/or modified CDS sequence (opt3) from hemagglutinin__InfluenzaA__AHZ41388

SEQ ID NO: 140333 - RNA, 1701 nt, Artificial Sequence; identical to SEQ ID NO: 140296
  derived and/or modified CDS sequence (opt3) from hemagglutinin__InfluenzaA__AHZ41410

SEQ ID NO: 140334 - RNA, 1701 nt, Artificial Sequence; identical to SEQ ID NO: 140292
  derived and/or modified CDS sequence (opt3) from hemagglutinin__InfluenzaA__AHZ41432

SEQ ID NO: 140335 - RNA, 1701 nt, Artificial Sequence
  derived and/or modified CDS sequence (opt3) from hemagglutinin__InfluenzaA__AHZ41441
augaaggccauccuggugguccuccuuuacaccuucgcuacagcaaacgccgacacucugugcauuggcuaucacgcgaauaacagcacggauaccguugacacaguguuggagaaaaauguaacugugacccauuccgucaacuuacuggaagauaagcacaaugggaaacuauguaagcucagaggaguggcuccccugcaucuugguaaaugcaacauagccggcuggauccuggggaauccugagugugaaucuuugucaacagcaaguagcugguccuacauuguugagaccccaucuucggacaacggaacuugcuauccgggcgauuuuaucgacuacgaagaacucagggagcagcugucaagcgugaguuccuucgaacgguuugagauuuuccccaagacaucuagcuggccuaaucacgauuccaacaagggugucaccgccgcuuguccacaugcaggggccaaaucauuuuauaagaaucugaucuggcucgugaaagaaggaaacaguuaccccaaguuaagcaaaucuuauauaaaugacaagggcaaggagguacugguucuuuggggcauccaccacccuuccacgucagcugagcaacagagcuuguaccagaacgccgaugcguacguguucgucgggaguucucgcuauuccaaaaaguuuaaaccagaaauugcagcccgacccaaggugcgugaccaggcuggaagaaugaauuacuauuggacucugguggagccuggugauaaaaucaccuucgaagccacaggcaaccuagucguuccaagguacgcauuugcuauggagcggaacgccgggagcggaauuaucauaucggacacuccggugcaugauugcaauaccacaugucaaacccccaagggcgcgauuaacacgucucucccuuuccagaauauccacccaauuacuaucgguaaaugccccaaguauguaaaguccacaaaacugcgccuugccaccgggcugagaaacaucccuucaauucagaguaggggauuguuuggcgcaauagcuggcuucaucgaagggggauggacugguaugguggacggcugguacggguaucaucaccagaaugagcaaggaagcggcuacgccgcugaccucaaguccacacagaacgccauugaugagaucaccaauaaagucaacucugugauagaaaagaugaauacgcaguuuaccgcaguugguaaagaguucaaccaccuggaaaagcggauugagaauuuaaacaagaaaguggacgauggguuccuggacaucuggacauacaaugccgaacuccuuguccuguuggagaacgagcgcacucuagauuaucaugacagcaaugugaagaaccuguacgaaaaaguacgaucacagcucaagaacaaugcuaaagagaucggcaacggauguuuugaguucuaucacaagugcgauaauaccuguauggagaguguuaagaacggcacauacgacuauccaaaauacuccgaagaggcgaagcugaauagagaggaaauugauggggugaaacuugagagcacuaggaucuaucaaauucuggcaauauacucuaccgucgccucaaguuuggugcucgucgugagccugggagcuaucuccuuuuggaugugcucuaacgguucguuacagugccggauuuguaucuga

SEQ ID NO: 140336 - RNA, 1701 nt, Artificial Sequence; identical to SEQ ID NO: 140291
  derived and/or modified CDS sequence (opt3) from hemagglutinin__InfluenzaA__AHZ41452

SEQ ID NO: 140337 - RNA, 1701 nt, Artificial Sequence
  derived and/or modified CDS sequence (opt3) from hemagglutinin__InfluenzaA__AHZ41463
augaaggccauccuggugguccuccuuuacaccuucgcuacagcaaacgccgacacucugugcauuggcuaucacgcgaauaacagcacggauaccguuuacacaguguuggagaagaauguaacugugacccauuccgucaacuuacuggaagacaagcacaaugggaaacuauguaagcucagaggaguggcuccccugcaucuugguaaaugcaacauagccggcuggauccuggggaauccugagugugaaucuuugucaacagcaaguagcugguccuauauuguugagaccccaucuucggauaacggaacuugcuacccgggcgacuuuaucgauuaugaagaacucagggagcagcugucaagcgugaguuccuucgaacgguuugagauuuuccccaagacaucuagcuggccuaaucacgacuccaacaagggugucaccgccgcuuguccacaugcaggggccaaaucauuuuacaagaaucugaucuggcucgugaaaaagggaaacaguuaucccaaauuaagcaagucuuacauaaaugauaagggcaaagaaguacugguucuuuggggcauccaccacccuuccacgucagcugagcaacagagcuuguaccagaacgccgacgcguauguguucgucgggaguucucgcuacuccaagaaauuuaagccagagauugcagcccgacccaaagugcguggacaggcugguagaaugaauuauuacuggacucugguggaaccuggcgauaagaucaccuucgaggccacagggaaccuagucguuccaagguaugcauuugcuauggaacggaacgccggaagcggcauuaucauaucggacacuccggugcaugauugcaauaccacaugucaaacccccaaaggugcgauuaacacgucucucccuuuccagaauauccacccaauuacuaucgggaagugccccaaguacguaaaauccacaaagcugcgccuugccaccggacugagaaacaucccuucaauucagaguaggggcuuguuuggcgcaauagcuggguucaucgagggagguuggacuggcaugguggacgggugguauggauaccaucaccagaaugaacaaggcagcgguuacgccgcugaucucaaauccacacagaacgccauugacgagaucaccaauaaggucaacucugugauagagaaaaugaauacgcaguuuaccgcaguugggaaggaguucaaccaccuggagaagcggauugaaaauuuaaacaaaaagguggacgauggcuuccuggacaucuggacauauaaugccgagcuccuuguccuguuggaaaacgagcgcacucuagauuaccaugacagcaaugugaaaaaccuguaugagaagguacgaucacagcucaaaaacaaugcuaaggaaaucggaaacggcuguuuugaguucuaccacaagugcgauaauaccuguauggaaaguguuaaaaacgggacauaugacuacccaaaguauuccgaggaagcgaaacugaauagagaggagauugauggagugaaacuugaaagcacuaggaucuaccaaauucuggcaauauacucuaccgucgccucaaguuuggugcucgucgugagccugggugcuaucuccuuuuggaugugcucuaacggcucguuacagugccggauuuguaucuga

SEQ ID NO: 140338 - RNA, 1701 nt, Artificial Sequence; identical to SEQ ID NO: 140291
  derived and/or modified CDS sequence (opt3) from hemagglutinin__InfluenzaA__AHZ41473

SEQ ID NO: 140339 - RNA, 1701 nt, Artificial Sequence; identical to SEQ ID NO: 140291
  derived and/or modified CDS sequence (opt3) from hemagglutinin__InfluenzaA__AHZ41484

SEQ ID NO: 140340 - RNA, 1701 nt, Artificial Sequence; identical to SEQ ID NO: 140296
  derived and/or modified CDS sequence (opt3) from hemagglutinin__InfluenzaA__AHZ41495

SEQ ID NO: 140341 - RNA, 1701 nt, Artificial Sequence; identical to SEQ ID NO: 140291
  derived and/or modified CDS sequence (opt3) from hemagglutinin__InfluenzaA__AHZ41506

SEQ ID NO: 140342 - RNA, 1701 nt, Artificial Sequence
  derived and/or modified CDS sequence (opt3) from hemagglutinin__InfluenzaA__AHZ41517
augaaggccauccuggugguccuccuuuacaccuucgcuacagcaaacgccgacacucugugcauuggcuaucacgcgaauaacagcacggauaccguugacacaguguuggagaaaaauguaacugugacccauuccgucaacuuacuggaagauaagcacaaugggaaacuauguaagcucagaggaguggcuccccugcaucuugguaaaugcaacauagccggcuggauccuggggaauccugagugugaaucuuugucaacagcaaguagcugguccuacauuguugagaccccaucuucggacaacggaacuugcuauccgggcgauuuuaucgacuacgaagaacucagggagcagcugucaagcgugaguuccuucgaacgguuugagauuuuccccaagacaucuagcuggccuaaucacgauuccaacaagggugucaccgccgcuuguccacaugcaggggccaaaucauuuuauaagaaucugaucuggcucgugaaaaagggaaacaguuaccccaaauuaagcgaaucuuauauaaaugacaagggcaaggagguacugguucuuuggggcauccaccacccuuccacgucagcugagcaacagagcuuguaccagaacgccgaugcguacguguucgucgggaguucucgcuauuccaaaaaguuuaaaccagaaauugcagcccgacccaaggugcguggacaggcugguagaaugaauuacuauuggacucugguggagccuggcgacaaaaucaccuucgaagccacagggaaccuagucguuccaagguacgcauuugcuauggagcggaacgccggaagcggcauuaucauaucggauacuccggugcaugacugcaauaccacaugucaaacccccaagggugcgauuaacacgucucucccuuuccagaauauccacccaauuacuaucgggaaaugccccaaguauguaaaguccacaaaacugcgccuugccaccggacugagaaacaucccuucaauucagaguaggggcuuguuuggcgcaauagcuggguucaucgaaggagguuggacuggcaugguggaugggugguacggauaucaucaccagaaugagcaaggcagcgguuacgccgcugaccucaaguccacacagaacgccauugacgagaucaccaauaaagucaacucugugauagaaaagaugaauacgcaguuuaccgcaguugggaaagaguucaaccaccuggaaaagcggauugagaauuuaaacaagaaaguggaugacggcuuccuggauaucuggacauacaaugccgaacuccuuguccuguuggagaacgagcgcacucuagacuaucaugauagcaaugugaagaaccuguacgaaaaaguacgaucacagcucaagaacaaugcuaaagagaucggaaacggcuguuuugaguucuaucacaagugcgacaauaccuguauggagaguguuaagaacgggacauacgauuauccaaaauacuccgaagaggcgaagcugaauagagaggaaauugacggagugaaacuugagagcacuaggaucuaucaaauucuggcaauauacucuaccgucgccucaaguuuggugcucgucgugagccugggugcuaucuccuuuuggaugugcucuaacggcucguuacagugccggauuuguaucuga

SEQ ID NO: 140343 - RNA, 1701 nt, Artificial Sequence
  derived and/or modified CDS sequence (opt3) from hemagglutinin__InfluenzaA__AHZ41528
augaaggccauccuggugguccuccuuuacaccuucgcuacagcaaacgccgacacucugugcauuggcuaucacgcgaauaacagcacggauaccguugacacaguguuggagaaaaauguaacugugacccauuccgucaacuuacuggaagauaagcacaaugggaaacuauguaagcucagaggaguggcuccccugcaucuugguaaaugcaacauagccggcuggauccuggggaauccugagugugaaucuuugucaacagcaaguagcugguccuacauuguugagaccccaucuucggacaacggaacuugcuauccgggcgauuuuaucgacuacgaagaacucagggagcagcugucaagcgugaguuccuucgaacgguuugagauuuuccccaagacaucuagcuggccuaaucacgauuccaacaagggugucaccgccgcuuguccacaugcaggggccaaaucauuuuauaagaaucugaucuggcucgugaaaaagggaaacaguuaccccaaauuaagcgaaucuuauauaaaugacaagggcaaggagguacugguucuuuggggcauccaccacccuuccacgucagcugaucaacagagcuuguaccagaacgccgacgcguacguguucgucgggaguucucgcuauuccaaaaaguuuaaaccagagauugcagcccgacccaaggugcguggacaggcugguagaaugaauuacuauuggacucugguggaaccuggcgauaaaaucaccuucgaggccacagggaaccuagucguuccaagguacgcauuugcuauggaacggaacgccggaagcggcauuaucauaucggacacuccggugcaugauugcaauaccacaugucaaacccccaagggugcgauuaacacgucucucccuuuccagaauauccacccaauuacuaucgggaaaugccccaaguauguaaaguccacaaaacugcgccuugccaccggacugagaaacaucccuucaauucagaguaggggcuuguuuggcgcaauagcuggguucaucgagggagguuggacuggcaugguggacgggugguacggauaucaucaccagaaugaacaaggcagcgguuacgccgcugaccucaaguccacacagaacgccauugaugagaucaccaauaaagucaacucugugauagagaagaugaauacgcaguuuaccgcaguugggaaagaguucaaccaccuggagaagcggauugaaaauuuaaacaagaaaguggacgauggcuuccuggacaucuggacauacaaugccgagcuccuuguccuguuggaaaacgagcgcacucuagauuaucaugacagcaaugugaagaaccuguacgagaaaguacgaucacagcucaagaacaaugcuaaagaaaucggaaacggcuguuuugaguucuaucacaagugcgauaauaccuguauggaaaguguuaagaacgggacauacgacuauccaaaauacuccgaggaagcgaagcugaauagagaggagauugauggagugaaacuugaaagcacuaggaucuaucaaauucuggcaauauacucuaccgucgccucaaguuuggugcucgucgugagccugggugcuaucuccuuuuggaugugcucuaacggcucguuacagugccggauuuguaucuga

SEQ ID NO: 140344 - RNA, 1701 nt, Artificial Sequence; identical to SEQ ID NO: 140296
  derived and/or modified CDS sequence (opt3) from hemagglutinin__InfluenzaA__AHZ41539

SEQ ID NO: 140345 - RNA, 1701 nt, Artificial Sequence; identical to SEQ ID NO: 140291
  derived and/or modified CDS sequence (opt3) from hemagglutinin__InfluenzaA__AHZ41550

SEQ ID NO: 140346 - RNA, 1701 nt, Artificial Sequence; identical to SEQ ID NO: 140292
  derived and/or modified CDS sequence (opt3) from hemagglutinin__InfluenzaA__AHZ41561

SEQ ID NO: 140347 - RNA, 1701 nt, Artificial Sequence
  derived and/or modified CDS sequence (opt3) from hemagglutinin__InfluenzaA__AHZ41572
augaaggccauccuggugguccuccuuuacaccuucgcuacagcaaacgccgacacucugugcauuggcuaucacgcgaauaacagcacggauaccguugacacaguguuggagaaaaauguaacugugacccauuccgucaacuuacuggaagauaagcacaaugggaaacuauguaagcucagaggaguggcuccccugcaucuugguaaaugcaacauagccggcuggauccuggggaauccugagugugaaucuuugucaacagcaaguagcugguccuacauuguugagaccccaucuucggacaacggaacuugcuauccgggcgauuuuaucgacuacgaagaacucagggagcagcugucaagcgugaguuccuucgaacgguuugagauuuuccccaagacaucuagcuggccuaaucacgauuccaacaagggugucaccgccgcuuguccacaugcaggggccaaaucauuuuauaagaaucugaucuggcucgugaaaaagggaaacaguuaccccaaauuaagcaagucuuauauaaaugacaagggcaaagaaguacugguucuuuggggcauccaccacccuuccacgucagcugagcaacagagcuuguaccagaacgccgaugcguacguguucgucgggaguucucgcuauuccaagaaauuuaagccagagauugcagcccgacccaaagugcguggacaggcugguagaaugaauuacuauuggacucugguggaaccuggcgacgagaucaccuucgaagccacagggaaccuagucguuccaagguacgcauuugcuauggagcggaacgccggaagcggcauuaucauaucggauacuccggugcaugacugcaauaccacaugucaaacccccaagggugcgauuaacacgucucucccuuuccagaauauccacccaauuacuaucgggaaaugccccaaguauguaaaguccacaaaacugcgccuugccaccggacugagaaacaucccuucaauucagaguaggggcuuguuuggcgcaauagcuggguucaucgaaggagguuggacuggcaugguggaugggugguacggauaucaucaccagaaugagcaaggcagcgguuacgccgcugaccucaaguccacacagaacgccauugacgagaucaccaauaaagucaacucugugauagaaaagaugaauacgcaguuuaccgcaguugggaaagaguucaaccaccuggaaaagcggauugagaauuuaaacaagaaaguggaugacggcuuccuggauaucuggacauacaaugccgaacuccuuguccuguuggagaacgagcgcacucuagacuaucaugauagcaaugugaagaaccuguacgaaaaaguacgaucacagcucaagaacaaugcuaaagagaucggaaacggcuguuuugaguucuaucacaagugcgacaauaccuguauggagaguguuaagaacgggacauacgauuauccaaaauacuccgaagaggcgaagcugaauagagaggaaauugacggagugaaacuugagagcacuaggaucuaucaaauucuggcaauauacucuaccgucgccucaaguuuggugcucgucgugagccugggugcuaucuccuuuuggaugugcucuaacggcucguuacagugccggauuuguaucuga

SEQ ID NO: 140348 - RNA, 1701 nt, Artificial Sequence; identical to SEQ ID NO: 140296
  derived and/or modified CDS sequence (opt3) from hemagglutinin__InfluenzaA__AHZ41583

SEQ ID NO: 140349 - RNA, 1701 nt, Artificial Sequence; identical to SEQ ID NO: 140291
  derived and/or modified CDS sequence (opt3) from hemagglutinin__InfluenzaA__AHZ41594

SEQ ID NO: 140350 - RNA, 1701 nt, Artificial Sequence
  derived and/or modified CDS sequence (opt3) from hemagglutinin__InfluenzaA__AHZ41605
augaaggccauccuggugguccuccuuuacaccuucgcuacagcaaacgccgacacucugugcauuggcuaucacgcgaauaacagcacggauaccguugacacaguguuggagaaaaauguaacugugacccauuccgucaacuuacuggaagauaagcacaaugggaaacuauguaagcucagaggaguggcuccccugcaucuugguaaaugcaacauagccggcuggauccuggggaauccugagugugaaucuuugucaacagcaaguagcugguccuacauuguugagaccccaucuucggacaacggaacuugcuauccgggcgauuuuaucgacuacgaagaacucagggagcagcugucaagcgugaguuccuucgaacgguuugagauuuuccccaauacaucuagcuggccuaaccacgauuccaauaagggugucaccgccgcuuguccacaugcaggggccaagucauuuuauaaaaaccugaucuggcucgugaagaaaggaaauaguuaccccaaguuaagcaaaucuuauauaaacgacaagggcaaggaaguacugguucuuuggggcauccaccacccuuccacgucagcugagcaacagagcuuguaccagaaugccgaugcguacguguucgucgggaguucucgcuauuccaaaaaguuuaaaccagagauugcagcccgacccaaggugaugggacaggcuggucguaugaacuacuauuggacucugguggaaccuggcgacaaaaucaccuucgaggccacagggaaccuagucguuccaagauacgcauuugcuauggaaaggaaugccggaagcggcauuaucauaucggauacuccggugcaugacugcaacaccacaugucaaacccccaagggugcgauuaauacgucucucccuuuccagaacauccacccaauuacuaucgggaaaugccccaaguauguaaaguccacaaaacugcggcuugccaccggacugcgcaauaucccuucaauucagaguagaggcuuguuuggcgcaauagcuggguucaucgagggagguuggacuggcaugguggaugggugguacggauaucaucaccagaacgaacaaggcagcgguuacgccgcugaccucaaguccacacagaaugccauugacgagaucaccaacaaagucaauucugugauagagaagaugaacacgcaguuuaccgcaguugggaaagaguucaaucaccuggagaagaggauugaaaacuuaaauaagaaaguggaugacggcuuccuggauaucuggacauacaacgccgagcuccuuguccuguuggaaaaugagcggacucuagacuaucaugauagcaacgugaagaaccuguacgagaaaguacgcucacagcucaagaauaacgcuaaagaaaucggaaauggcuguuuugaguucuaucacaagugcgacaacaccuguauggaaaguguuaagaaugggacauacgauuauccaaaauacuccgaggaagcgaagcugaaccgagaggagauugacggagugaaacuugaaagcacuagaaucuaucaaauucuggcaauauacucuaccgucgccucaaguuuggugcucgucgugagccugggugcuaucuccuuuuggaugugcucuaauggcucguuacagugcaggauuuguaucuga

SEQ ID NO: 140351 - RNA, 1701 nt, Artificial Sequence; identical to SEQ ID NO: 140291
  derived and/or modified CDS sequence (opt3) from hemagglutinin__InfluenzaA__AHZ41616

SEQ ID NO: 140352 - RNA, 1701 nt, Artificial Sequence; identical to SEQ ID NO: 140296
  derived and/or modified CDS sequence (opt3) from hemagglutinin__InfluenzaA__AHZ41627

SEQ ID NO: 140353 - RNA, 1701 nt, Artificial Sequence; identical to SEQ ID NO: 140296
  derived and/or modified CDS sequence (opt3) from hemagglutinin__InfluenzaA__AHZ41638

SEQ ID NO: 140354 - RNA, 1701 nt, Artificial Sequence; identical to SEQ ID NO: 140292
  derived and/or modified CDS sequence (opt3) from hemagglutinin__InfluenzaA__AHZ41649

SEQ ID NO: 140355 - RNA, 1701 nt, Artificial Sequence; identical to SEQ ID NO: 140292
  derived and/or modified CDS sequence (opt3) from hemagglutinin__InfluenzaA__AHZ41660

SEQ ID NO: 140356 - RNA, 1701 nt, Artificial Sequence; identical to SEQ ID NO: 140296
  derived and/or modified CDS sequence (opt3) from hemagglutinin__InfluenzaA__AHZ41671

SEQ ID NO: 140357 - RNA, 1701 nt, Artificial Sequence; identical to SEQ ID NO: 140296
  derived and/or modified CDS sequence (opt3) from hemagglutinin__InfluenzaA__AHZ41682

SEQ ID NO: 140358 - RNA, 1701 nt, Artificial Sequence; identical to SEQ ID NO: 140296
  derived and/or modified CDS sequence (opt3) from hemagglutinin__InfluenzaA__AHZ41693

SEQ ID NO: 140359 - RNA, 1701 nt, Artificial Sequence; identical to SEQ ID NO: 140296
  derived and/or modified CDS sequence (opt3) from hemagglutinin__InfluenzaA__AHZ41704

SEQ ID NO: 140360 - RNA, 1701 nt, Artificial Sequence; identical to SEQ ID NO: 140296
  derived and/or modified CDS sequence (opt3) from hemagglutinin__InfluenzaA__AHZ41715

SEQ ID NO: 140361 - RNA, 1701 nt, Artificial Sequence; identical to SEQ ID NO: 140296
  derived and/or modified CDS sequence (opt3) from hemagglutinin__InfluenzaA__AHZ41726

SEQ ID NO: 140362 - RNA, 1701 nt, Artificial Sequence; identical to SEQ ID NO: 140296
  derived and/or modified CDS sequence (opt3) from hemagglutinin__InfluenzaA__AHZ41737

SEQ ID NO: 140363 - RNA, 1701 nt, Artificial Sequence; identical to SEQ ID NO: 140296
  derived and/or modified CDS sequence (opt3) from hemagglutinin__InfluenzaA__AHZ41748

SEQ ID NO: 140364 - RNA, 1701 nt, Artificial Sequence; identical to SEQ ID NO: 140296
  derived and/or modified CDS sequence (opt3) from hemagglutinin__InfluenzaA__AHZ41759

SEQ ID NO: 140365 - RNA, 1701 nt, Artificial Sequence; identical to SEQ ID NO: 138123
  derived and/or modified CDS sequence (opt3) from hemagglutinin__InfluenzaA__AHZ42561

SEQ ID NO: 140366 - RNA, 1701 nt, Artificial Sequence
  derived and/or modified CDS sequence (opt3) from hemagglutinin__InfluenzaA__AHZ42572
augaagaccaucauugcccugagcuacauacucugccuuguguucgcucagaaacugcccggcaacgacaauuccacagcaacuuuguguuuagggcaccaugccgucccuaacggaacgaucguuaagaccauuacaaaugauagaaucgaggugacuaacgcgaccgaacugguacaaaauucuucaauuggugagaucugcgacaguccacaccagauacuagauggcgaaaacuguacacucaucgacgcucugcuuggggauccgcagugcgacggauuucagaauaaaaagugggaucuguucguggagaggagcaaagccuauuccaacuguuaccccuaugacgucccugauuacgcaucuuugcggucgcucguggccucaagcggcacccuggaauuuaauaacgagaguuucaauuggacugguguuacacaaaacgggaccuccucugcuugcauucgccgaagcaauuccucauuuuucagucgucugaacuggcucacgcauuuaaauuuuaaguauccagcacugaacgugacuaugcccaacaaugagcaguucgacaaacuuuacaucuggggaguccaccauccuggcaccgauaaagaccagaucuuuuuguaugcccagagcucuggcagaauuacaguguccacuaagaggucacaacaggcuguaauaccaaacauugggagccggccccgcaucagaaauauuccuaguaggaucucuaucuacuggaccauuguuaaaccaggagauauacugcuaaucaacuccacagguaaucucauugccccgcggggcuacuucaagauccgcagcgggaaaucgucuauaaugcgauccgacgcgcccauuggaaaguguaagucagaaugcaucaccccuaacggcaguaucccaaaugacaaacccuuucagaacgugaauagaauuacguauggugcauguccuagguacgucaagcagagcacucugaaacuugccacagggaugcggaacgugccagagaagcaaacccguggaaucuucggcgcuauugccggcuuuauagaaaaugggugggagggaaugguggaugguugguauggcuuccgccaccagaacuccgaggggagaggacaggcagcugaccugaaaucuacucaagccgcgaucgaucagauuaauggcaaguugaacaggcucaucgguaaaacaaaugaaaaguuccaccagaucgagaaggaauuuagcgaggucgaagggcggauucaggaccuggagaaauacguugaggauaccaagauagacuuauggucauauaacgccgaacugcucguggcacuugagaaccaacauacgaucgaucugaccgacagugaaauggauaaauuguucgagaagacaaagaagcagcuacgagaaaaugcugaggacaugggcaacggaugcuuuaagauuuaccacaaaugugauaaugccugcaucggcuccauucgcaacgggacuuaugaccaugacguauacagagaugaggcucugaauaacagguuccagaucaagggaguggaacucaaaagcgguuacaaggacuggauacuguggaucucuuuugccauuucaugcuuccuucugugugucgcauugcucggcuuuaucaugugggccugccagaaagggaauauucgguguaacaucugcauauga

SEQ ID NO: 140367 - RNA, 1701 nt, Artificial Sequence; identical to SEQ ID NO: 139834
  derived and/or modified CDS sequence (opt3) from hemagglutinin__InfluenzaA__AHZ42584

SEQ ID NO: 140368 - RNA, 1701 nt, Artificial Sequence; identical to SEQ ID NO: 137931
  derived and/or modified CDS sequence (opt3) from hemagglutinin__InfluenzaA__AHZ42596

SEQ ID NO: 140369 - RNA, 1701 nt, Artificial Sequence; identical to SEQ ID NO: 138108
  derived and/or modified CDS sequence (opt3) from hemagglutinin__InfluenzaA__AHZ42608

SEQ ID NO: 140370 - RNA, 1701 nt, Artificial Sequence; identical to SEQ ID NO: 137931
  derived and/or modified CDS sequence (opt3) from hemagglutinin__InfluenzaA__AHZ42619

SEQ ID NO: 140371 - RNA, 1701 nt, Artificial Sequence
  derived and/or modified CDS sequence (opt3) from hemagglutinin__InfluenzaA__AHZ42631
augaagaccaucauugcccugagcuacauacucugccuuguguucgcucagaaacugcccggcaacuauaauuccacagcaacuuuguguuuagggcaccaugccgucccuaacggaacgaucguuaagaccauuacaaaugacagaaucgaggugacuaacgcgaccgaacugguacaaaauucuucaauuggugagaucugcgauaguccacaccagauacuagacggcgaaaacuguacacucaucgaugcucugcuuggggacccgcagugcgauggauuucagaauaaaaagugggaccuguucguggagaggagcaaagccuacuccaacuguuaucccuacgaugucccugacuaugcaucuuugcggucgcucguggccucaagcggcacccuggaauuuaauaacgagaguuucaauuggacugguguuacacaaaacgggaccuccucugcuugcauucgccgaagcaauuccucauuuuucagucgucugaacuggcucacgcauuuaaauuuuaaguacccagcacugaacgugacuaugcccaacaaugagcaguucgauaaacuuuauaucuggggaguccaccauccuggcaccgacaaagaucagaucuuuuuguacgcccagagcucuggcagaauuacaguguccacuaagaggucacaacaggcuguaauaccaaacauugggagccggccccgcaucagaaauauuccuaguaggaucucuaucuacuggaccauuguuaaaccaggagacauacugcuaaucaacuccacagguaaucucauugccccgcggggcuauuucaagauccgcagcgggaaaucgucuauaaugcgauccgaugcgcccauuggaaaguguaagucagaaugcaucaccccuaacggcaguaucccaaaugacaaacccuuucagaacgugaauagaauuacguacggugcauguccuagguaugucaagcagagcacucugaaacuugccacagggaugcggaacgugccagagaagcaaacccguggaaucuucggcgcuauugccggcuuuauagaaaaugggugggagggaaugguggacgguugguacggcuuccgccaccagaacuccgaggggagaggacaggcagcugaucugaaaucuacucaagccgcgaucgaccagauuaauggcaaguugaacaggcucaucgguaaaacaaaugaaaaguuccaccagaucgagaaggaauuuagcgaggucgaagggcggauucaggaucuggagaaauauguugaggacaccaagauagauuuauggucauacaacgccgaacugcucguggcacuugagaaccaacauacgaucgaccugaccgauagugaaaugaauaaauuguucgagaagacaaagaagcagcuacgagaaaacgcugaggacaugggcaauggaugcuuuaagauuuaucacaaaugugauaacgccugcaucggcuccauucgcaaugggacuuacgaccaugauguauacagagacgaggcucugaacaauagguuccagaucaagggaguggaacucaaaagcgguuauaaggacuggauacuguggaucucuuuugccauuucaugcuuccuucugugugucgcauugcucggcuuuaucaugugggccugccagaaagggaacauucgguguaauaucugcauauga

SEQ ID NO: 140372 - RNA, 1701 nt, Artificial Sequence
  derived and/or modified CDS sequence (opt3) from hemagglutinin__InfluenzaA__AHZ42643
augaaggccauccugguggucaugcucuacaccuucgcuacagcaaacgccgacacucuuugcauuggcuaucacgcgaauaacagcacggauaccguugacacagugcuggagaaaaauguaacugugacccauuccgucaacuuguuagaagauaagcacaaugggaaacuguguaagcuaagaggaguggcuccccuccaucuggguaaaugcaacauagccggcuggauccuugggaauccugagugugaaucucugucaacagcaaguagcugguccuacauuguugagaccucuggaucggacaacggcacuugcuauccaggugauuuuaucgacuacgaagaguugagggagcagcucucaagcgugaguuccuucgaacgguuugagauuuucccgaaggccucuagcuggcccaaucacgauuccaacaagggggucacagcugcauguccucaugccggagcuaaaggcuuuuauaagaaucugaucuggcuggugaaaaagggcaacucauacccaaaacucaguauaagcuauaucaaugacaaggggaaggaaguauuaguucugugggguauucaccaccccucuaccacggccgaucaacagucccuuuaccagaacgcggacacuuacguguucgucggaaccucacgcuauagcaaaaaguuuaaaccugagaucgcaauucgaccaaaggugcgugaucaggagggcagaaugaauuacuauuggacauugguggaacccggggacaaaaucacuuucgaggccaccggaaaccuggucguuccuagguacgcuuuugccauggaacggaacgcaggcagugguauaauuaucucugauacaccagugcaugacugcaauaccacgugucaaacuccgaagggggcuauuaacacaucccuacccuuccagaauauccacccuaucaccauuggaaaaugcccaaaguauguaaagagcacuaaacuccgccuggccacaggccuuagaaacgugcccucgauacagucuaggggccuguuuggggcgaucgccggauucauugaggguggcuggaccgggauggucgacggaugguacggcuaucaucaccagaaugaacaagguuccggguacgcagcugauuugaagucaacgcagaacgccaucgacaaaauaaccaauaaggugaacaguguuauugagaaaaugaauacacaguuuacugcugugggcaaggaguucaaccaccucgaaaagcggaucgagaaucugaacaaaaaggucgaugacggauucuuagauaucuggaccuacaaugccgaacugcucgugcuucuggagaacgaacgcacauuggacuaucaugauagcaauguuaaaaaccuauacgagaagguacgaaaccagcugaaaaauaacgcaaaggagauuggcaauggguguuuugaguucuaucacaagugcgacaacacuuguauggaauccgugaaaaauggaaccuacgauuauccuaaguacucugaagaggccaaacucaacagagaaaagaucgacggugucaaacuggagagcacaaggauuuaucaaauacuugcuaucuacucaaccgcggcaaguucccugguguuggucgugagccucggcgccauuucuuuuuggaugugcucaaaugggagucugcagugccggaucuguaucuga

SEQ ID NO: 140373 - RNA, 1701 nt, Artificial Sequence; identical to SEQ ID NO: 137931
  derived and/or modified CDS sequence (opt3) from hemagglutinin__InfluenzaA__AHZ42654

SEQ ID NO: 140374 - RNA, 1701 nt, Artificial Sequence; identical to SEQ ID NO: 137906
  derived and/or modified CDS sequence (opt3) from hemagglutinin__InfluenzaA__AHZ42666

SEQ ID NO: 140375 - RNA, 1701 nt, Artificial Sequence; identical to SEQ ID NO: 137906
  derived and/or modified CDS sequence (opt3) from hemagglutinin__InfluenzaA__AHZ42678

SEQ ID NO: 140376 - RNA, 1701 nt, Artificial Sequence
  derived and/or modified CDS sequence (opt3) from hemagglutinin__InfluenzaA__AHZ42690
augaaggccauccuggugguccuccuuuacaccuaugcuacagcaaacgccgacacucugugcauuggcuaccacgcgaauaacagcacggauaccguugacacaguguuggagaaaaauguaacugugacccauuccgucaacuuacuggaagauaagcacaaugggaaacuauguaagcucagaggaguggcuccccugcaucuugguaaaugcaacauagccggcuggauccuggggaauccugagugugaaucuuugucaacagcaaguagcugguccuauauuguugagaccucuucgucagacaacggaacuugcuacccaggcgauuucaucaauuaugaggaacucagggagcagcugagcaguguguccucuuuugaacgguucgagauuuuuccgaagacaagcuccuggcccaaccacgacucaaauaagggugucaccgccgcuuguccucaugcaggggccaaaaguuucuacaagaaccugaucuggcucgugaaaaagggaaauagcuauccaaaauuaucuaaguccuacauaaacgauaagggcaaagaaguacugguucuuuggggcauccaccaccccucaacgacuaccgaccaacagagcuuguaccagaaugcugaugccuauguguuugucgggacaagucgcuacucuaagaaauucaagccugagauugcgauccgaccaaaagugcgugaccaggagggaagaaugaacuauuacuggacucugauugaacccggugauaagaucaccuuugaggcaacaggcaaccuaguggucccuagguaugccuucgcuauggaacggaaugccggguccggaauaauuaucagcgacaccccaguucaugauugcaacacgacuugucaaacaccggagggcgcaauuaauaccucgcuccccuuucagaacauccacccuaucacuauugguaaaugcccaaaguacgugaagucuacaaaacugcgccuugcuaccgggcugagaaauguacccuccauacagucaaggggauuguucggcgccaucgcgggcuuuauugaagggggauggacggguaugguggacggcugguauggguaccaucaccagaacgagcaaggaaguggcuacgccgcagaccucaagagcacccagaaugcuaucgauaaaauaacaaacaaggucaauuccgugauugagaaaaugaacacucaguucaccgccguugguaaggaauuuaaucaccuggagaagcggaucgaaaacuuaaauaaaaagguggacgauggguuccuggacaucuggacauauaacgcugagcuccuuguccuguuggaaaaugagcgcacucuagauuaccaugacucuaacgugaaaaaccuguaugagaagguacgaaaucagcucaaaaacaaugccaaggaaauuggcaacggauguuucgaguuuuaccacaagugcgauaauaccuguauggaaagcguuaaaaacggcacauaugacuacccuaaguauucagaggaagcaaaacugaauagagagaagaucgauggggugaaacuugagaguaccaggauuuaccaaauacuggccaucuacuccacugucgcuagcucuuuggugcucgucgugucacugggagcgauuaguuucuggaugugcagcaacgguuccuuacagugccggaucuguaucuga

SEQ ID NO: 140377 - RNA, 1701 nt, Artificial Sequence; identical to SEQ ID NO: 137931
  derived and/or modified CDS sequence (opt3) from hemagglutinin__InfluenzaA__AHZ42701

SEQ ID NO: 140378 - RNA, 1701 nt, Artificial Sequence; identical to SEQ ID NO: 137906
  derived and/or modified CDS sequence (opt3) from hemagglutinin__InfluenzaA__AHZ42713

SEQ ID NO: 140379 - RNA, 1701 nt, Artificial Sequence
  derived and/or modified CDS sequence (opt3) from hemagglutinin__InfluenzaA__AHZ42725
augaagaccaucauugcccugagcuacauacucugccuuguguucgcucagaaacugcccggcaacgacaauuccacagcaacuuuguguuuagggcaccaugccgucccuaacggaacgaucguuaagaccauuacaaaugauagaaucgaggugacuaacgcgaccgaacugguacaaaauucuucaauuggugagaucugcgacaguccacaccagauacuagauggcgaaaacuguacacucaucgacgcucugcuuggggauccgcagugcgacggauuucagaauaaaaagugggaucuguucguggagaggagcaaagccuauuccaacuguuaccccuaugacgucccugauuacgcaucuuugcggucgcucguggccucaagcggcacccuggaauuuaauaacgagaguuucaauuggacugguguuacacaaaacgggaccuccucugcuugcauucgccgaagcaauuccucauuuuucagucgucugaacuggcucacgcauuuaaauuuuaaguauccagcacugaacgugacuaugcccaacaaugagcaguucgacaaacuuuacaucuggggaguccaccauccuggcaccgauaaagaccagaucuuuuuguaugcccagagcucuggcagaauuacaguguccacuaagaggucacaacaggcuguaauaccaaacauugggagccggccccgcaucagaaauauuccuaguaggaucucuaucuacuggaccauuguuaaaccaggagauauacugcuaaucaacuccacagguaaucucauugccccgcggggcuacuucaagauccgcaacgggaaaagcucgauaaugcgaucugacgcgcccauuggaaaguguaaguccgaaugcaucaccccuaauggcucaaucccaaacgacaaacccuuucagaaugugaacagaauuacguauggugcauguccuagguacgucaagcagaguacucugaaacuugccacagggaugcggaaugugccagagaagcaaacccguggaaucuucggcgcuauugccggcuuuauagaaaacgggugggagggaaugguggaugguugguauggcuuccgccaccagaauagcgaggggagaggacaggcagcugaccugaaauccacucaagccgcgaucgaucagauuaacggcaaguugaauaggcucaucgguaaaacaaacgaaaaguuccaccagaucgagaaggaauuuucugaggucgaagggcggauucaggaccuggagaaauacguugaggauaccaagauagacuuauggagcuauaacgccgaacugcucguggcacuugagaaucaacauacgaucgaucugaccgacucagaaaugaacaaauuguucgagaagacaaagaagcagcuacgagaaaaugcugaggauaugggcaacggaugcuuuaagauuuaccacaaaugugacaaugccugcaucggcaguauucgcaacgggacuuaugaucaugacguauacagagacgaggcucugaauaacagguuccagaucaagggaguggaacucaaauccgguuacaaggauuggauacuguggaucagcuuugccauuucuugcuuccuucugugugucgcauugcucggcuuuaucaugugggccugccagaaagggaauauucgguguaacaucugcauauga

SEQ ID NO: 140380 - RNA, 1701 nt, Artificial Sequence
  derived and/or modified CDS sequence (opt3) from hemagglutinin__InfluenzaA__AHZ42737
augaaggccauccuggugguccuccuuuacaccuucgcuacagcaaacgccgacacucugugcauuggcuaucacgcgaauaacagcacggauaccguugacacaguguuggagaaaaauguaacugugacccauuccgucaacuuacuggaagauaagcacaaugggaaacuauguaagcucagaggaguggcuccccugcaucuugguaaaugcaacauagccggcuggauccuggggaauccugagugugaaucuuugucaacagcaaguagcugguccuacauuguugagaccucuucgucagacaacggaacuugcuauccaggcgauuuuaucaauuacgaagaacucagggagcagcugagcaguguguccucuuucgaacgguuugagauuuucccgaagacaagcuccuggcccaaccacgacucaaauaagggugucaccgccgcuuguccucaugcaggggccaaaaguuuuuauaagaaccugaucuggcucgugaaaaagggaaauagcuacccaaaauuaucuaaguccuauauaaacgauaagggcaaagaaguacugguucuuuggggcauccaccaccccucaacgacugcugaccaacagagcuuguaccagaaugccgaugcguacguguucgucgggaccagucgcuauucuaagaaauuuaagccugagauugcaauccgaccaaaagugcgugaccaggagggaagaaugaacuacuauuggacacugauugaacccggugauaagaucacuuucgaggccaccggcaaccuaguggucccuagguacgcuuuugccauggaacggaaugcagaguccgggauaauuaucagcgacacaccaguucaugauugcaacaccacgugucaaacuccggaaggagcuauuaauacaucgcuccccuuccagaacauccacccuaucaccauuggcaaaugcccaaaguaugugaagucuacuaaacugcgccuugccacaggucugagaaauguacccuccauacagucaaggggguuguuuggagcgaucgccggcuucauugagggcggguggaccggaaugguggacgguugguacggcuaucaucaccagaacgagcaagggaguggauacgcagcugaccucaagagcacgcagaaugccaucgauaaaauaaccaacaaggucaauuccgugauugagaaaaugaacacacaguuuacugcuguuggcaaggaguucaaucaccuggaaaagcggaucgagaacuuaaauaaaaagguggacgaugguuuccuggacaucuggaccuacaacgccgaacuccuuguccuguuggagaaugagcgcacacuagauuaucaugacucuaacgugaaaaaccuguacgaaaagguacgaaaucagcucaaaaacaaugcaaaggagauugggaacggcuguuuugaguucuaucacaagugcgauaauacuuguauggaaagcguuaaaaacggaaccuacgacuauccuaaguacucagaagaggccaaacugaauagagagaagaucgauggcgugaaacuugaaaguacaaggauuuaucaaauacuggcuaucuacuccaccgucgcgagcucuuuggugcucgucgugucacugggggcaauuaguuuuuggaugugcagcaacggauccuuacagugccggaucuguaucuga

SEQ ID NO: 140381 - RNA, 1701 nt, Artificial Sequence; identical to SEQ ID NO: 137931
  derived and/or modified CDS sequence (opt3) from hemagglutinin__InfluenzaA__AHZ42748

SEQ ID NO: 140382 - RNA, 1701 nt, Artificial Sequence; identical to SEQ ID NO: 137951
  derived and/or modified CDS sequence (opt3) from hemagglutinin__InfluenzaA__AHZ42760

SEQ ID NO: 140383 - RNA, 1701 nt, Artificial Sequence
  derived and/or modified CDS sequence (opt3) from hemagglutinin__InfluenzaA__AHZ42772
augaagaccaucauugcccugagcuacauacucugccuuguguucgcucaggagcugcccggcaacgacgauuccacagcaacuuuguguuuagggcaccaugccgucccuaauggaacgaucguuaaaaccauuacaaacgacagaaucgaagugacuaaugcgaccgagcugguacaaucuucaaguacaggugaaauuugcaacagcccacaccagauccuagauggcgagaauuguacccucauagacgcucugcuuggggauccgcagugcgacggauuucagaacaagaaaugggaucuguucguggaaagguccaaggcccauucuaauuguuaucccuacgacgucccugauuaugcaucguugcggucacucguggccagcaguggcacucuggaguuuaacaaugaguccuucaacuggacagguguuacccaaaaugggacgucuagcgcuugcauccgccgauccaacaauucauuuuucagucgucugaacuggcucacucacuuaaauuuuaaauacccagcacugaacgugaccaugcccaacaaugaacaguucgacaaacuuuauauuuggggaguccaucacccuggcacagauaaggaccagaucuuuuuguacgcccaggcuagcggcagaauuacugugucuaccaagaggucccaacagacaguaaucccaaacauagggucacggccccgcguuagaaauauuccuagcagggugaguaucuauuggaccauugucaagccaggagauauccugcuaaucaacucuacggguaaucucauugccccgcggggcuacuucaaaauacgcuccggaaagagcucgaucaugcgaucugacgcgcccauugggaaauguaacuccgcaugcaucacuccuaauggcucaauaccaaacgacaagcccuuucagaaugugaacagaauuacauacggugccuguccuagguaugugaagcagaauacccugaaacuugcuacugggaugcggaacgucccagagaagcaaacacguggaaucuucggcgccaucgcaggcuuuauugaaaaugggugggagggaaugguugaugguugguacggcuuccgccaccagaacagugaggggagaggacaggcugccgaccugaaaagcacccaagcggccaucgaucagauuaauggcaaguugaacaggcucauagguaaaacgaacgaaaaguuccaucagaucgagaaagaauuuuccgagguggaagggcggauucaggaccuggagaaguauguagaggauaccaagaucgacuuauggucuuacaaugcagaacugcucguggcucuugagaaccaacacacaaucgaucugacugacagcgaaaugaauaaauuguucgagaagaccaaaaagcagcuacgagaaaacgccgaggauaugggcaauggaugcuuuaaaauuuaucauaagugugacaacgcuugcauaggcucaauccgcaaugggacauacgaucacgacgucuauagagacgaggcccugaacaauagguuccagauuaaggaaguggagcucaaaaguggauacaaggauuggauccuguggauuuccuuugcaaucagcugcuuccuucuguguguugccuugcucgguuuuauaaugugggcuugccagaaaggcaacauccgguguaauauuugcaucuga

SEQ ID NO: 140384 - RNA, 1701 nt, Artificial Sequence; identical to SEQ ID NO: 137931
  derived and/or modified CDS sequence (opt3) from hemagglutinin__InfluenzaA__AHZ42784

SEQ ID NO: 140385 - RNA, 1701 nt, Artificial Sequence; identical to SEQ ID NO: 137906
  derived and/or modified CDS sequence (opt3) from hemagglutinin__InfluenzaA__AHZ42796

SEQ ID NO: 140386 - RNA, 1701 nt, Artificial Sequence; identical to SEQ ID NO: 137906
  derived and/or modified CDS sequence (opt3) from hemagglutinin__InfluenzaA__AHZ42808

SEQ ID NO: 140387 - RNA, 1701 nt, Artificial Sequence; identical to SEQ ID NO: 140380
  derived and/or modified CDS sequence (opt3) from hemagglutinin__InfluenzaA__AHZ42820

SEQ ID NO: 140388 - RNA, 1701 nt, Artificial Sequence; identical to SEQ ID NO: 138515
  derived and/or modified CDS sequence (opt3) from hemagglutinin__InfluenzaA__AHZ42831

SEQ ID NO: 140389 - RNA, 1701 nt, Artificial Sequence
  derived and/or modified CDS sequence (opt3) from hemagglutinin__InfluenzaA__AHZ42843
augaagaccaucauugcccugagcuacauacucugccuuguguucgcucagaaacugcccggcaacgacaauuccacagcaacuuuguguuuagggcaccaugccgucccuaacggaacgaugguuaagaccaucacaaaugauagaauugaggugacuaacgcgaccgaacugguacaaaauucuucaaucggugagauuugcgacaguccacaccagauccuagauggcgaaaacuguacacucauagacgcucugcuuggggauccgcagugcgacggauuucagaauaaaaagugggaucuguucguggagaggagcaaagccuauuccaacuguuaccccuaugacgucccugauuacgcaucuuugcggucgcucguggccucaagcggcacccuggaauuuaauaacgagaguuucaauuggacugguguuacacaaaacgggaccuccucugcuugcauccgccgaagcaauuccucauuuuucagucgucugaacuggcucacgcauuuaaauuuuaaguauccagcacugaacgugacuaugcccaacaaugagcaguucgacaaacuuuacauuuggggaguccaccauccuggcaccgauaaagaccagaucuuuuuguaugcccagagcucuggcagaauuacaguguccacuaagaggucacaacaggcuguaaucccaaacauagggagccggccccgcauuagaaauaucccuaguaggauuucuaucuacuggaccaucguuaaaccaggagauauucugcuaauaaacuccacagguaaucucaucgccccgcggggcuacuucaagauucgcagcgggaaaucgucuaucaugcgauccgacgcgcccauaggaaaguguaagucagaaugcauuaccccuaacggcaguaucccaaaugacaaacccuuucagaacgugaauagaaucacguauggugcauguccuagguacgucaagcagagcacucugaaacuugccacagggaugcggaacgugccagagaagcaaacccguggaauuuucggcgcuaucgccggcuuuauugaaaaugggugggagggaaugguggaugguugguauggcuuccgccaccagaacuccgaggggagaggacaggcagcugaccugaaaucuacucaagccgcgauagaucagaucaauggcaaguugaacaggcucauugguaaaacaaaugaaaaguuccaccagaucgagaaggaauuuagcgaggucgaagggcggauccaggaccuggagaaauacguugaggauaccaagauugacuuauggucauauaacgccgaacugcucguggcacuugagaaccaacauacgauagaucugaccgacagugaaaugaauaaauuguucgagaagacaaagaagcagcuacgagaaaacgcugaggauaugggcaauggaugcuuuaagaucuaccacaaaugugacaacgccugcauuggcuccauccgcaaugggacuuaugaucauaacguauacagagacgaggcucugaauaacagguuccagauuaagggaguggaacucaaaagcgguuacaaggacuggauccuguggauaucuuuugccaucucaugcuuccuucugugugucgcauugcucggcuuuauuaugugggccugccagaaagggaauauccgguguaacauuugcaucuga

SEQ ID NO: 140390 - RNA, 1701 nt, Artificial Sequence
  derived and/or modified CDS sequence (opt3) from hemagglutinin__InfluenzaA__AHZ42855
augaagaccaucauugcccugagcuacauacucugccuuguguucgcucagaaacugcccggcaacgacaauuccacagcaacuuuguguuuagggcaccaugccgucccuaacggaacgaucguuaagaccauuacaaaugauagaaucgaggugacuaacgcgaccgaacugguacaaaauucuucaauuggugagaucugcgacaguccacaccagauacuagauggcgaaaacuguacacucaucgacgcucugcuuggggauccgcagugcgacggauuucagaauaaaaagugggaucuguucguggagaggagcaaagccuauuccaacuguuaccccuaugacgucccugauuacgcaucuuugcggucgcucguggccucaagcggcacccuggaauuuaauaacgagaguuucaauuggacugguguuacacaaaacgggaccuccucugcuugcauucgccgaagcaauuccucauuuuucagucgucugaacuggcucacgcauuuaaauuuuaaguauccagcacugaacaugacuaugcccaacaaugagcaguucgacaaacuuuacaucuggggagugcaccauccuggcaccgauaaagaccagaucuuuuuguaugcccagagcucuggcagaauuacagucuccacuaagaggucacaacaggcugugauaccaaacauugggagccggccccgcaucagaaauauuccuaguaggaucucuaucuacuggaccauuguaaaaccaggagauauacugcuaaucaacuccacagguaaucucauugccccgcggggcuacuucaagauccgcagcgggaaaucgucuauaaugcgauccgacgcgcccauuggaaaguguaagucagaaugcaucaccccuaacggcaguaucccaaaugacaaacccuuucagaacguuaauagaauuacguauggugcauguccuagguacgugaagcagagcacucugaaacuugccacagggaugcggaacgucccagagaagcaaacccguggaaucuucggcgcuauugccggcuuuauagaaaaugggugggagggaaugguggaugguugguauggcuuccgccaccagaacuccgaggggagaggacaggcagcugaccugaaaucuacucaagccgcgaucgaucagauuaauggcaaguugaacaggcucaucgguaaaacaaaugaaaaguuccaccagaucgagaaggaauuuagcgagguggaagggcggauucaggaccuggagaaauacgucgaggauaccaagauagacuuauggucauauaacgccgaacugcucguugcacuugagaaccaacauacgaucgaucugaccgacagugaaaugaauaaauuguucgagaagacaaagaagcagcuacgagaaaacgcugaggauaugggcaauggaugcuuuaagauuuaccacaaaugugacaacgccugcaucggcuccauucgcaaugggacuuaugaucauaacguguacagagacgaggcucugaauaacagguuccagaucaagggaguagaacucaaaagcgguuacaaggacuggauacuguggaucucuuuugccauuucaugcuuccuucuguguguggcauugcucggcuuuaucaugugggccugccagaaagggaauauucgguguaacaucugcauauga

SEQ ID NO: 140391 - RNA, 1701 nt, Artificial Sequence
  derived and/or modified CDS sequence (opt3) from hemagglutinin__InfluenzaA__AHZ42867
augaagaccaucauugcccugagcuacauacucugccuuguguucgcucagaaacugcccggcaacgacaauuccacagcaacuuuguguuuagggcaccaugccgucccuaacggaacgaucguuaagaccauuacaaaugaucaaaucgaggugacuaacgcgaccgaacugguacaaaauucuucaauuggugagaucugcgacaguccacaccagauacuagauggcgaaaacuguacacucaucgacgcucugcuuggggauccgcagugcgacggauuucagaauaaaaagugggaucuguucguggagagaagcaaagccuauuccaacuguuaccccuaugacgucccugauuacgcaucuuugaggucgcucguggccucaagcggcacccuggaauuuaauaacgagaguuucaauugggcugguguuacucagaacgggacauccucugcaugcauucggggaagcaauuccucauuuuucagucgccugaacuggcucacccauuuaaauuuuaaguauccagcccugaacgugacgaugcccaacaaugagcaguucgacaaguuguacaucuggggcguccaccauccuggcacugauaaagaccagauuuuucuuuaugcucaaagcucugggcgaaucaccguguccacaaagcguucacagcaggccguaauaccaaacauuggaagcagacccaggauccggaauauuccuagucgcaucucuaucuacuggacuauuguuaaaccaggugauauacugcuaaucaacuccaccggcaaucucauugcgccgagaggguacuucaagaucaggagcggaaaaucgucuauaaugcgguccgacgcacccauuggcaaguguaagucagaaugcaucacaccuaacgguaguaucccaaaugacaaacccuuucagaacgugaaucgcauuaccuauggggccuguccucgauacgucaagcaaagcacgcugaaacuugcuacuggaaugagaaacgugccagagaagcagacaaggggcaucuucggcgccauugcaggguuuauagaaaauggaugggaggguaugguggauggcugguauggguuccggcaccagaacuccgagggacguggccaagcugccgaccugaaaucuacccaggcggccaucgaucagauuaaugguaaguugaaccgccucaucgggaaaacuaaugaaaaguuccaccagaucgagaaggaauuuagcgaggucgaaggcaggauucaagaccuggagaaauacguugaggauacaaagauagacuuauggucauauaacgcagaacugcucguggcucuugagaaccagcauaccaucgaucugacggacagugaaaugaauaaauuguucgagaagaccaaaaagcagcuaagagaaaacgccgaggauaugggaaauggcugcuuuaagauuuaccacaaaugugacaacgcuugcaucggguccauucggaauggaacauaugaucaugacguauaccgagacgaggcccugaacaaucgcuuccagaucaaggguguggaacucaaaagcgaguacaaggauuggauacuguggaucucuuuugcaauuucaugcuuccuucugugugucgccuugcucggcuuuaucaugugggcuugccaaaaagggaacauuagauguaauaucugcauauga

SEQ ID NO: 140392 - RNA, 1701 nt, Artificial Sequence; identical to SEQ ID NO: 137906
  derived and/or modified CDS sequence (opt3) from hemagglutinin__InfluenzaA__AHZ42879

SEQ ID NO: 140393 - RNA, 1701 nt, Artificial Sequence
  derived and/or modified CDS sequence (opt3) from hemagglutinin__InfluenzaA__AHZ42891
augaagaccaucauugcccugagcuacauacucugccuuguguucgcucagaaacugcccggcaacgacaauuccacagcaacuuuguguuuagggcaccaugccgucccuaacggaacgaucguuaagaccauuacaaaugauagaaucgaggugacuaacgcgaccgaacugguacaaaauucuucaauuggugagaucugcgacaguccacaccagauacuagauggcgaaaacuguacacucaucgacgcucugcuuggggauccgcagugcgacggauuucagaauaaaaagugggaucuguucguggagaggagcaaagccuauuccucuuguuaccccuaugacgucccugauuacgcaucguugcggucacucguggccagcaguggcacccuggaauuuaacaaugaguccuucaacugggcugguguuacucaaaaugggacaucuagcgcaugcauucgccgauccaacucaaguuucuuuagccgucugaauuggcucacccauuuaaacuuuaaguauccagcccugaaugugacgaugcccaacaacgagcaguucgacaaguuguacaucuggggaguccaccauccuggcacugauaaagaccagauuuuucuuuaugcucagucuuccggcagaaucaccgugucaacaaagaggagccaacaggccguaauaccaaauauugggagucggccccgcaucagaaacauuccuucuaggaucuccaucuacuggacuauuguuaaaccaggagauauacugcuaaucaauagcaccgguaaccucauugcgccgcggggcuacuucaagauccgcucggggaaaucuuccauaaugcgaucagacgcacccauuggaaaguguaagagugaaugcaucacaccuaauggcagcaucccaaacgacaaacccuuucagaaugugaacagaauuaccuauggugccuguccuagguacgucaagcaguccacgcugaaacuugcuacugggaugcggaaugugccagagaagcaaacacguggaaucuucggcgccauugcaggcuuuauagaaaacgggugggagggaaugguggaugguugguauggcuuccgccaccaaaauucugaggggagaggacaggcugccgaccugaaaagcacccaggcggccaucgaucagauuaacggcaaguugaauaggcucaucgguaaaacuaacgaaaaguuccaccagaucgagaaggaauuuucagaggucgaagggcggauucaggaccuggagaaauacguugaggauacaaagauagacuuauggaguuauaaugcagaacugcucguggcucuugagaaccaacauaccaucgaucugacggacuccgaaaugaacaaauuguucgagaagaccaaaaagcagcuacgagaaaaugccgaggauaugggcaacggaugcuuuaagauuuaccacaaaugugacaaugcuugcaucggcagcauucgcaacgggacauaugaucaugacguauacagagacgaggcccugaauaacagguuccagaucaagggaguggaacucaaaucugguuacaaggauuggauacuguggaucucauuugcaauuaguugcuuccuucugugugucgccuugcucggcuuuaucaugugggcuugccagaaagggaauauucgguguaacaucugcauauga

SEQ ID NO: 140394 - RNA, 1701 nt, Artificial Sequence
  derived and/or modified CDS sequence (opt3) from hemagglutinin__InfluenzaA__AHZ42903
augaagaccaucauugcccugagcuacauacucugccuuguguucgcucagaaaauccccggcaacgacaauuccacagcaacucuguguuuggggcaccaugccgucccuaacggaacgauuguuaagaccaucacaaaugauagaauugaggugacuaacgcgaccgaauuaguacaaaauucuucaaucggugagauaugcgacaguccacaccagauccuggauggcgaaaacuguacacuaauugacgcucuccugggggauccgcagugcgacggauuucagaauaaaaagugggaucuuuucguggagaggagcaaagccuauuccaacuguuaccccuaugacgucccugauuacgcaucucugcggucguugguggccucaagcggcacccucgaauuuaauaacgagaguuucaauuggacugguguuacacaaaacgggaccuccucugcuugcauccgccgaagcaauuccucauuuuucagucgucugaacuggcugacgcaucucaauuuuaaguauccagcauuaaacgugacuaugcccaacaaugagcaguucgacaagcuguacauuuggggaguccaccauccuggcaccgauaaagaccagaucuuucuuuaugcccagagcucuggcagaauaacaguguccacuaagaggucacaacaggcuguaauuccaaacaucgggagccggccccgcauuagaaauaucccuaguaggaucucuauuuacuggaccauaguuaaaccaggagauaucuugcugauuaacuccacagguaaucuaaucgccccgcggggcuacuucaagauacgcagcgggaaaucgucuauuaugcgauccgacgcgcccaucggaaaguguaagucagaaugcaucaccccuaacggcaguauuccaaaugacaaacccuuucagaacgugaauagaaucacguauggugcauguccuagguacgucaagcagagcacucucaaacuggccacagggaugcggaacgugccagagaagcaaacccguggaauuuucggcgcuauagccggcuuuaucgaaaaugggugggagggaaugguggaugguugguauggcuuccgccaccagaacuccgaggggagaggacaggcagcugaccuuaaaucuacucaagccgcgauugaucagaucaauggcaagcugaacagguugaucgguaaaacaaaugaaaaguuccaccagauugagaaggaauuuagcgaggucgaagggcggauacaggaccucgagaaauacguugaggauaccaagaucgaccuguggucauauaacgccgaauuacugguggcacucgagaaccaacauacgauugaucuuaccgacagugaaaugaauaaacuguucgagaagacuaaaaagcaguugcgagaaaacgcugaggauaugggcaauggaugcuuuaagaucuaccacaaaugugacaacgccugcauuggcuccauccgcaaugggacauaugaucauaacguauacagagacgaggcucuaaauaacagguuccagauaaagggaguggaacugaaaagcgguuacaaggacuggauccucuggauuucuuuugccaucucaugcuuccugcuuugugucgcacuguugggcuuuauuaugugggccugccagaaagggaauauccgguguaacauaugcauuuga

SEQ ID NO: 140395 - RNA, 1701 nt, Artificial Sequence; identical to SEQ ID NO: 137883
  derived and/or modified CDS sequence (opt3) from hemagglutinin__InfluenzaA__AHZ42915

SEQ ID NO: 140396 - RNA, 1683 nt, Artificial Sequence; identical to SEQ ID NO: 138036
  derived and/or modified CDS sequence (opt3) from hemagglutinin__InfluenzaA__AHZ59747

SEQ ID NO: 140397 - RNA, 1683 nt, Artificial Sequence
  derived and/or modified CDS sequence (opt3) from hemagglutinin__InfluenzaA__AHZ59759
augaacacccagauccugguguucgcccucauugcuauaauccccacaaaugcagacaagauuugccuuggccaccaugccgucagcaacgggacuaaaguuaauacgcugaccgagagaggaguggaaguagugaacgcgacagagacugucgaaaggaccaauaucccucggauuuguuccaaggguaaacgcacaguggauuugggccaaugcggguuacugggaaccaucacuggcccaccgcagugugaccaguuucuagaguucucugcugaucucauaaucgaacgacgugaggguucagacguuugcuaccccgggaaguuugugaacgaggaagcccugagacagauucuuagggagaguggaggcaucgauaaagaagcaaugggcuucacauauagcgggauucggaccaauggagccacguccgcuugucgcagaucugguucgucauuuuacgcagagaugaaguggcuguugagcaacacugacaaugccgcuuucccucaaaugaccaagaguuauaaaaacacaaggaaguccccagcccucaucgucuggggcauacaccauucugugagcacugcggagcagaccaaacuguacggguccggaaauaagcugguaacaguuggcucaaguaacuaucagcagagcuuugugcccucuccuggugcacggccacaagucaaugggcucuccggacgcauugauuuccacugguuaaugcugaaccccaaugacaccgugacguuuucauucaacggcgccuuuaucgcuccugaucgagccagcuuccuuagaggcaaaaguauggggauucagucuggagugcaggucgacgcaaacugcgaaggugauuguuaccauuccggcgggacuaucaucagcaauuugccauuucagaacauugacucgagggcuguuggaaagugcccgcgguaugugaagcaacguucucugcuacucgccacaggcaugaaaaauguacccgagauaccuaagggucgcgggcuguucggcgcgaucgccggauucauugaaaacggcugggaggggcuuaucgauggaugguacgguuuuagacaccagaaugcacagggcgaagggaccgcugccgacuacaaauccacucaaucagcuauagaccagauuacaggaaagcugaacagguugaucgagaaaaccaaucagcaguucgagcucaucgauaacgaauuuaaugagguggaaaagcaaauuggcaacgucaucaauuggacgcgggacaguauuaccgagguguggagcuauaacgccgaacuguuaguugcaauggagaaucagcacacaauagaucuggccgacuccgagauggauaaacucuacgaacgagugaagcgccagcuuagagagaacgcugaagaggacgguacuggguguuucgaaaucuuucauaagugcgaugacgauuguauggcgucuauuaggaauaacaccuaugaccacagcaaaucacgggaggaggcaaugcagaaccgcauccaaaucgauccagucaagcugaguuccggcuacaaagacgugauuuugugguucagcuuuggagccucuugcuucauacuacuggcuaucguaaugggccucguuuuuauuugcgugaagaaugggaacaugagauguacaaucugcauuuga

SEQ ID NO: 140398 - RNA, 1683 nt, Artificial Sequence
  derived and/or modified CDS sequence (opt3) from hemagglutinin__InfluenzaA__AHZ59771
augaacacccagauccugguguucgcccucauugcuauaauccccacaaaugcagacaagauuugccuuggccaccaugccgucagcaacgggacuaaaguuaauacgcugaccgagagaggaguggaaguagugaacgcgacagagacugucgaaaggaccaauaucccucggauuuguuccaaggguaaacgcacaguggauuugggccaaugcggguuacugggaaccaucacuggcccaccgcagugugaccaguuucuagaguucucugcugaucucauaaucgaacgacgugaggguucagacguuugcuaccccgggaaguuugugaacgaggaagcccugagacagauucuuagggagaguggaggcaucgauaaagaagcaaugggcuucacauauagcgggauucggaccaauggagccacguccgcuugucgcagaucugguucgucauuuuacgcagagaugaaguggcuguugagcaacacugacaaugccgcuuucccucaaaugaccaagaguuauaaaaacacaaggaaguccccagcccucaucgucuggggcauacaccauucugugagcacugcggagcagaccaaacuguacggguccggaaauaagcugguaacaguuggcucaaguaacuaucagcagagcuuugugcccucuccuggugcacggccacaagucaaugggcaguccggacgcauugauuuccacuggcucauguuaaaccccaaugacaccgugacguuuucauucaacggcgccuuuaucgcuccugaucgagccagcuuccugagaggcaaaaguauggggauucagucuggagugcaggucgacgcaaacugcgaaggugauuguuaccauuccggcgggacuaucaucagcaaucuuccauuucaaaacauugacucgagggcuguuggaaagugcccgcgguaugugaagcagcguucuuugcugcuagccacaggcaugaaaaauguacccgagauaccuaagggucgcgggcuuuucggcgcgaucgccggauucauugaaaacggcugggaggggcugaucgauggaugguacgguuuuagacaccagaaugcacaaggcgaagggaccgcugccgacuacaaauccacucagucagcuauagaccagauuacaggaaagcucaacaggcugaucgagaaaaccaaucagcaauucgaguugaucgauaacgaauuuaaugagguggaaaagcagauuggcaacgucaucaauuggacgcgggacaguauuaccgagguguggagcuauaacgccgaacuccugguugcaauggagaaucagcacacaauagauuuagccgacuccgagauggauaaacuguacgaacgagugaagcgccagcucagagagaacgcugaagaggacgguacuggguguuucgaaaucuuucauaagugcgaugacgauuguauggcgucuauuaggaauaacaccuaugaccacagcaaauaccgggaggaggcaaugcaaaaccgcauccagaucgauccagucaaacuuucaaguggcuauaaggacgugauucugugguucuccuuuggagccagcugcuucauauugcuagcuaucguaaugggccugguuuuuauuugcgugaagaaugggaacaugagauguacaaucugcauuuga

SEQ ID NO: 140399 - RNA, 1683 nt, Artificial Sequence
  derived and/or modified CDS sequence (opt3) from hemagglutinin__InfluenzaA__AHZ59795
augaacacccagauccugguguucgcccucauugcuauaauccccacaaaugcagacaagauuugccuuggccaccaugccgucagcaacgggacuaaaguuaauacgcugaccgagagaggaguggaaguagugaacgcgacagagacugucgaaaggaccaauaucccucggauuuguuccaaggguaaacgcacaguggauuugggccaaugcggguuacugggaaccaucacuggcccaccgcagugugaccaguuucuagaguucucugcugaucucauaaucgaacgacgugaggguucagacguuugcuaccccgggaaguuugugaacgaggaagcccugagacagauucuuagggagaguggaggcaucgauaaagaagcaaugggcuucacauauagcgggauucggaccaauggaacgacuuccgccugucgcagaucugguucgucauuuuacgcugagaugaaguggcuguugagcaacaccgacaaugcagccuucccucaaaugacaaagaguuauaaaaacacuaggaaguccccagcucucaucgucuggggcauacaccauucugugagcaccgccgagcagacaaaacuguacggguccggaaauaagcugguaaccguuggcucaaguaacuaucagcagagcuuugugcccucuccuggugcgcggccacaagucaaugggcucuccggacgcauugauuuccacugguuaaugcugaaccccaaugacacggugacuuuuucauucaacggcgcauuuaucgccccugaucgagcuagcuuccuuagaggcaaaaguauggggauucagucuggagugcaggucgacgccaacugcgaaggugauuguuaccauuccggcgggacaaucaucagcaauuugccauuucagaacauugacucgagggcaguuggaaagugcccgcgguaugugaagcaacguucucugcuacucgcuaccggcaugaaaaauguacccgagauaccuaagggucgcgggcuguucggcgccaucgcgggauucauugaaaacggcugggaggggcuuaucgauggaugguacgguuuuagacaccagaaugcccagggcgaagggacugcagcugacuacaaauccacacaaucagccauagaccagauuaccggaaagcugaacagguugaucgagaaaacgaaucagcaguucgagcucaucgauaacgaauuuaaugagguggaaaagcaaauuggcaacgucaucaauuggacccgggacaguauuacagagguguggagcuauaacgcugaacuguuaguugccauggagaaucagcacacuauagaucuggcagacuccgagauggauaaacucuacgaacgagugaagcgccagcuuagagagaacgccgaagaggacgguaccggguguuucgaaaucuuucauaagugcgaugacgauuguauggcuucuauuaggaauaacacauaugaccacagcaaauaccgggaggaggcgaugcagaaccgcauccaaaucgauccagucaagcugucaaguggcuauaaagacgugauuuugugguucuccuuuggagcaagcugcuucauacuacuggccaucguaaugggccucguuuuuauuugcgugaagaaugggaacaugagauguacuaucugcauuuga

SEQ ID NO: 140400 - RNA, 1683 nt, Artificial Sequence; identical to SEQ ID NO: 140399
  derived and/or modified CDS sequence (opt3) from hemagglutinin__InfluenzaA__AHZ59807

SEQ ID NO: 140401 - RNA, 1683 nt, Artificial Sequence; identical to SEQ ID NO: 140399
  derived and/or modified CDS sequence (opt3) from hemagglutinin__InfluenzaA__AHZ59819

SEQ ID NO: 140402 - RNA, 1683 nt, Artificial Sequence; identical to SEQ ID NO: 138036
  derived and/or modified CDS sequence (opt3) from hemagglutinin__InfluenzaA__AHZ59831

SEQ ID NO: 140403 - RNA, 1683 nt, Artificial Sequence; identical to SEQ ID NO: 138036
  derived and/or modified CDS sequence (opt3) from hemagglutinin__InfluenzaA__AHZ59843

SEQ ID NO: 140404 - RNA, 1683 nt, Artificial Sequence; identical to SEQ ID NO: 138036
  derived and/or modified CDS sequence (opt3) from hemagglutinin__InfluenzaA__AHZ59855

SEQ ID NO: 140405 - RNA, 1683 nt, Artificial Sequence; identical to SEQ ID NO: 140398
  derived and/or modified CDS sequence (opt3) from hemagglutinin__InfluenzaA__AHZ59867

SEQ ID NO: 140406 - RNA, 1683 nt, Artificial Sequence; identical to SEQ ID NO: 138036
  derived and/or modified CDS sequence (opt3) from hemagglutinin__InfluenzaA__AHZ59879

SEQ ID NO: 140407 - RNA, 1683 nt, Artificial Sequence; identical to SEQ ID NO: 140398
  derived and/or modified CDS sequence (opt3) from hemagglutinin__InfluenzaA__AHZ59915

SEQ ID NO: 140408 - RNA, 1683 nt, Artificial Sequence; identical to SEQ ID NO: 138036
  derived and/or modified CDS sequence (opt3) from hemagglutinin__InfluenzaA__AHZ59927

SEQ ID NO: 140409 - RNA, 1683 nt, Artificial Sequence; identical to SEQ ID NO: 140398
  derived and/or modified CDS sequence (opt3) from hemagglutinin__InfluenzaA__AHZ59939

SEQ ID NO: 140410 - RNA, 1683 nt, Artificial Sequence; identical to SEQ ID NO: 138036
  derived and/or modified CDS sequence (opt3) from hemagglutinin__InfluenzaA__AHZ59951

SEQ ID NO: 140411 - RNA, 1683 nt, Artificial Sequence; identical to SEQ ID NO: 138036
  derived and/or modified CDS sequence (opt3) from hemagglutinin__InfluenzaA__AHZ59963

SEQ ID NO: 140412 - RNA, 1683 nt, Artificial Sequence; identical to SEQ ID NO: 138036
  derived and/or modified CDS sequence (opt3) from hemagglutinin__InfluenzaA__AHZ59988

SEQ ID NO: 140413 - RNA, 1683 nt, Artificial Sequence; identical to SEQ ID NO: 138036
  derived and/or modified CDS sequence (opt3) from hemagglutinin__InfluenzaA__AHZ60000

SEQ ID NO: 140414 - RNA, 1683 nt, Artificial Sequence; identical to SEQ ID NO: 138036
  derived and/or modified CDS sequence (opt3) from hemagglutinin__InfluenzaA__AHZ60012

SEQ ID NO: 140415 - RNA, 1683 nt, Artificial Sequence; identical to SEQ ID NO: 138036
  derived and/or modified CDS sequence (opt3) from hemagglutinin__InfluenzaA__AHZ60024

SEQ ID NO: 140416 - RNA, 1683 nt, Artificial Sequence; identical to SEQ ID NO: 140399
  derived and/or modified CDS sequence (opt3) from hemagglutinin__InfluenzaA__AHZ60036

SEQ ID NO: 140417 - RNA, 1683 nt, Artificial Sequence; identical to SEQ ID NO: 140399
  derived and/or modified CDS sequence (opt3) from hemagglutinin__InfluenzaA__AHZ60048

SEQ ID NO: 140418 - RNA, 1683 nt, Artificial Sequence; identical to SEQ ID NO: 140399
  derived and/or modified CDS sequence (opt3) from hemagglutinin__InfluenzaA__AHZ60060

SEQ ID NO: 140419 - RNA, 1683 nt, Artificial Sequence; identical to SEQ ID NO: 140399
  derived and/or modified CDS sequence (opt3) from hemagglutinin__InfluenzaA__AHZ60072

SEQ ID NO: 140420 - RNA, 1683 nt, Artificial Sequence; identical to SEQ ID NO: 140399
  derived and/or modified CDS sequence (opt3) from hemagglutinin__InfluenzaA__AHZ60084

SEQ ID NO: 140421 - RNA, 1683 nt, Artificial Sequence
  derived and/or modified CDS sequence (opt3) from hemagglutinin__InfluenzaA__AHZ60096
augaacacccagauccugguguucgcccucauugcuauaauccccacaaaugcagacaagauuugccuuggccaccaugccgucagcaacgggacuaaaguuaauacgcugaccgagagaggaguggaaguagugaacgcgacagagacugucgaaaggaccaauaucccucggauuuguuccaaggguaaacgcacaguggauuugggccaaugcggguuacugggaaccaucacuggcccaccgcagugugaccaguuucuagaguucucugcugaucucauaaucgaacgacgugaggguucagacguuugcuaccccgggaaguuugugaacgaggaagcccugagacagauucuuagggagaguggaggcaucgauaaagaagcaaugggcuucacauauagcgggauucggaccaauggagccacguccgcuugucgcagaucugguucgucauuuuacgcagagaugaaguggcuguugagcaacacugacgaugccgcuuucccucaaaugaccaagaguuauaaaaauacaaggaaguccccagcccucaucgucuggggcauacaccauucugugagcacugcggagcagaccaaacuguacggguccggaaacaagcugguaacaguuggcucaaguaauuaucagcagagcuuugugcccucuccuggugcacggccacaagucaacgggcucuccggacgcauugacuuccacugguuaaugcugaaucccaacgauaccgugacguuuucauucaauggcgccuuuaucgcuccugaccgagccagcuuccuuagaggcaaaaguauggggauucagucuggagugcaggucgaugcaaacugcgaaggugacuguuaccauuccggcgggacuaucaucagcaacuugccauuucagaauauugauucgagggcuguuggaaagugcccgcgguaugugaagcaacguucucugcuacucgccacaggcaugaaaaacguacccgagauaccuaagggucgcgggcuguucggcgcgaucgccggauucauugaaaauggcugggaggggcuuaucgacggaugguacgguuuuagacaccagaacgcacagggcgaagggaccgcugccgacuacaaauccacucaaucagcuauagaucagauuacaggaaagcugaauagguugaucgagaaaaccaaccagcaguucgagcucaucgacaaugaauuuaacgagguggaaaagcaaauuggcaaugucaucaacuggacgcgggauaguauuaccgagguguggagcuauaaugccgaacuguuaguugcaauggagaaccagcacacaauagaccuggccgauuccgagauggacaaacucuacgaacgagugaagcgccagcuuagagagaaugcugaagaggaugguacuggguguuucgaaaucuuucauaagugcgacgaugacuguauggcgucuauuaggaacaauaccuaugaucacagcaaauaccgggaggaggcaaugcagaaccgcauccaaaucgacccagucaagcugucaaguggcuauaaagacgugauuuugugguucuccuuuggagccagcugcuucauacuacuggcuaucguaaugggccucguuuuuauuugcgugaagaacgggaauaugagauguacaaucugcauuuga

SEQ ID NO: 140422 - RNA, 1701 nt, Artificial Sequence
  derived and/or modified CDS sequence (opt3) from hemagglutinin__InfluenzaA__AIC64889
augaaggccauccuggugguccuccuuuacaccuucgcuacagcaaacgccgacacucugugcauuggcuaucacgcgaauaacagcacggauaccguugacacaguguuggagaaaaauguaacugugacccauuccgucaacauauuagaagauaagcacaaugggaaacuguguaagcuaagaggaguggcuccccuccaucuggguaaaugcaacaucgccggcuggauucuugggaauccugagugugaaucucugucaacagcaaguagcugguccuacaucguugagaccucuucgucagacaacggaacuugcuauccaggcgauuuuauugacuacgaagaguugagggagcagcucagcaguguguccucuuucgaacgguuugagaucuucccgaagacaagcuccuggcccaaucacgauucaaacaagggugucaccgccgcuuguccucaugcaggggccaaaaguuuuuauaagaaucugauauggcuggugaaaaaggaaaacagcuacccaaaacucucuaaguccuauaucaaugacaagggaaaagagguauuaguucuguggggcauucaccaccccucaacgagcgcugaucaacagagucuuuaccagaacgccgacgcguacguguucgucgggucuucccgcuauagcaagaaauuuaagccugagaucgcaauucgaccaaaagugcguggccaggaaggaagaaugaauuacuauuggacuuugguggagcccggugauaagaucaccuucgaagccacaggcaaccuggucguuccuagguacgcuuuugccauggagcggaacgcagggucgggaauaauuaucucugacacuccagugcaugauugcaauaccacaugucaaaccccgaaaggcgcuauuaacacgucccuacccuuccagaauauccacccuaucacuauugguaagugcccaaaguauguaaaaucaacaaagcuccgccuggccaccgggcuuagaaacgugcccaguauacagagcaggggacuguuuggcgcgaucgccggcuucauugaagggggauggacugguauggucgacggcugguacggguaucaucaccagaaugagcaaggauccggcuacgcagcugacuugaaaucuacacagaacgccaucgaugagauaaccaauaaggugaacagcguuauugaaaagaugaauacgcaguuuaccgcuguggguaaagaguucaaccaccucgaaaagcggaucgagaaucugaacaaaaaggucgacgauggguucuuagacaucuggacauacaaugccgaacugcucgugcuucuggagaacgagcgcacuuuggauuaucaugacucaaauguuaaaaaccuauacgaaaagguacgaagucagcugaaaaacaaugcaaaggagauuggcaacggauguuuugaguucuaucacaagugcgauaauaccuguauggaauccgugaaaaacggcacauacgacuauccuaaguacagcgaagaggccaaacucaauagagaggaaaucgauggggucaagcuggagucuacuaggauuuaucaaauacuugcuaucuacucaaccguggcgaguagccuggucuuggugguuucccucggagcaauuucuuuuuggaugugcucgaacgguagccugcagugccggaucuguaucuga

SEQ ID NO: 140423 - RNA, 1701 nt, Artificial Sequence; identical to SEQ ID NO: 138088
  derived and/or modified CDS sequence (opt3) from hemagglutinin__InfluenzaA__AIC73738

SEQ ID NO: 140424 - RNA, 1701 nt, Artificial Sequence
  derived and/or modified CDS sequence (opt3) from hemagglutinin__InfluenzaA__AIC73739
augaaggccauccuggugguccuccuuuacaccuucgcuacagcaaacgccgacacucugugcauuggcuaucacgcgaauaacagcacggauaccguugacacaguguuggagaagaauguaacugugacccauuccgucaacuuacuggaagauaagcacaaugggaaacuauguaagcucagaggaguggcuccccugcaucuugguaaaugcaacauagccggcuggauccuggggaauccugagugugaaucuuugucaacagcaaguagcugguccuacauuguugagaccucuucgucagacaacggaacuugcuauccaggcgauuuuaucaauuacgaagaacucagggagcagcugagcaguguguccucuuucgaacgguuugagauuuucccgaagacaagcuccuggcccaaccacgacucaaauaagggugucaccgccgcuuguccucaugcaggggccaaaaguuuuuauaagaaccugaucuggcucgugaaaaagggaaauagcuacccaaaauuaucucaauccuauauaaacgauaagggcaaggaaguacugguucuuuggggcauccaccaccccucaacgacugcugaccagcagagcuuguaccagaaugccgaugcguacguguucgucgggaccagucgcuauucuaaaaaguuuaaaccugagauugcaauccgaccaaaggugcgugaccaagagggaagaaugaacuacuauuggacacugguggaacccggugauaaaauuacuuucgaggccaccggcaaccuagucguuccuagguacgcuuuuacaauggaacggcaugccggguccggaaucauaauuagcgacaccccagugcacgauugcaauacgacuugucagacaccggagggcgcaaucaacaccucgcuccccuuccagaauauucauccuaucacuaucgguaagugcccaaaauauguaaagucuacaaagcugcgccuugcuaccgggcugagaaacgugcccuccauucagucaaggggauuguuuggcgccauagcgggcuucaucgaagggggauggacggguauggucgacggcugguacggguaucaccaccaaaaugagcagggaaguggcuacgccgcagaccucaaaagcacccagaacgcuauugauaagaucacaaauaaagugaacuccguuauagagaagaugaauacucaguuuaccgccguggguaaagaguucaaccaucuggagaagcggauugaaaauuuaaacaagaaagucgacgauggguuccuggacaucuggacauacaaugcugagcuccuugugcuguuggaaaacgagcgcacucuagauuaucacgacucuaauguaaagaaccuguacgagaaaguucgaaaccaacucaagaauaacgccaaagaaaucggcaauggauguuuugaguucuaucauaagugcgauaacaccuguauggaaagcgugaagaauggcacauacgacuauccuaaauacucagaggaagcaaagcugaacagagagaaaauugauggggucaaacuugagaguaccaggaucuaucagauucuggccauauacuccacuguggcuagcucuuugguccucgugguuucacugggagcgaucaguuuuuggaugugcagcaaugguuccuuacagugccggauuuguaucuga

SEQ ID NO: 140425 - RNA, 1701 nt, Artificial Sequence
  derived and/or modified CDS sequence (opt3) from hemagglutinin__InfluenzaA__AIC73740
augaaggccauccuggugguccuccuuuacaccuucacaacugcuaacgcagacacgcugugcauuggcuaucacgccaauaacagcaccgauacaguugacacuguguuggagaaaaauguaaccgugacacauuccgucaacuuacuggaagauaagcacaaugggaaacuauguaagcucagaggaguggcgccccugcaucuugguaaaugcaacauagcuggcuggauccuggggaauccugagugugaaucuuugucaaccgccaguagcugguccuacauuguugagacuucuucgucagacaacggaacaugcuauccaggcgauuuuaucaauuacgaagaacucagggagcagcugagcaguguguccucuuucgaacgguuugagauuuucccgaagaccagcuccuggcccaaccacgacucaaauaagggugucacggcagccuguccucaugcuggggcaaaaaguuuuuauaagaaccugaucuggcucgugaaaaagggaaauagcuacccaaaauuaucucaauccuauauaaacgauaagggcaaggaaguacugguucuuuggggcauccaccaucccccuacuaccgccgaccagcagucauuguaccagaaugcugaugccuacguguucgucgggacaagccgcuauaguaaaaaguuuaaaccagagauugcgauccgacccaaggugcgugaccaagagggaagaaugaacuacuauuggacucugguggaaccuggugauaaaauuaccuucgaggcaacaggcaaccuagucguuccaagguacgccuuuaccauggaacggaaugcugggucuggaaucauaauuuccgacacgccggugcacgauugcaacacuacaugucagacccccgagggcgccaucaauacuagccucccuuuccagaacauucacccaaucacaaucgguaagugccccaaauauguaaagucgaccaagcugcgccuugcaacggggcugagaaaugugccuucuauucaguccaggggauuguuuggcgcuauagccggcuucaucgaagggggauggaccgguauggucgacggcugguacggguaucaucaccaaaacgagcagggaucaggcuacgcggccgaccucaaaaguacacagaaugcaauugauaagaucacuaacaaagugaauagcguuauagagaagaugaacacccaguuuacagcuguggguaaagaguucaaucaccuggagaagcggauugaaaacuuaaauaagaaagucgacgauggguuccuggacaucuggacuuacaacgccgagcuccuugugcuguuggaaaaugagcgcacccuagauuaucaugacuccaacguaaagaaccuguacgagaaaguucgaaaucaacucaagaacaaugcuaaagaaaucggcaacggauguuuugaguucuaucacaagugcgauaauacauguauggaaucugugaagaacggcaccuacgacuauccaaaauacagcgaggaagccaagcuggauagagagaaaauugacggggucaggcuugagucaacucggaucuaucagauucuggcaauauacaguacgguggccuccagcuugguccucgugguuucucugggagcuaucucauuuuggaugugcaguaaugguagcuuacagugccguauuuguaucuga

SEQ ID NO: 140426 - RNA, 1701 nt, Artificial Sequence
  derived and/or modified CDS sequence (opt3) from hemagglutinin__InfluenzaA__AIC73741
augaagaccaucauugcccugagcuacauacucugccuuguguucgcucagaaacugcccggcaacgacaauuccacagcaacuuuguguuuagggcaccaugccgucccuaacggaacgaucguuaagaccauuacaaaugauagaaucgaggugacuaacgcgaccgaacugguacaaaauucuucaauuggugagaucugcgacaguccacaccagauacuagauggcgaaaacuguacacucaucgacgcucugcuuggggauccgcauugcgacggauuucagaauaaaaagugggaucuguucguggagaggagcaaagccuauuccaacuguuaccccuaugacgucccugauuacgcaucuuugcggucgcucguggccucaagcggcacccuggaauuuaauaacgagaguuucaauugggcugguguuacucagaacgggacauccucugcaugcauucgcggaagcaauuccucauuuuucagucgacugaacuggcucacccacuuaaauuuuaaguauccagcccugaacgugacgaugcccaacaaugagcaauucgacaaguuguacaucuggggcguccaucacccuggcacugauaaagaccagauuuuucuuuaugcucagagcucugggcguaucaccguguccacaaagagaucacagcaagccguaauaccaaacauuggaagcaggccccggauccgcaauauuccuaguagaaucucuaucuacuggacuauuguuaaaccaggugauauacugcuaaucaacuccaccggcaaucucauugcgccgaggggguacuucaagauccggagcggaaaaucgucuauaaugcgcuccgacgcacccauuggcaaguguaagucagaaugcaucacaccuaacgguaguaucccaaaugacaaacccuuucagaacgugaaucgaauuaccuauggggccuguccuagauacgucaagcagagcacgcugaaacuugcuacuggaaugaggaacgugccagagaagcagacacggggcaucuucggcgccauugcaggguuuauagaaaauggaugggaggguaugauggauggcugguauggguuccgucaccaaaacuccgagggacgcggccaggcugccgaccugaaaucuacccaggcggccaucgaucaaauuaaugguaaguugaacagacucaucgggaaaacuaaugaaaaguuccaucagaucgagaaggaauuuagcgagguggaaggcaggauucaggaccuggagaaauacgucgaggauacaaagauagacuuauggucauauaacgcagaacugcucguugcucuugagaaccagcacaccaucgaucugacggacagugaaaugaauaaauuguucgagaagaccaaaaagcaacuacgggaaaacgccgaggauaugggaaauggcugcuuuaagauuuaccaucgaugugacaacgcuugcaucggguccauucgcaauggaacauaugaucacaacguguacagagacgaggcccugaauaacagguuccagauccgggguguagaacucaaaagcggcuacaaggacuggauacuguggaucucuuuugcaauuucaugcuuccuucuguguguggccuugcucggguuuaucaugugggcuugccagaaaggaaauauucgcuguaacaucugcauauga

SEQ ID NO: 140427 - RNA, 1701 nt, Artificial Sequence
  derived and/or modified CDS sequence (opt3) from hemagglutinin__InfluenzaA__AIC73742
augaaggccauccuggugguccuccuuuacaccuucgcuacagcaaacgccgacacucugugcauuggcuaucacgcgaauaacagcacggauaccguugacacaguguuggagaaaaauguaacugugacccauuccgucaacuuacuggaagauaagcacaaugggaaacuauguaagcucagaggaguggcuccccugcaucuugguaaaugcaacauagccggcuggauccuggggaauccugagugugaaucuuugucaacagcaaguagcugguccuacauuguugagaccucuucgucagacaacggaacuugcuauccaggcgauuuuaucaauuacgaagaacucagggagcagcugagcaguguguccucuuucgaacgguuugagauuuucccgaagacaagcuccuggcccaaccacgacucaaauaagggugucaccgccgcuuguccucaugcaggggccaaaaguuuuuauaagaaccugaucuggcucgugaaaaagggaaauagcuacccaaaauuacgccaaucuuauauaaacgauaagggcaaggaaguacugguucuuuggggcauccaccaccccuccacgacuaccgaccagcagucauuguaccagaaugcugaugccuacguguucgucgggacaagccgauauaguaaaaaguuuaaaccugagauugcgauccguccaaaggugagagaccaagagggaaggaugaacuacuauuggacucugguggaacccggugauaaaauuaccuucgaggcaacaggcaaccuagucguuccucgguacgccuuuaccauggaacgcaaugcugggucuggaaucauaauuuccgacacgccagugcaugauugcaacacuacaugucagaccccggagggcgccaucaauacuagccuccccuuccagaacauucacccuaucacaaucgguaagugcccaaaauauguaaagucgaccaagcugagacuugcaacggggcugaggaaugugcccucuauucagucccggggauuguuuggcgcuauagccggcuucaucgaagggggauggaccgguauggucgacggcugguacggguaucaucaccaaaacgagcagggaucaggcuacgcggccgaccucaaaaguacacagaaugcaauugauaagaucacuaacaaagugaauagcguuauagagaagaugaacacccaguuuacagcuguggguaaagaguucaaucaccuggagaagcgcauugaaaacuuaaaucgaaaggucgacgauggguuccuggacaucuggacuuacaacgccgagcuccuugugcuguuggaaaaugagagaacccuagauuaucaugacuccaacguuaaaaaccuguacgagaagguaaggaaucaacucaaaaacaaugcuaaggaaaucggcaacggauguuuugaguucuaucacaaaugcgauaauacauguauggaaucugugaagaacggcaccuacgacuauccuaaguacagcgaggaagccaaacugaaucgggagaagauugauggggucaaacuugagucaacucguaucuaucagauucuggcaauauacaguacgguggccuccagcuugguccucgugguuucucugggagcuaucucauuuuggaugugcaguaacgguagcuuacagugccgcauuuguaucuga

SEQ ID NO: 140428 - RNA, 1701 nt, Artificial Sequence; identical to SEQ ID NO: 140427
  derived and/or modified CDS sequence (opt3) from hemagglutinin__InfluenzaA__AIC73743

SEQ ID NO: 140429 - RNA, 1701 nt, Artificial Sequence
  derived and/or modified CDS sequence (opt3) from hemagglutinin__InfluenzaA__AIC73744
augaaggccauccuggugguccuccuuuacaccuucgcuacagcaaacgccgacacucugugcauuggcuaucacgcgaauaacagcacggauaccguugacacaguguuggagaagaauguaacugugacccauuccgucaacuuacuggaagauaagcacaaugggaaacuauguaagcucagaggaguggcuccccugcaucuugguaaaugcaacauagccggcuggauccuggggaauccugagugugaaucuuugucaacagcaaguagcugguccuacauuguugagaccucuucgucagacaacggaacuugcuauccaggcgauuuuaucaauuacgaagaacucagggagcagcugagcaguguguccucuuucgaacgguuugagauuuucccgaagacaagcuccuggcccaaccacgacucaaauaagggugucaccgccgcuuguccucaugcaggggccaaaaguuuuuauaagaaccugaucuggcucgugaaaaagggaaauagcuacccaaaauuaaaccaaucuuauauaaaugauaagggcaaggaaguacugguucuuuggggcauccaccaccccuccacgacugcugaccagcagucauuguaccagaacgccgaugcguacguguucgucgggaccagccgcuauaguaaaaaguuuaaaccugagauugcaauccgaccaaaggugcgugaccaagagggaagaaugaacuacuauuggacacugguggaacccggugauaaaauuacuuucgaggccaccggcaaucuagucguuccuagguacgcuuuuacaauggaacggaacgccgggucuggaaucauaauuuccgacaccccagcacaugauugcaauacgacuugucagacaccggagggcgcuaucaacaccagccuccccuuccagaauauucacccuaucacuaucgguaagugcccaaaauaugugaagucgacaaagcugcgccuugccaccgggcugagaaacguacccucuauucaguccaggggauuguuuggcgcgauagccggcuucaucgaagggggauggacggguaugguggacggcugguacggguaucaucaccaaaaugagcagggaucaggcuacgcagcugaccucaaaaguacccagaacgccauugauaagaucacaaauaaagucaacagcgugauagagaagaugaauacucaguuuaccgcuguugguaaagaguucaaccaccuggagaagcggauugaaaauuuaaacaagaaaguggacgauggguuccuggacaucuggacauacaaugccgagcuccuuguccuguuggaaaacgagcgcacucuagauuaucaugacuccaacgugaagaaucuguacgagaaaguacgaaaccaacucaagaauaacgcaaaagaaaucggcaauggauguuuugaguucuaucacaagugcgauaacaccuguauggaaucuguuaagaauggcacauacgacuauccuaaauacagcgaggaagccaagcugaacagagagaaaauugauggggugaaacuugagucaaccaggaucuaucagauucuggcuauauacaguacugucgcguccagcuuggugcucgucgugucucugggagcaaucucauuuuggaugugcaguaaugguagcuuacagugccggauuuguaucuga

SEQ ID NO: 140430 - RNA, 1701 nt, Artificial Sequence
  derived and/or modified CDS sequence (opt3) from hemagglutinin__InfluenzaA__AIC73745
augaaggccauccuggugguccuccuuuacaccuucgcuacagcaaacgccgacacucugugcauuggcuaucacgcgaauaacagcacggauaccguugacacaguguuggagaagaauguaacugugacccauuccgucaacuuacuggaagauaagcacaaugggaaacuauguaagcucagaggaguggcuccccugcaucuugguaaaugcaacauagccggcuggauccuggggaauccugagugugaaucuuugucaacagcaaguagcugguccuacauuguugagaccucuucgucagacaacggaacuugcuauccaggcgauuuuaucaauuacgaagaacucagggagcagcugagcaguguguccucuuucgaacgguuugagauuuucccgaagacaagcuccuggcccaaccacgacucaaauaagggugucaccgccgcuuguccucaugcaggggccaaaaguuuuuauaagaaccugaucuggcucgugaaaaagggaaauagcuacccaaaauuaucucaauccuauauaaacgauaagggcaaggaaguacugguucuuuggggcauccaccaccccucaacgacugcugaccagcagagcuuguaccagaaugccgaugcguacguguucgucgggaccagucgcuauucuaaaaaguuuaaaccugagauugcaauccgaccaaaggugcgugaccaagagggaagaaugaacuacuauugggcccugguggaacccggugauaaaauuacauucgaggcuacuggcaaccuagucguuccuagguacgccuuuaccauggaacggaaugcaggguccggaaucauaauuagcgacacaccagugcaugauugcaacaccacgugucagacuccggagggcgcuaucaauacaucgcuccccuuccagaacauucacccuaucaccaucgguaagugcccaaaauauguaaagucuacuaagcugcgccuugccacagggcugagaaauauucccuccauacagucaaggggauuguuuggcgcgaucgccggcuucauugaagggggauggaccgguaugguggacggcugguacggguaucaucaccaaaacgagcagggaaguggcuacgcagcugaccucaaaagcacgcagaaugccaucgauaagauaaccaacaaagucaauuccgugauugagaagaugaacacacaguuuacugcuguugguaaagaguucaaucaccuggagaagcggaucgaaaacuuaaauaagaaaguggacgauggguuccuggacaucuggaccuacaacgccgagcuccuuguccuguuggaaaaugagcgcacacuagauuaucaugacucuaacgugaagaaccuguacgagaaaguacgaaaucaacucaagaacaaugcaaaagaaauuggcaacggauguuuugaguucuaucacaagugcgauaauacuuguauggaaagcguuaagaacggcaccuacgacuauccuaaauacucagaggaagccaagcugaauagagagaaaaucgauggggugaaacuugagaguacaaggauuuaucagauacuggcuaucuacuccaccgucgcgagcucuuuggugcucgucgugucacugggagcaauuaguuuuuggaugugcagcaacgguuccuuacagugccggaucuguaucuga

SEQ ID NO: 140431 - RNA, 1701 nt, Artificial Sequence
  derived and/or modified CDS sequence (opt3) from hemagglutinin__InfluenzaA__AIC73746
augaaggccauccuggugguccuccuuuacaccuucgcuacagcaaacgccgacacucugugcauuggcuaucacgcgaauaacagcacggauaccguugacacaguguuggagaagaauguaacugugacccauuccgucaacuuacuggaagauaagcacaaugggaaacuauguaagcucagaggagugacaccccugcaucuugguaaaugcaacauagcuggcuggauccuggggaauccugagugugaaucuuugucaaccgccaguagcugguccuacauuguugagacuucuucgucagacaacggaacaugcuauccaggcgauuuuaucaauuacgaagaacucagggagcagcugagcaguguguccucuuucgaacgguuugagauuuucccgaagaccagcuccuggcccaaccacgacucaaauaagggugucacggcagccuguccucaugcuggggcaaaaaguuuuuauaagaaccugaucuggcucgugaaaaagggaaauagcuacccaaaauuaucucaauccuauauaaacgauaagggcaaggaaguacugguucuuuggggcauccaccaccccucaacuaccacagaccagcagagcuuguaccagaaugccgaugcuuacguguucgucgggacuucccgcuauucuaaaaaguuuaaaccugagauugccauccgaccaaaggugcgugaccaagagggaagaaugaacuacuauuggacccugguggaacccggugauaaaauuacauucgaggcgaccggcaaccuagucguuccuagguacgcauuuacgauggaacggaaugccggguccggaaucauaauuagcgacacuccagugcaugauugcaacacaaccugucagacuccggagggcgcuaucaauacaucgcuccccuuccagaacauucacccuaucaccaucgguaagugcccaaaauauguaaagucuacgaagcugcgccuugccaccgggcugagaaaugugcccuccauucagucaaggggauuguuuggcgcaauagcuggcuucaucgaagggggauggacagguauggucgacggcugguacggguaucaucaccaaaacgagcagggaaguggcuacgccgcggaccucaaaagcacucagaaugccauugauaagaucaccaacaaagugaauaguguuauagagaagaugaacacacaguuuacugcaguggguaaagaguucaaucaccuggagaagcggauugaaaacuuaaauaagaaagucgacgauggguuccuggacaucuggaccuacaacgcugagcuccuugugcuguuggaaaaugagcgcacacuagauuaucaugacucuaacguaaagaaccuguacgagaaaguucgaaaucaacucaagaacaaugccaaagaaaucggcaacggauguuuugaguucuaucacaagugcgauaauaccuguauggaaagcgugaagaacggcacuuacgacuauccuaaauacucagaggaagcuaagcugaauagagagaaaauugauggggucaaacuugagaguacgaggaucuaucagauucuggccauauacuccacaguggcaagcucuuugguccucgugguuucacugggagccaucaguuuuuggaugugcagcaacgguuccuuacagugccggauuuguaucuga

SEQ ID NO: 140432 - RNA, 1701 nt, Artificial Sequence
  derived and/or modified CDS sequence (opt3) from hemagglutinin__InfluenzaA__AIC73747
augaaggccauccuggugguccuccuuuacacccuggcuacagcaaacgccgacacuuugugcauuggcuaucacgcgaauaacagcacggauaccguugacacaguguuagagaaaaauguaacugugacccauuccgucaaccugcuagaagauaagcacaaugggaaacucuguaagcugagaggaguggcuccccuucaucuggguaaaugcaacauagccggcuggaucuuggggaauccugagugugaaucucucucaacagcaaguagcugguccuacauuguugagaccucuucgucagacaacggaacuugcuauccaggcgauuucaucaauuacgaggaacugagggagcagcugagcaguguguccucuuuugaacgguucgagauuuuuccgaagacaagcuccuggcccaaccacgacucaaauaagggugucaccgccgcuuguccucaugcaggggccaaaaguuucuauaagaaccucaucugguuagugaaaaagggaaauagcuacccaaaacugucucaauccuauauaaacgauaagggcaaggaaguacuuguuuuguggggcauccaccaccccucaacgacugcugaccagcagagccuguaccagaaugccgaugcguacguguuugucgggaccagucgcuauucuaaaaaguucaaaccugagauugcaauccgaccaaaggugcgugaccaagagggaagaaugaacuacuauuggacacuuguggaacccggugauaaaauuacuuuugaggccaccggcaaccucgucguuccuagguacgcuuucacaauggaacggaauaccggguccggaaucauaauuagcgacacgccagugcaugauugcaacacuacaugucagaccccggagggcgccaucaauacuucgcugcccuuucagaacauucacccuaucacaaucgguaagugcccaaaauauguaaagucuaccaagcuacgccuggcaacgggguugagaaaugugcccuccauucagucaaggggacucuucggcgcuauagccggcuuuaucgaagggggauggaccgguauggucgacggcugguacggguaucaucaccaaaacgagcagggaaguggcuacgcggccgaccugaaaagcacacagaaugcaauugauaagaucacuaacaaaguuaauuccgugauagagaagaugaacacccaguucacagcuguggguaaagaauuuaaucacuuagagaagcggauugaaaaccugaauaagaaagucgacgauggguuccucgacaucuggacuuacaacgccgagcuucugguguugcuagaaaaugagcgcacccuggauuaucaugacucuaacguaaagaaccucuacgagaaaguucgaaaucaacugaagaacaaugcuaaagaaaucggcaacggauguuucgaguuuuaucacaagugcgauaauacauguauggaaagcgugaagaacggcaccuacgacuauccuaaauacucagaggaagccaaacuuaauagagagaagauugauggggucaagcuggagaguacuaggaucuaucagauuuuggcaauauacuccacgguggccagcucucucguccuggugguuucauuaggagcuaucaguuucuggaugugcagcaacgguucccugcagugccggauuuguaucuga

SEQ ID NO: 140433 - RNA, 1701 nt, Artificial Sequence; identical to SEQ ID NO: 138088
  derived and/or modified CDS sequence (opt3) from hemagglutinin__InfluenzaA__AIC73748

SEQ ID NO: 140434 - RNA, 1701 nt, Artificial Sequence
  derived and/or modified CDS sequence (opt3) from hemagglutinin__InfluenzaA__AIC73749
augaagaccaucauugcccugagcuacauacucugccuuguguucgcucagaaacugcccggcaacgacaauuccacagcaacuuuguguuuagggcaccaugccgucccuaacggaacgaucguuaagaccauuacaaaugauagaaucgaggugacuaacgcgaccgaacugguacaaaauucuucaauuggugagaucugcgacaguccacaccagauacuagauggcaaaaacuguacacucaucgacgcucugcuuggggauccgcagugcgacggauuucagaauaagaggugggaucuguucguggaacggagcaaagccuauuccaacuguuaccccuaugacgucccugauuacgcaucuuugcgcucgcucguggccucaagcggcacccuggaguuuaaugacgaaaguuucaacugggcugguguuacucaaaaugggacauccucugcaugcauucgaggaagcaacuccucauuuuucagucgucugaauuggcucacccauagcaacuuuaaguauccagccuuaaaugugacgaugcccaacaacgagcaguucgauaagcuguacaucuggggcguccaccauccuggcacugacaaagaucagauuuuucuuuaugcucacucuuccgggagaaucaccgugucaacaaagaggagccagcaagccguaauaccaaauauuggaagucggccccgcaucagaaacauuccuucuaggaucuccaucuacuggacuauuguuaaaccaggugacauauugcugaucaauagcaccggcaaccuaauugcgccgcggggguacuucaagauccagucgggaaaaucuuccauaaugcgcucagacgcacccauuggcaaguguaagagugagugcaucacaccuaaugguagcaucaccaacgauaaaccauuucagaaugugaaccgaauuacguauggggccugucccagauacgucaagcaguccacucucaaacuggcuacaggaaugaggaaugugccugaaaagcaaacccggggcaucuucggcgccauugcaggguuuauagagaacggaugggaagguaugaaagacggcugguauggguuccgucaccaaaauucugagggacgcggccaggcugccgaucuuaagagcacucaggcggccaucgaccagauuaacgguaaacugaauagauugaucgggaagacaaacgagaaguuccaucagaucgaaaaagaguuuucagaaguggagggcaggauucaggaucucgaaaaguacgucgaggacaccaaaauagaucuguggaguuauaaugcagaguuacugguugcucucgaaaaccaacacacgaucgaccuuaccgauuccgagaugaacaagcuguucgagaaaacaaagaagcaguugcgggaaaaugccgaagacaugggaaacggcugcuuuaaaauuuaccauaagugugauaaugcuugcaucgggagcauucgaaacggaacuuaugaccacgacguguaccgcgaugaggcccuaaauaacagauuccagaucaaagguguagagcugaagucuggcuacaaagacuggauacucuggaucucauuugcaauuaguugcuuccugcuuuguguggcccuguugggguuuaucaugugggcuugccagaagggaaauauuagguguaacaucugcauauga

SEQ ID NO: 140435 - RNA, 1701 nt, Artificial Sequence; identical to SEQ ID NO: 138088
  derived and/or modified CDS sequence (opt3) from hemagglutinin__InfluenzaA__AIC73750

SEQ ID NO: 140436 - RNA, 1701 nt, Artificial Sequence
  derived and/or modified CDS sequence (opt3) from hemagglutinin__InfluenzaA__AIC73754
augaaggccauccuggugguccuccuuuacaccuucgcuacagcaaacgccgacacucugugcauuggcuaucacgcgaauaacagcacggauaccguugacacaguguuggagaaaaauguaacugugacccauuccgucaacuuacuggaagauaagcacaaugggaaacuauguaagcucagaggaguggcuccccugcaucuugguaaaugcaacauagccggcuggauccuggggaauccugagugugaaucuuugucaacagcaaguagcugguccuacauuguugagaccucuucgucagacaacggaacuugcuauccaggcgauuuuaucaauuacgaagaacucagggagcagcugagcaguguguccucuuucgaacgguuugagauuuucccgaagacaagcuccuggcccaaccacgacucaaauaagggugucaccgccgcuuguccucaugcaggggccaaaaguuuuuauaagaaccugaucuggcucgugaaaaagggaaauagcuacccaaaauuaucucaauccuauauaaacgauaagggcaaggaaguacugguucuuuggggcauccaccaccccucaacgacugcugaccagcagagcuuguaccagaaugccgaugcguacguguucgucgggaccagucgcuauucucgaaaauuuaagccugagauugcaauccguccaaaagugagagaccaagagggaaggaugaacuacuauuggacacugguggaacccggugauaagauuacuuucgaggccaccggcaaccuagucguuccucgguacgcuuuuacaauggaacgcaaugccggguccggaaucauaauuagcgacaccccagugcaugauugcaacacgacuugucagacaccggagggcgcaaucaauaccucgcuccccuuccagaacauucacccuaucacuaucgguaaaugcccaaaguauguaaaaucuacaaagcugagacuugcuaccgggcugaggaaugugcccuccauucagucacggggauuguuuggcgccauagcgggcuucaucgaagggggauggacggguauggucgacggcugguacggguaucaucaccaaaacgagcagggaaguggcuacgccgcagaccucaagagcacccagaaugcuauugauaaaaucacaaacaagguaaauuccguuauagagaaaaugaacacucaguuuaccgccguggguaaggaguucaaucaccuggagaaacgcauugaaaacuuaaauaagaaggucgacgauggguuccuggacaucuggacauacaacgcugagcuccuugugcuguuggaaaaugagcgaacucuagauuaucaugacucuaacgugaaaaaccuguacgagaagguuagaaaucaacucaaaaacaaugccaaggaaaucggcaacggauguuuugaguucuaucacaaaugcgauaauaccuguauggaaagcgugaagaacggcacauacgacuauccuaaguacucagaggaagcaaaacugaauagggagaagauugauggggucaaacuugagaguacccggaucuaucagauucuggccauauacuccacuguggcuagcucuuugguccucgugguuucacugggagcgaucaguuuuuggaugugcagcaacgguuccuuacagugccguauuuguaucuga

SEQ ID NO: 140437 - RNA, 1701 nt, Artificial Sequence; identical to SEQ ID NO: 138088
  derived and/or modified CDS sequence (opt3) from hemagglutinin__InfluenzaA__AIC73755

SEQ ID NO: 140438 - RNA, 1701 nt, Artificial Sequence; identical to SEQ ID NO: 138088
  derived and/or modified CDS sequence (opt3) from hemagglutinin__InfluenzaA__AIC73756

SEQ ID NO: 140439 - RNA, 1701 nt, Artificial Sequence; identical to SEQ ID NO: 138088
  derived and/or modified CDS sequence (opt3) from hemagglutinin__InfluenzaA__AIC73757

SEQ ID NO: 140440 - RNA, 1701 nt, Artificial Sequence
  derived and/or modified CDS sequence (opt3) from hemagglutinin__InfluenzaA__AIC73758
augaaggccauccuggugguccuccuuuacaccuucgcuacagcaaacgccgacacucugugcauuggcuaucacgcgaauaacagcacggauaccguugacacaguguuggagaagaauguaacugugacccauuccgucaacuuacuggaagauaagcacaaugggaaacuauguaagcucagaggaauagcuccccugcaucuugguaaaugcaacaucgccggcuggauucuggggaauccugagugugaaucuuugucaacagcaaguagcugguccuacaucguggagaccucuucgucagacaacggaacuugcuauccaggcgauuuuauuaauuacgaagaacucagggagcagcugagcaguguuuccucuuucgaacgguuugagaucuucccgaagacaagcuccuggcccaaccacgacucaaauaagggugugaccgccgcuuguccucaugcaggggccaaaaguuuuuauaagaaccugauauggcucgucaaaaagggaaauagcuacccaaaauuaucucaauccuauaucaacgauaagggcaaggaagugcugguacuuuggggcauucaccaccccucaacgacugcugaccagcagagcuuguaccagaaugccgaugcguacguuuucguggggaccagucgcuauucuaaaaaguuuaaaccugagaucgcaauucgaccaaagguccgugaccaagagggaagaaugaacuacuauuggacacugguggaacccggugauaaaaucacuuucgaggccaccggcaaccuaguggucccuagguacgcuuuuacaauggaacggaaugccggguccggaauaauuaucagcgacaccccaguucaugauugcaacacgacuugucagacaccggagggcgcaauuaauaccucgcuccccuuccagaacauccacccuaucacuauugguaagugcccaaaauaugugaagucuacaaagcugcgccuugcuaccgggcugagaaauguacccuccauacagucaaggggauuguuuggcgccaucgcgggcuucauugaagggggauggacggguaugguggacggcugguacggguaucaucaccaaaacgagcagggaaguggcuacgccgcagaccucaaaagcacccagaaugcuaucgauaagauaacaaacaaagucaauuccgugauugagaagaugaacacucaguuuaccgccguugguaaagaguucaaucaccuggagaagcggaucgaaaacuuaaauaagaaaguggacgauggguuccuggacaucuggacauacaacgcugagcuccuuguccuguuggaaaaugagcgcacucuagauuaucaugacucuaacgugaagaaccuguacgagaaaguacgaaaucaacucaagaacaaugccaaagaaauuggcaacggauguuuugaguucuaucacaagugcgauaauaccuguauggaaagcguuaagaacggcacauacgacuauccuaaauacucagaggaagcaaagcugaauagagagaaaaucgauggggugaaacuugagaguaccaggauuuaucagauacuggccaucuacuccacugucgcuagcucuuuggugcucgucgugucacugggagcgauuaguuuuuggaugugcagcaacgguuccuuacagugccggaucuguaucuga

SEQ ID NO: 140441 - RNA, 1701 nt, Artificial Sequence
  derived and/or modified CDS sequence (opt3) from hemagglutinin__InfluenzaA__AIC73760
augaaggccauccugauugugcuccuuuacaccuucgcuacagcaaacgccgacacucugugcauaggcuaucacgcgaauaacagcacggauaccgucgacacaguuuuggagaagaaugugacuguaacccauuccgugaacuuacuggaagauaagcacaaugggaaacuauguaagcucagaggagucgcuccccugcaucuugguaaaugcaacaucgccggcuggauucuggggaauccugagugugaaucuuugucaacagcaaguagcugguccuacaucguggagaccucuucgucagacaacggaacuugcuauccaggcgauuuuauuaauuacgaagaacucagggagcagcugagcaguguuuccucuuucgaacgguuugagaucuucccgaagacaagcuccuggcccaaccacgacucaaauaagggugugaccgccgcuuguccucaugcaggggccaaaaguuuuuauaagaaccugauauggcucgucaaaaagggaaauagcuacccaaaauuaucucaauccuauaucaacgauaagggcaaggaagugcugguacuuuggggcauucaccaccccucaacgacugcugaccagcagagcuuguaccagaaugccgaugcguacguuuucguggggaccagucgcuauucuaaaaaguuuaaaccugagaucgcaauucgaccaaagguccgugaccaagagggaagaaugaacuacuauuggacacugguggaacccggugauaaaaucacuuucgaggccaccggcaaccuaguggucccuagguacgcuuuuacaauggaacggaaugccggguccggaauaauuaucagcgacaccccaguucaugauugcaacacgacuugucagacaccggagggcgcaauuaauaccucgcuccccuuccagaacauccacccuaucacuauugguaagugcccaaaauaugugaagucuacaaagcugcgccuugcuaccgggcugagaaauguacccuccauacagucaaggggauuguuuggcgccaucgcgggcuucauugaagggggauggacggguaugguggacggcugguacggguaucaucaccaaaacgagcagggaaguggcuacgccgcagaccucaaaagcacccagaaugcuaucgauaagauaacaaacaaagucaauuccgugauugagaagaugaacacucaguuuaccgccguugguaaagaguucaaucaccuggagaagcggaucgaaaacuuaaauaagaaaguggacgauggguuccuggacaucuggacauacaacgcugagcuccuuguccuguuggaaaaugagcgcacucuagauuaucaugacucuaacgugaagaaccuguacgagaaaguacgaaaucaacucaagaacaaugccaaagaaauuggcaacggauguuuugaguucuaucacaagugcgauaauaccuguauggaaagcguuaagaacggcacauacgacuauccuaaauacucagaggaagcaaagcugaauagagagaaaaucgauggggugaaacuugagaguaccaggauuuaucagauacuggccaucuacuccacugucgcuagcucuuuggugcucgucgugucacugggagcgauuaguuuuuggaugugcagcaacgguuccuuacagugccggaucuguaucuga

SEQ ID NO: 140442 - RNA, 1701 nt, Artificial Sequence; identical to SEQ ID NO: 140441
  derived and/or modified CDS sequence (opt3) from hemagglutinin__InfluenzaA__AIC73761

SEQ ID NO: 140443 - RNA, 1701 nt, Artificial Sequence; identical to SEQ ID NO: 139968
  derived and/or modified CDS sequence (opt3) from hemagglutinin__InfluenzaA__AIC73762

SEQ ID NO: 140444 - RNA, 1701 nt, Artificial Sequence
  derived and/or modified CDS sequence (opt3) from hemagglutinin__InfluenzaA__AIC73763
augaaggccauccuggugguccuccuuuacaccuucgcuacagcaaacgccgacacucugugcauuggcuaucacgcgaauaacagcacggauaccguugacacaguguuggagaaaaauguaacugugacccauuccgucaacuuacuggaagauaagcacaaugggaaacuauguaagcucagaggaguggcuccccugcaucuugguaaaugcaacauagccggcuggauccuggggaauccugagugugaaucuuugucaacagcaaguagcugguccuacauuguugagaccucuucgucagacaacggaacuugcuauccaggcgauuuuaucaauuacgaagaacucagggagcagcugagcaguguguccucuuucgaacgguuugagauuuucccgaagacaagcuccuggcccaaccacgacucaaauaagggugucaccgccgcuuguccucaugcaggggccaaaaguuuuuauaagaaccugaucuggcucgugaaaaagggaaauagcuacccaaaaauaucucaauccuauaucaacgauaagggcaaggaaguauuaguucuguggggcauucaccaccccucaacgacugcugaccagcagagccuuuaccagaaugccgaugcguacguguucgucgggaccagucgcuauucuaaaaaguuuaaaccugagaucgcaauucgaccaaaggugcgugaccaagagggaagaaugaacuacuauuggacauugguggaacccggugauaaaaucacuuucgaggccaccggcaaccuggucguuccuagguacgcuuuuacaauggaacggaaugccggguccggaauaauuaucagcgacaccccagugcaugauugcaacacgacuugucagacaccggagggcgcaauuaauaccucgcuacccuuccagaacauccacccuaucacuauugguaagugcccaaaauauguaaagucuacaaagcuccgccuggcuaccgggcuuagaaaugugcccuccauacagucaaggggacuguuuggcgccaucgcgggcuucauugaagggggauggacggguauggucgacggcugguacggguaucaucaccaaaacgagcagggaaguggcuacgccgcagacuugaaaagcacccagaaugcuaucgauaagauaacaaacaaaguuaauuccgugauugagaagaugaacacucaguuuaccgccguggguaaagaguucaaucaccucgagaagcggaucgaaaaccugaauaagaaagucgacgauggguucuuagacaucuggacauacaacgcugagcugcucgugcuucuggaaaaugagcgcacuuuggauuaucaugacucuaacguaaagaaccuauacgagaaaguucgaaaucaacugaagaacaaugccaaagaaauuggcaacggauguuuugaguucuaucacaagugcgauaauaccuguauggaaagcgugaagaacggcacauacgacuauccuaaauacucagaggaagcaaagcucaauagagagaaaaucgauggggucaagcuggagaguaccaggauuuaucagauacuugccaucuacuccacuguggcuagcucucuggucuuggugguuucacucggagcgauuaguuuuuggaugugcagcaacgguucccugcagugccggaucuguaucuga

SEQ ID NO: 140445 - RNA, 1701 nt, Artificial Sequence; identical to SEQ ID NO: 138088
  derived and/or modified CDS sequence (opt3) from hemagglutinin__InfluenzaA__AIC73765

SEQ ID NO: 140446 - RNA, 1701 nt, Artificial Sequence; identical to SEQ ID NO: 138088
  derived and/or modified CDS sequence (opt3) from hemagglutinin__InfluenzaA__AIC73766

SEQ ID NO: 140447 - RNA, 1701 nt, Artificial Sequence
  derived and/or modified CDS sequence (opt3) from hemagglutinin__InfluenzaA__AIC73767
augaaggccauccuggugguccuccuuuacaccuucgcuacagcaaacgccgacacucugugcauuggcuaucacgcgaauaacagcacggauaccguugacacaguguuggagaaaaauguaacugugacccauuccgucaacuuacuggaagauaagcacaaugggaaacuauguaagcucagaggaguggcuccccugcaucuugguaaaugcaacauagccggcuggauccuggggaauccugagugugaaucuuugucaacagcaaguagcugguccuacauuguugagaccucuucgucagacaacggaacuugcuauccaggcgauuuuaucaauuacgaagaacucagggagcagcugagcaguguguccucuuucgaacgguuugagauuuucccgaagacaagcuccuggcccaaccacgacucaaauaagggugucaccgccgcuuguccucaugcaggggccaaaaguuuuuauaagaaccugaucuggcucauaaagaagggaaauagcuacccaaaauuaucucaauccuauaucaacgauaagggcaaggaagugcugguacuuuggggcauucaccaccccucaacgacugcugaccagcagagcuuguaccagaaugccgaugcguacguuuucguggggaccagucgcuauucuaaaaaguuuaaaccugagaucgcaauucgaccaaagguccgugaccaagagggaagaaugaacuacuauuggacacugguggaacccggugauaaaaucacuuucgaggccaccggcaaccuaguggucccuagguacgcuuuuacaauggaacggaaugccggguccggaauaauuaucagcgacaccccaguucaugauugcaacacgacuugucagacaccggagggcgcaauuaauaccucgcuccccuuccagaacauccacccuaucacuauugguaagugcccaaaauaugugaagucuacaaagcugcgccuugcuaccgggcugagaaauauacccuccauccagucaaggggauuguuuggcgccauugcgggcuucaucgaagggggauggacggguaugguagacggcugguacggguaucaucaccaaaacgagcagggaaguggcuacgccgcagaccucaaaagcacccagaaugcuauagauaagauuacaaacaaagucaauuccgugaucgagaagaugaacacucaguuuaccgccguggguaaagaguucaaucaccuggagaagcggaucgaaaacuuaaauaagaaaguugacgauggguuccuggacauuuggacauacaacgcugagcuccuugugcuguuggaaaaugagcgcacucuagauuaucaugacucuaacgucaagaaccuguacgagaaaauccgaaaucaacucaagaacaaugccaaagaaauuggcaacggauguuuugaguucuaucacaagugcgauaauauguguauggaaagcgugaagaacggcaccuacgacuauccuaaauacucagaggaagcaaagcugaauagagagaaaauagaugggguaaaacuugagaguacaaggaucuaucagauucuggccaucuacuccaccguugcuagcucuuuggugcucgucgugucacugggagcgaucaguuuuuggaugugcagcaacgguuccuuacagugccggauuuguauauga

SEQ ID NO: 140448 - RNA, 1701 nt, Artificial Sequence; identical to SEQ ID NO: 138088
  derived and/or modified CDS sequence (opt3) from hemagglutinin__InfluenzaA__AIC73768

SEQ ID NO: 140449 - RNA, 1701 nt, Artificial Sequence; identical to SEQ ID NO: 138088
  derived and/or modified CDS sequence (opt3) from hemagglutinin__InfluenzaA__AIC73769

SEQ ID NO: 140450 - RNA, 1701 nt, Artificial Sequence; identical to SEQ ID NO: 138088
  derived and/or modified CDS sequence (opt3) from hemagglutinin__InfluenzaA__AIC73770

SEQ ID NO: 140451 - RNA, 1701 nt, Artificial Sequence; identical to SEQ ID NO: 138088
  derived and/or modified CDS sequence (opt3) from hemagglutinin__InfluenzaA__AIC73771

SEQ ID NO: 140452 - RNA, 1701 nt, Artificial Sequence
  derived and/or modified CDS sequence (opt3) from hemagglutinin__InfluenzaA__AIC73772
augaaggccauccuggugguccuccuuuacaccuucgcuacagcaaacgccgacacucugugcauuggcuaucacgcgaauaacagcacggauaccguugacacaguguuggagaagaauguaacugugacccauuccgucaacuuacuggaagauaagcacaaugggaaacuauguaagcucagaggaguggcuccccugcaucuugguaaaugcaacauagccggcuggauccuggggaauccugagugugaaucuuugucaacagcaaguagcugguccuacauuguugagaccucuucgucagacaacggaacuugcuauccaggcgauuuuaucaauuacgaagaacucagggagcagcugagcaguguguccucuuucgaacgguuugagauuuucccgaagacaagcuccuggcccaaccacgacucaaauaagggugucaccgccgcuuguccucaugcaggggccaaaaguuuuuauaagaaccugaucuggcucgugaaaaagggaaauagcuacccaaaauuaucucaauccuauauaaacgauaagggcaaggaaguacugguucuuuggggcauccaccaccccucaacgacugcugaccagcagagcuuguaccagaaugccgaugcguacguguucgucgggaccagucgcuauucuaaaaaguuuaaaccugagauugcaauccgaccaaaggugcgugaccaagagggaagaaugaacuacuauuggacacugguggaacccggugauaaaauuacuuucgaggccaccggcaaccuagucguuccuagguacgcuuuuacaauggaacggaaugccggguccggaaucauaauuagcgacaccccagugcaugauugcaacacgacuugucagacaccggagggcgcaaucaauaccucgcuccccuuccagaacauucacccuaucacuaucgguaagugcccaaaauauguaaagucuacaaagcugcgccuugcuaccgggcugagaaaugugcccuccauucagucaaggggauuguuuggcgccauagcgggcuucaucgaagggggauggacggguauggucgacggcugguacggguaucaucaccaaaacgagcagggaaguggcuacgccgcagaccucaaaagcacccagaaugcuauugauaagaucacaaacaaaguuaauuccgugauagagaagaugaacacucaguuuaccgccguggguaaagaguucaaucaccuggagaagcggauugaaaacuuaaauaagaaagucgacgauggguuccuggacaucuggacauacaacgcugagcuccuugugcuguuggaaaaugagcgcacucuagauuaucaugacucuaacguaaagaaccuguacgagaaaguucgaaaucaacucaagaacaaugccaaagaaaucggcaacggauguuuugaguucuaucacaagugcgauaauaccuguauggaaagcgugaagaacggcacauacgacuauccuaaauacucagaggaagcaaagcugaauagagagaaaauugauggggucaaacuugagaguaccaggguguaucagauccuggccauuuacuccacugucgcuagcucuuuggugcucguugugucacugggagcgauaaguuuuuggaugugcagcaacgguuccuuacagugccggaucuguauuuga

SEQ ID NO: 140453 - RNA, 1701 nt, Artificial Sequence; identical to SEQ ID NO: 138088
  derived and/or modified CDS sequence (opt3) from hemagglutinin__InfluenzaA__AIC73773

SEQ ID NO: 140454 - RNA, 1701 nt, Artificial Sequence; identical to SEQ ID NO: 138088
  derived and/or modified CDS sequence (opt3) from hemagglutinin__InfluenzaA__AIC73775

SEQ ID NO: 140455 - RNA, 1701 nt, Artificial Sequence; identical to SEQ ID NO: 138088
  derived and/or modified CDS sequence (opt3) from hemagglutinin__InfluenzaA__AIC73776

SEQ ID NO: 140456 - RNA, 1701 nt, Artificial Sequence; identical to SEQ ID NO: 140452
  derived and/or modified CDS sequence (opt3) from hemagglutinin__InfluenzaA__AIC73777

SEQ ID NO: 140457 - RNA, 1701 nt, Artificial Sequence
  derived and/or modified CDS sequence (opt3) from hemagglutinin__InfluenzaA__AIC73778
augaagaccaucauugcccugagcuacauacucugccuuguguucgcucagaaacugcccggcaacgacaauuccacagcaacuuuguguuuagggcaccaugccgucccuaacggaacgaucguuaagaccauuacaaaugauagaaucgaggugacuaacgcgaccgaacugguacaaaauucuucaauuggugagaucugcgacaguccacaccagauacuagauggcgaaaacuguacacucaucgacgcucugcuuggggauccgcagugcgacggauuucagaauaaaaagugggaucuguucguggagaggagcaaagcccauuccaacuguuaucccuacgacgucccugauuaugcaucuuugcggucgcucguggccucaagcggcacccuggaauuuaauaacgagaguuucaauuggacugguguuacacaaaacgggaccuccucugcuugcauucgccgaagcaauuccucauuuuucagucgucugaacuggcucacgcacuuaaauuuuaaguacccagcacugaacgugacuaugcccaacaaugagcaguucgacaaacuuuauaucuggggaguccaucacccuggcaccgauaaagaccagaucuuuuuguacgcccagagcucuggcagaauuacaguguccacuaagaggucacaacaggcuguaauaccaaacauugggagccggccccgcaucagaaauauuccuaguaggaucucuaucuauuggaccauuguuaaaccaggagauauacugcuaaucaacuccacagguaaucucauugccccgcggggcuacuucaagauccgcagcgggaaaucgucuauaaugcgauccgacgcgcccauuggaaaguguaagucagaaugcaucaccccuaacggcaguaucccaaaugacaaacccuuucagaacgugaauagaauuacguacggugcauguccuagguaugucaagcagagcacucugaaacuugccacagggaugcggaacgugccagagaagcaaacccguggaaucuucggcgcuauugccggcuuuauagaaaaugggugggagggaaugguggaugguugguacggcuuccgccaccagaacuccgaggggagaggacaggcagcugaccugaaaucuacucaagccgcgaucgaucagauuaauggcaaguugaacaggcucaucgguaaaacaaaugaaaaguuccaucagaucgagaaggaauuuagcgaggucgaagggcggauucaggaccuggagaaauauguugaggauaccaagauagacuuauggucauacaacgccgaacugcucguggcacuugagaaccaacacacgaucgaucugaccgacagugaaaugaauaaauuguucgagaagacaaagaagcagcuacgagaaaacgcugaggauaugggcaauggaugcuuuaagauuuaucauaaaugugacaacgccugcaucggcuccauucgcaaugggacuuacgaucacaacguauauagagacgaggcucugaauaacagguuccagaucaagggaguggaacucaaaagcgguuacaaggacuggauacuguggaucucuuuugccauuucaugcuuccuucugugugucgcauugcucggcuuuaucaugugggccugccagaaagggaauauucgguguaacaucugcauauga

SEQ ID NO: 140458 - RNA, 1701 nt, Artificial Sequence; identical to SEQ ID NO: 140457
  derived and/or modified CDS sequence (opt3) from hemagglutinin__InfluenzaA__AIC73779

SEQ ID NO: 140459 - RNA, 1701 nt, Artificial Sequence; identical to SEQ ID NO: 140457
  derived and/or modified CDS sequence (opt3) from hemagglutinin__InfluenzaA__AIC73780

SEQ ID NO: 140460 - RNA, 1701 nt, Artificial Sequence; identical to SEQ ID NO: 139046
  derived and/or modified CDS sequence (opt3) from hemagglutinin__InfluenzaA__AIC73781

SEQ ID NO: 140461 - RNA, 1701 nt, Artificial Sequence; identical to SEQ ID NO: 140457
  derived and/or modified CDS sequence (opt3) from hemagglutinin__InfluenzaA__AIC73782

SEQ ID NO: 140462 - RNA, 1701 nt, Artificial Sequence; identical to SEQ ID NO: 140457
  derived and/or modified CDS sequence (opt3) from hemagglutinin__InfluenzaA__AIC73783

SEQ ID NO: 140463 - RNA, 1701 nt, Artificial Sequence; identical to SEQ ID NO: 140457
  derived and/or modified CDS sequence (opt3) from hemagglutinin__InfluenzaA__AIC73784

SEQ ID NO: 140464 - RNA, 1701 nt, Artificial Sequence; identical to SEQ ID NO: 138088
  derived and/or modified CDS sequence (opt3) from hemagglutinin__InfluenzaA__AIC73785

SEQ ID NO: 140465 - RNA, 1701 nt, Artificial Sequence; identical to SEQ ID NO: 140457
  derived and/or modified CDS sequence (opt3) from hemagglutinin__InfluenzaA__AIC73786

SEQ ID NO: 140466 - RNA, 1701 nt, Artificial Sequence; identical to SEQ ID NO: 138088
  derived and/or modified CDS sequence (opt3) from hemagglutinin__InfluenzaA__AIC73787

SEQ ID NO: 140467 - RNA, 1701 nt, Artificial Sequence; identical to SEQ ID NO: 138088
  derived and/or modified CDS sequence (opt3) from hemagglutinin__InfluenzaA__AIC73788

SEQ ID NO: 140468 - RNA, 1701 nt, Artificial Sequence
  derived and/or modified CDS sequence (opt3) from hemagglutinin__InfluenzaA__AIC73789
augaagaccaucauugcccugagcuacauacucugccuuguguucgcucagaaacccccuggcaacgacaauuccacagcaacucuguguuuggggcaccaugccgucccaaacggaacgaucguuaagaccauuacaaaugauagaaucgaggugacuaacgcgaccgaauuaguacaaaauucuucaauuggugagaucugcgacaguccgcaccagauacuggauggcgaaaacuguacacuaaucgacgcucuccugggggauccccagugcgacggauuucagaauaaaaagugggaucuuuucguggagaggagcaaagccuauuccaacuguuacccuuaugacgucccagauuacgcaucucugcggucguugguggccucaagcggcacccucgaauuuaauaacgagaguuucaauugggcugguguuacucaaaacgggacauccucugcaugcauucgcggaagcaauuccucauuuuucagucgacugaacuggcugacccaucucaauuuuaaguaucccgccuuaaacgugacgaugccuaacaaugagcaguucgacaagcuguacaucuggggcguccaccauccaggcacugauaaagaccagauuuuucuuuaugcucagagcucugggcguaucaccguguccacaaagagaucacaacaggccguaauacccaacauuggaagcaggccucggauccgcaauauuccaaguagaaucucuaucuacuggacuauuguuaaaccgggugauauauugcugaucaacuccaccggcaaucuaauugcgcccaggggguacuucaagauccggagcggaaaaucgucuauaaugcgcuccgacgcaccuauuggcaaguguaagucagaaugcaucacaccaaacgguaguauccccaaugacaaaccuuuucagaacgugaaucgaauuaccuauggggccuguccaagauacgucaagcagagcacgcucaaacuggcuacuggaaugaggaacgugcccgagaagcaaacacggggcaucuucggcgccauugcaggguuuauagaaaauggaugggaggguaugguggauggcugguauggguuccgucaccagaacuccgagggacgcggccaggcugccgaccuuaaaucuacccaagcggccaucgaucagauuaaugguaagcugaacagauugaucgggaaaacuaaugaaaaguuccaccagaucgagaaggaauuuagcgaggucgaaggcaggauucaggaccucgagaaauacguugaggauacaaagauagaccuguggucauauaacgcagaauuacugguggcucucgagaaccaacauaccaucgaucuuacggacagugaaaugaauaaacuguucgagaagaccaaaaagcaguugcgggaaaacgccgaggauaugggaaauggcugcuuuaagauuuaccacaaaugugacaacgcuugcaucggguccauucgaaauggaacauaugaucaugacguauaccgcgacgaggcccuaaacaauagauuccagaucaaggguguggaacugaaaagcggcuacaaggauuggauacucuggaucucuuuugcaauuucaugcuuccugcuuugugucgugcuguugggguuuaucaugugggccugccagaaaggaaacauuagguguaauaucugcauauga

SEQ ID NO: 140469 - RNA, 1701 nt, Artificial Sequence
  derived and/or modified CDS sequence (opt3) from hemagglutinin__InfluenzaA__AIC73790
augaaggccauccuggugguccuccuuuacaccuucgcuacaacuaacgcagacacgcugugcauuggcuaucacgccaauaacagcaccgauacaguugacacuguguuggagaagaauguaaccgugacacauuccgucaacuuacuggaagauaagcacaaugggaaacuauguaagcucagaggaguggcgccccugcaucuugguaaaugcaacauagcuggcuggauccuggggaauccugagugugaaucuuugucaaccgccaguagcugguccuacauuguugagacuucuucgucagacaacggaacaugcuauccaggcgauuuuaucaauuacgaagaacucagggagcagcugagcaguguguccucuuucgaacgguuugagauuuucccgaagaccagcuccuggcccaaccacgacucaaauaagggugucacggcagccuguccucaugcuggggcaaaaaguuuuuauaagaaccugaucuggcucgugaaaaagggaaauagcuacccaaaauuacgccaaucuuauauaaacgauaagggcaaggaaguacugguucuuuggggcauccaccaccccuccacuaccacagaccagcagucauuguaccagaaugccgaugcuuacguguucgucgggacuagccgauauaguaaaaaguuuaaaccugagauugccauccguccaaaggugagagaccaagagggaaggaugaacuacuauuggacccugguggaacccggugauaaaauuacauucgaggcgaccggcaaccuagucguuccucgguacgcauuuacgauggaacgcaaugccgggucuggaaucauaauuuccgacacuccagugcaugauugcaacacaaccugucagacuccggagggcgcuaucaauacaagccuccccuuccagaacauucacccuaucaccaucgguaagugcccaaaauauguaaagucgacgaagcugagacuugccaccgggcugaggaaugugcccucuauucagucccggggauuguuuggcgcaauagcuggcuucaucgaagggggauggacagguauggucgacggcugguacggguaucaucaccaaaacgagcagggaucaggcuacgccgcggaccucaaaaguacucagaaugccauugauaagaucaccaacaaagugaauagcguuauagagaagaugaacacacaguuuacugcaguggguaaagaguucaaucaccuggagaagcgcauugaaaacuuaaauaagaaagucgacgauggguuccuggacaucuggaccuacaacgcugagcuccuugugcuguuggaaaaugagcgaacacuagauuaucaugacuccaacguaaagaaccuguacgagaaaguuagaaaucaacucaagaacaaugccaaagaaaucggcaacggauguuuugaguucuaucacaagugcgauaauaccuguauggaaucugugaagaacggcacuuacgacuauccuaaauacagcgaggaagcuaagcugaauagggagaaaauugauggggucaaacuugagucaacgcggaucuaucagauucuggccauauacaguacaguggcauccagcuugguccucgugguuucucugggagccaucucauuuuggaugugcaguaacgguagcuuacagugccguauuuguaucuga

SEQ ID NO: 140470 - RNA, 1701 nt, Artificial Sequence
  derived and/or modified CDS sequence (opt3) from hemagglutinin__InfluenzaA__AIC73791
augaaggccauccuggugguccuccuuuacaccuucgcuacagcaaacgccgacacucugugcauuggcuaucacgcgaauaacagcacggauaccauagacacaguuuuggagaagaaugugacuguaacccauuccgugaacuuacuggaagauaagcacaaugggaaacuauguaagcucagaggagucgcuccccugcaucuugguaaaugcaacaucgccggcuggauucuggggaauccugagugugaaucuuugucaacagcaaguagcugguccuacaucguggagaccucuucgucagacaacggaacuugcuauccaggcgauuuuauuaauuacgaagaacucagggagcagcugagcaguguuuccucuuucgaacgguuugagaucuucccgaagacaagcuccuggcccaaccacgacucaaauaagggugugaccgccgcuuguccucaugcaggggccaaaaguuuuuauaagaaccugauauggcucgucaaaaagggaaauagcuacccaaaauuaucucaauccuauaucaacgauaagggcaaggaagugcugguacuuuggggcauucaccaccccucaacgacugcugaccagcagagcuuguaccagaaugccgaugcguacguuuucguggggaccagucgcuauucuaaaaaguuuaaaccugagaucgcaauucgaccaaagguccgugaccaagagggaagaaugaacuacuauuggacacugguggaacccggugauaaaaucacuuucgaggccaccggcaaccuaguggucccuagguacgcuuuuacaauggaacggaaugccggguccggaauaauuaucagcgacaccccaguucaugauugcaacacgacuugucagacaccggagggcgcaauuaauaccucgcuccccuuccagaacauccacccuaucacuauugguaagugcccaaaauaugugaagucuacaaagcugcgccuugcuaccgggcugagaaauguacccuccauacagucaaggggauuguuuggcgccaucgcgggcuucauugaagggggauggacggguaugguggacggcugguacggguaucaucaccaaaacgagcagggaaguggcuacgccgcagaccucaaaagcacccagaaugcuaucgauaagauaacaaacaaagucaauuccgugauugagaagaugaacacucaguuuaccgccguugguaaagaguucaaucaccuggagaagcggaucgaaaacuuaaauaagaaaguggacgauggguuccuggacaucuggacauacaacgcugagcuccuuguccuguuggaaaaugagcgcacucuagauuaucaugacucuaacgugaagaaccuguacgagaaaguacgaaaucaacucaagaacaaugccaaagaaauuggcaacggauguuuugaguucuaucacaagugcgauaauaccuguauggaaagcguuaagaacggcacauacgacuauccuaaauacucagaggaagcaaagcugaauagagagaaaaucgauggggugaaacuugagaguaccaggauuuaucagauacuggccaucuacuccacugucgcuagcucuuuggugcucgucgugucacugggagcgauuaguuuuuggaugugcagcaacgguuccuuacagugccggaucuguaucuga

SEQ ID NO: 140471 - RNA, 1701 nt, Artificial Sequence; identical to SEQ ID NO: 138088
  derived and/or modified CDS sequence (opt3) from hemagglutinin__InfluenzaA__AIC73792

SEQ ID NO: 140472 - RNA, 1701 nt, Artificial Sequence; identical to SEQ ID NO: 140452
  derived and/or modified CDS sequence (opt3) from hemagglutinin__InfluenzaA__AIC73793

SEQ ID NO: 140473 - RNA, 1701 nt, Artificial Sequence
  derived and/or modified CDS sequence (opt3) from hemagglutinin__InfluenzaA__AIC73794
augaagaccaucauuggcgugagcuacauacugugccucgucuucgcccagaaacuucccgggaacgacaauuccacagcuacucuguguuugggacaccaugcaguuccuaacgguacgaucgugaagaccauuacaaaugauagaaucgagguaacuaacgccaccgaauuagugcaaaauucuucaauuggcgagaucugcgacaguccacaccagauacuggauggggaaaacuguacacuaaucgacgcgcuccugggagauccgcagugcgacggcuuucagaauaaaaagugggaucuuuucgucgagaggagcaaggcuuauuccaacuguuaccccuaugacgugccugauuacgccucucugcggucguugguugcaucaagcgguacccucgaauuuaauaacgagaguuucaauugggccggggugacucaaaacggaacauccucuagcugcauucgcggcuccaauucaaguuucuucagccgacugaacuggcugacccaucucaauucuaaauauccagcuuuaaacgucacgaugcccaacaaugagcaguuugacaagcuguacaucuggggcgugcaccauccugggacugauaaagaccagauuuuccuuuaugcacaguccucaggacguaucaccguaagcacaaagagaagucaacaggccguuauaccaaacauugguucuaggccccggauccgcgauauuccuuccagaaucagcaucuacuggacuauugugaaaccaggcgacauauugcugaucaauucgaccgggaaccuaauugcuccgaggggauacuuuaagauccggucuggcaaauccucaauaaugcgcagugacgcccccauugguaaguguaagagcgaaugcaucacaccuaauggguccaucccaaacgauaaacccuuccagaaugucaaccgaauuaccuauggagcguguccuagauacgugaagcagucuacgcucaaacuggcaacuggcaugaggaaugugccagagcggcaaacacguggcaucuuuggggccauugcuggauucauagaaaacgguugggagggcauggucgacgggugguauggauuucgccaccagaauagcgagggcagaggucaggccgcagaucuuaagucaacccaagcugccaucgaccagauuaacgggaaacugaauagguugaucggcaagacuaacgaaaaauuccaccagaucgagaaggaauuuagugagguugaaggacggauucaggaucucgagaaguacguggaggacacaaaaauagaucugugguccuauaaugcggaauuacugguagcccucgagaaccaacauaccaucgaccuuacggauagcgaaaugaacaagcuguuugagaaaaccaagaaacaguugcgagaaaaugcagaggacaugggcaacgggugcuucaagauuuaccacaagugugauaaugcuugcaucggaucuauucgcaacgguacauaugaccaugacguguacagagaugaggcccuaaauaacagguuucagaucaaaggcgucgaacugaagucaggguacaaagacuggauacucuggaucaguuucgcuauuagcugcuuucugcuuuguguggcccuguugggauucaucaugugggcaugccagaagggcaauauucgguguaacaucugcauauga

SEQ ID NO: 140474 - RNA, 1701 nt, Artificial Sequence; identical to SEQ ID NO: 138088
  derived and/or modified CDS sequence (opt3) from hemagglutinin__InfluenzaA__AIC73796

SEQ ID NO: 140475 - RNA, 1701 nt, Artificial Sequence
  derived and/or modified CDS sequence (opt3) from hemagglutinin__InfluenzaA__AIC73797
augaagaccaucauugcccugagcuacauacucugccuuguguucgcucagaaacugcccggcaacgacaauuccacagcaacuuuguguuuagggcaccaugccgucccuaacggaacgaucguuaagaccauuacaaaugauagaaucgaggugacuaacgcgaccgaacugguacaaaauucuucaauuggugagaucugcgacaguccacaccagauacuagauggcgaaaacuguacacucaucgacgcucugcuuggggauccgcagugcgacggauuucagaauaaaaagugggaucuguucguggagaggagcaaagccuauuccaacuguuaccccuaugacgucccugauuacgcaucuuugcggucgcucguggccucaagcggcacccuggaauuuaauaacgagaguuucaauugggcugguguuacucaaaacgggacauccucuagcugcauucgcggauccaauucaaguuucuucagccgacugaacuggcucacccauuuaaauucuaaguauccagcacugaacgugacgaugcccaacaaugagcaguuugacaaacuuuacaucuggggcguccaccauccuggcacugauaaggaccagauuuucuuguaugcccaguccucagggcguaucaccgugagcacaaagagaagucaacaggcuguaauaccaaacauuggaucuaggccccggauccgcgauauuccuuccagaaucagcaucuacuggacuauuguuaaaccaggugacauacugcuaaucaauucgaccggcaaccucauugccccgaggggguacuuuaagauccggucuggaaaauccucaauaaugcgcagugacgcgcccauuggcaaguguaagagcgaaugcaucacaccuaaugguuccaucccaaacgauaaacccuuccagaaugugaaccgaauuaccuauggggcauguccuagauacgucaagcagucuacgcugaaacuugccacuggaaugaggaaugugccagagcggcaaacacguggcaucuuuggcgcuauugccggguucauagaaaacggaugggaggguaugguggacggcugguauggguuucgccaccagaauagcgagggaagaggccaggcagcugaucugaagucaacccaagccgcgaucgaccagauuaacgguaaauugaauaggcucaucgggaagacuaacgaaaaauuccaccagaucgagaaggaauuuagugaggucgaaggccggauucaggaucuggagaaguacguugaggacacaaaaauagauuuaugguccuauaaugccgaacugcucguggcacuugagaaccaacauaccaucgaccugacggauagcgaaaugaacaaguuguuugagaaaaccaagaaacagcuacgagaaaaugcugaggacaugggaaacggcugcuucaagauuuaccacaagugugauaaugccugcaucgggucuauucgcaacggaacauaugaccaugacguauacagagaugaggcucugaauaacagguuucagaucaaagguguggaacucaagucaggcuacaaagacuggauacuguggaucaguuucgccauuagcugcuuucuucugugugucgcauugcucggguucaucaugugggccugccagaagggaaauauucgguguaacaucugcauauga

SEQ ID NO: 140476 - RNA, 1701 nt, Artificial Sequence; identical to SEQ ID NO: 140475
  derived and/or modified CDS sequence (opt3) from hemagglutinin__InfluenzaA__AIC73798

SEQ ID NO: 140477 - RNA, 1701 nt, Artificial Sequence; identical to SEQ ID NO: 140475
  derived and/or modified CDS sequence (opt3) from hemagglutinin__InfluenzaA__AIC73800

SEQ ID NO: 140478 - RNA, 1701 nt, Artificial Sequence; identical to SEQ ID NO: 140475
  derived and/or modified CDS sequence (opt3) from hemagglutinin__InfluenzaA__AIC73801

SEQ ID NO: 140479 - RNA, 1701 nt, Artificial Sequence; identical to SEQ ID NO: 140475
  derived and/or modified CDS sequence (opt3) from hemagglutinin__InfluenzaA__AIC73802

SEQ ID NO: 140480 - RNA, 1701 nt, Artificial Sequence; identical to SEQ ID NO: 140475
  derived and/or modified CDS sequence (opt3) from hemagglutinin__InfluenzaA__AIC73803

SEQ ID NO: 140481 - RNA, 1701 nt, Artificial Sequence; identical to SEQ ID NO: 140475
  derived and/or modified CDS sequence (opt3) from hemagglutinin__InfluenzaA__AIC73804

SEQ ID NO: 140482 - RNA, 1701 nt, Artificial Sequence; identical to SEQ ID NO: 140475
  derived and/or modified CDS sequence (opt3) from hemagglutinin__InfluenzaA__AIC73805

SEQ ID NO: 140483 - RNA, 1701 nt, Artificial Sequence; identical to SEQ ID NO: 140475
  derived and/or modified CDS sequence (opt3) from hemagglutinin__InfluenzaA__AIC73806

SEQ ID NO: 140484 - RNA, 1701 nt, Artificial Sequence
  derived and/or modified CDS sequence (opt3) from hemagglutinin__InfluenzaA__AIC73807
augaaggccauccuggugguccuccuuuacaccuucgcuacagcaaacgccgacacucugugcauuggcuaucacgcgaauaacagcacggauaccguugacacaguguuggagaagaauguaacugugacccauuccgucaacuuacuggaagauaagcacaaugggaaacuauguaagcucagaggaguggcuccccugcaucuugguaaaugcaacauagccggcuggauccuggggaauccugagugugaaucuuugucaacagcaaguagcugguccuacauuguugagaccucuucgucagacaacggaacuugcuauccaggcgauuuuaucaauuacgaagaacucagggagcagcugagcaguguguccucuuucgaacgguuugagauuuucccgaagacaagcuccuggcccaaccacgacucaaauaagggugucaccgccgcuuguccucaugcaggggccaaaaguuuuuauaagaaccugaucuggcucgugaaaaagggaaauagcuacccaaaauuaucucaauccuauauaaacaauaagggcaaggaaguacugguucuuuggggcauccaccaccccucaacgacugcugaucagcagagcuuguaccagaacgccgacgcguacguguucgucgggaccagucgcuauucuaaaaaguuuaaaccugagauugcaauccgaccaaaggugcgugaucaagagggaagaaugaacuacuauuggacacugguggaacccggugacaaaauuacuuucgaggccaccggcaaucuagucguuccuagguacgcuuuuacaauggaacggaacgccggguccggaaucauaauuagcgauaccccagugcaugacugcaauacgacuugucagacaccggagggcgcaaucaacaccucgcuccccuuccagaauauucacccuaucacuaucgguaagugcccaaaauauguaaagucuacaaagcugcgccuugcuaccgggcugagaaacgugcccuccauucagucaaggggauuguuuggcgccauagcgggcuucaucgaagggggauggacggguauggucgauggcugguacggguaucaucaccaaaaugagcagggaaguggcuacgccgcagaccucaaaagcacccagaacgcuauugacaagaucacaaauaaagugaacuccguuauagagaagaugaauacucaguuuaccgccguggguaaagaguucaaccaccuggagaagcggauugaaaauuuaaacaagaaagucgaugacggguuccuggauaucuggacauacaaugcugagcuccuugugcuguuggaaaacgagcgcacucuagacuaucaugauucuaacguaaagaaucuguacgagaaaguucgaaaccaacucaagaauaacgccaaagaaaucggcaauggauguuuugaguucuaucacaagugcgacaacaccuguauggaaagcgugaagaauggcacauacgauuauccuaaauacucagaggaagcaaagcugaacagagagaaaauugacggggucaaacuugagaguaccaggaucuaucagauucuggccauauacuccacuguggcuagcucuuugguccucgugguuucacugggagcgaucaguuuuuggaugugcagcaaugguuccuuacagugccggauuuguaucuga

SEQ ID NO: 140485 - RNA, 1701 nt, Artificial Sequence; identical to SEQ ID NO: 140475
  derived and/or modified CDS sequence (opt3) from hemagglutinin__InfluenzaA__AIC73808

SEQ ID NO: 140486 - RNA, 1701 nt, Artificial Sequence
  derived and/or modified CDS sequence (opt3) from hemagglutinin__InfluenzaA__AIC73809
augaaggccauccuggugguccuccuuuacaccuucgcuacagcaaacgccgacacucugugcauuggcuaucacgcgaauaacagcacggauaccguugacacaguguuggagaaaaauguaacugugacccauuccgucaacuuacuggaagauaagcacaaugggaaacuauguaagcucagaggaguggcuccccugcaucuugguaaaugcaacauagccggcuggauccuggggaauccugagugugaaucuuugucaacagcaaguagcugguccuacauuguugagaccucuucgucagacaacggaacuugcuauccaggcgauuuuaucaauuacgaagaacucagggagcagcugagcaguguguccucuuucgaacgguuugagauuuucccgaagacaagcuccuggcccaaccacgacucaaauaagggugucaccgccgcuuguccucaugcaggggccaaaaguuuuuauaagaaccugaucuggcucgugaaaaagggaaauagcuacccaaaauuacgccaaucuuauauaaacgauaagggcaaggaaguacugguucuuuggggcauccaccaccccuccacgacuaccgaccagcagucauuguaccagaaugcugaugccuacguguucgucgggacaagccgauauaguaaaaaguuuaaaccugagauugcgauccguccaaaggugagagaccaagagggaaggaugaacuacuauuggacucugguggaacccggugauaaaauuaccuucgaggcaacaggcaaccuagucguuccucgguacgccuuuaccauggaacgcaaugcugggucuggaaucauaauuuccgacacgccagugcaugauugcaacacuacaugucagaccccggagggcgccaucaauacuagccuccccuuccagaacauucacccuaucacaaucgguaagugcccaaaauauguaaagucgaccaagcugagacuugcaacggggcugaggaaugugcccucuauucagucccggggauuguuuggcgcuauagccggcuucaucgaagggggauggaccgguauggucgacggcugguacggguaucaucaccaaaacgagcagggaucaggcuacgcggccgaccucaaaaguacacagaaugcaauugauaagaucacuaacaaagugaauagcguuauagagaagaugaacacccaguuuacagcuguggguaaagaguucaaucaccuggagaagcgcauugaaaacuuaaauaagaaagucgacgauggguuccuggacaucuggacuuacaacgccgagcuccuugugcuguuggaaaaugagcgaacccuagauuaucaugacuccaacguaaagaaccuguacgagaaaguuagaaaucaacucaagaacaaugcuaaagaaaucggcaacggauguuuugaguucuaucacaagugcgauaauacauguauggaaucugugaagaacggcaccuacgacuauccuaaauacagcgaggaagccaagcugaauagggagaaaauugaugaggucaaguuagaaucaacucggaucuaucagauucuggcaauauacaguacgguggccuccagcuugguccucgugguuucucugggggcuaucucauuuuggaugugcaguaacggaagccuucagugccguauuuguaucuga

SEQ ID NO: 140487 - RNA, 1701 nt, Artificial Sequence
  derived and/or modified CDS sequence (opt3) from hemagglutinin__InfluenzaA__AIC73810
augaaggccauccuggugguccuccuuuacaccuucgcuacagcaaacgccgacacucugugcauuggcuaucacgcgaauaacagcacggauaccguugacacaguguuggagaaaaauguaacugugacccauuccgucaacuuacuggaagauaagcacaaugggaaacuauguaagcucagaggaguggcuccccugcaucuugguaaaugcaacauagccggcuggauccuggggaauccugagugugaaucuuugucaacagcaaguagcugguccuacauuguugagaccucuucgucagacaacggaacuugcuauccaggcgauuuuaucaauuacgaagaacucagggagcagcugagcaguguguccucuuucgaacgguuugagauuuucccgaagacaagcuccuggcccaaccacgacucaaauaagggugucaccgccgcuuguccucaugcaggggccaaaaguuuuuauaagaaccugaucuggcucgugaaaaagggaaauagcuacccaaaauuaucucaauccuauauaaacgauaagggcaaggaaguacugguucuuuggggcauccaccaccccucaacgacugcugaccagcagagcuuguaccagaaugccgaugcguacguguucgucgggaccagucgcuauucuaaaaaguuuaaaccugagauugcaauccgaccaaaggugcgugaccaagagggaagaaugaacuacuauuggacacugguggaacccggugauaaaauuacuuucgaggccaccggcaaccuagucguuccuagguacgcuuuuacaauggaacggaaugccggguccggaaucauaauuagcgacaccccagugcaugauugcaacacgacuugucagacaccggagggcgcaaucaauaccucgcuccccuuccagaacauucacccuaucacuaucgguaagugcccaaaauauguaaagucuacaaagcugcgccuugcuaccgggcugagaaaugugcccuccauucagucaaggggauuguuuggcgccauagcgggcuucaucgaagggggauggacggguauggucgacggcugguacggguaucaucaccaaaacgagcagggaaguggcuacgccgcagaccucaaaagcacccagaaugcuauugauaagaucacaaacaaaguuaauuccgugauagagaagaugaacacucaguuuaccgccguggguaaagaguucaaucaccuggagaagcggauugaaaacuuaaauaagaaagucgacgauggguuccuggacaucuggacauacaacgcugagcuccuugugcuguuggaaaaugagcgcacucuagauuaucaugacucuaacguaaagaaccuguacgagaaaguucgaaaucaacucaagaacaaugccaaagaaaucggcaacggauguuuugaguucuaucacagaugcgauaauaccuguauggaaagcgugaagaacggcacauacgacuauccuaaguacucagaggaagcaaaacugaauagggagaagauugauggggucaaacuugagaguacccggaucuaucagauucuggccauauacuccacuguggcuagcucuuugguccucgugguuucacugggagcgaucaguuuuuggaugugcagcaacgguuccuuacagugccguauuuguaucuga

SEQ ID NO: 140488 - RNA, 1701 nt, Artificial Sequence
  derived and/or modified CDS sequence (opt3) from hemagglutinin__InfluenzaA__AIC73813
augaaggccauccuggugguccuccuuuacaccuucgcuacagcaaacgccgacacucugugcauuggcuaucacgcgaauaacagcacggauaccguugacacaguguuggagaagaauguaacugugacccauuccgucaacuuacuggaagauaagcacaaugggaaacuauguaagcucagaggaguggcuccccugcaucuugguaaaugcaacauagccggcuggauccuggggaauccugagugugaaucuuugucaacagcaaguagcugguccuacauuguugagaccucuucgucagacaacggaacuugcuauccaggcgauuuuaucaauuacgaagaacucagggagcagcugagcaguguguccucuuucgaacgguuugagauuuucccgaagacaagcuccuggcccaaccacgacucaaauaagggugucaccgccgcuuguccucaugcaggggccaaaaguuuuuauaagaaccugaucuggcucgugaaaaagggaaauagcuacccaaaauuaucucaauccuauauaaacgauaagggcaaggaaguacugguucuuuggggcauccaccaccccucaacgacugcugaccagcagagcuuguaccagaaugccgaugcguacguguucgucgggaccagucgcuauucuaaaaaguuuaaaccugagauugcaauccgaccaaaggugcgugaccaagagggaagaaugaacuacuauuggacacugguggaacccggugauaaaauuacuuucgaggccaccggcaaccuagucguuccuagguacgcuuuuacaauggaacggaaugccggguccggaaucauaauuagcgacaccccagugcaugauugcaacacgacuugucagacaccggagggcgcaaucaauaccucgcuccccuuccagaacauucacccuaucacuaucgguaagugcccaaaauauguaaagucuacaaagcugcgccuugcuaccgggcugagaaaugugcccuccauucagucaaggggauuguuuggcgccauagcgggcuucaucgaagggggauggacggguauggucgacggcugguacggguaucaucaccaaaacgagcagggaaguggcuacgccgcagaccucaaaagcacccagaaugcuauugauaagaucacaaacaaaguuaauuccgugauagagaagaugaacacucaguuuaccgccguggguaaagaguucaaucaccuggagaagcggauugaaaacuuaaauaagaaagucgacgauggguuccuggacaucuggacauacaacgcugagcuccuugugcuguuggaaaaugagcgcacucuagauuaucaugacucuaacguaaagaaccuguacgagaaaguucgaaaucaacucaagaacaaugccaaagaaaucggcaacggauguuuugaguucuaucacaagugcgauaauaccuguauggaaagcgugaagaacggcacauacgacuauccuaaauacucagaggaagcaaagcugaauagagagaaaauugauggggucaaacuugagaguaccaggaucuaucagauucuggccauauacuccacugcugcgagcucuuuggugcucgucaucucacugggagcaauuaguuuuuggaugugcagcaacgguuccuuacagugccggaucuguaucuga

SEQ ID NO: 140489 - RNA, 1701 nt, Artificial Sequence
  derived and/or modified CDS sequence (opt3) from hemagglutinin__InfluenzaA__AIC73815
augaagaccaucauugcccugagcuacauacucugccuuguguucgcucagaaaauccccggcaacgacaauuccacagcaacucuguguuuggggcaccaugccgucccuaacggaacgauuguuaagaccaucacaaaugauagaauugaggugacuaacgcgaccgaauuaguacaaaauucuucaaucggugagauaugcgacaguccacaccagauccuggauggcgaaaacuguacacuaauugacgcucuccugggggauccgcagugcgacggauuucagaauaaaaagugggaucuuuucguggagaggagcaaagccuauuccaacuguuaccccuaugacgucccugauuacgcaucucugcggucguugguggccucaagcggcacccucgaauuuaauaacgagaguuucaauuggacugguguuacacaaaacgggaccuccucugcuugcauccgccgaagcuccucaaguuucuucagccgucugaauuggcugacgcaucucaacuauacuuacccagcauuaaaugugaccaugcccaacaacgagcaguuugacaagcuguauauuuggggaguccaccauccuggcacagauaaggaccagaucuuccuuuacgcccagucuuccggcagaauaacugugucaaccaaaaggagccaacaggcuguaauuccaaauaucgggagucggccccgcauuagagauaucccuucuaggaucuccauuuacuggacaauaguuaagccaggagacaucuugcugauuaacagcaccgguaaucuaaucgccccgcggggcuauuuuaaaauacgcucggggaagucuuccauuaugcgaucagacgcgcccaucggaaaauguaagagugaaugcaucacgccuaacggcagcauuccaaaugauaagcccuuccagaacgugaauagaaucacuuacggugcauguccuagguaugucaaacacuccacacucaagcuggccaccgggaugcggaacgugccagagaaacagacucguggaauuuuuggcgcuauagccggcuucaucgaaaaugggugggagggaaugguggacgguugguacggcuuucgccaccaaaacucugaggggagaggacaggcagcugaucuuaagagcacacaggccgcgauugaccaaaucaauggcaaacugaacagguugaucgguaagaccaaugaaaaauuccaucagauugagaaggaauuuucagaggucgaagggcggauacaggaucucgagaaguauguugaggacacgaaaaucgaucuguggaguuacaacgccgaauuacugguggcacucgagaaucagcacaccauugaccuuacagauuccgaaaugaacaagcuguuugagaaaacuaagaaacaauugcgagaaaacgcugaggacaugggcaauggaugcuucaagaucuaucauaagugugauaacgccugcauuggcagcauccgcaaugggaccuacgaccacaacguauacagagacgaggcucuaaauaacagguuucagauaaaaggaguggaacugaagucugguuauaaagauuggauccucuggauuucauucgccaucaguugcuuucugcuuugugucgcacuguugggcuucauuaugugggccugccagaaggggaauauccgguguaacauaugcauuuga

SEQ ID NO: 140490 - RNA, 1701 nt, Artificial Sequence; identical to SEQ ID NO: 139968
  derived and/or modified CDS sequence (opt3) from hemagglutinin__InfluenzaA__AIC73817

SEQ ID NO: 140491 - RNA, 1701 nt, Artificial Sequence; identical to SEQ ID NO: 138088
  derived and/or modified CDS sequence (opt3) from hemagglutinin__InfluenzaA__AIC73819

SEQ ID NO: 140492 - RNA, 1701 nt, Artificial Sequence
  derived and/or modified CDS sequence (opt3) from hemagglutinin__InfluenzaA__AIC73820
augaagaccaucauugcccugagcuacauacucugccuuguguucgcucagaaaauccccggcaacgacaauuccacagcaacucuguguuuggggcaccaugccgucccuaacggaacgauuguuaagaccaucacaaaugauagaauugaggugacuaacgcgaccgaauuaguacaaaauucuucaaucggugagauaugcgacaguccacaccagauccuggauggcgaaaacuguacacuaauugacgcucuccugggggauccgcagugcgacggauuucagaauaaaaagugggaucuuuucguggagaggagcaaagccuauuccaacuguuaccccuaugacgucccugauuacgcaucucugcggucguugguggccucaagcggcacccucgaauuuaauaacgagaguuucaauuggacugguguuacacaaaacgggaccuccucugcuugcauccgccgaagcuccucaaguuucuucagccgucugaauuggcugacgcaucucaacuauacuuacccagcauuaaaugugaccaugcccaacaacgagcaguuugacaagcuguauauuuggggaguccaccauccuggcacagauaaggaccagaucuuccuuuacgcccagucuuccggcagaauaacugugucaaccaaaaggagccaacaggcuguaauuccaaauaucgggagucggccccgcauuagagauaucccuucuaggaucuccauuuacuggacaauaguuaagccaggagacaucuugcugauuaacagcaccgguaaucuaaucgccccgcggggcuauuuuaaaauacgcucggggaagucuuccauuaugcgaucagacgcgcccaucggaaaauguaagagugaaugcaucacgccuaacggcagcauuccaaaugauaagcccuuccagaacgugaauagaaucacuuacggugcauguccuagguaugucaaacacuccacacucaagcuggccaccgggaugcggaacgugccagagaaacagacucguggaauuuuuggcgcuauagccggcuucaucgaaaaugggugggagggaaugguggacgguugguacggcuuucgccaccaaaacucugaggggagaggacaggcagcugaucuuaagagcacacaggccgcgauugaccaaaucaauggcaaacugaacagguugaucgguaagaccaaugaaaaauuccaucagauugagaaggaauuuucagaggucgaagggcggauacaggaucucgagaaguauaucgaggacacgaaaauugaucuguggaguuacaacgccgaauuacugguugcacucgagaaucagcacaccaucgaccuuacagauuccgaaaugaacaagcuguuugagaaaacuaagaaacaauugcgagaaaacgcugaggacaugggcaauggaugcuucaagauuuaucauaagugugauaacgccugcaucggcagcauacgcaaugggaccuacgaccacaacguguacagagacgaggcucuaaauaacagguuucagaucaaaggaguagaacugaagucugguuauaaagauuggauucucuggaucucauucgccauuaguugcuuucugcuuuguguggcacuguugggcuucaucaugugggccugccagaaggggaauauacgguguaacauuugcaucuga

SEQ ID NO: 140493 - RNA, 1701 nt, Artificial Sequence; identical to SEQ ID NO: 138088
  derived and/or modified CDS sequence (opt3) from hemagglutinin__InfluenzaA__AIC73821

SEQ ID NO: 140494 - RNA, 1701 nt, Artificial Sequence; identical to SEQ ID NO: 140452
  derived and/or modified CDS sequence (opt3) from hemagglutinin__InfluenzaA__AIC73824

SEQ ID NO: 140495 - RNA, 1701 nt, Artificial Sequence; identical to SEQ ID NO: 138088
  derived and/or modified CDS sequence (opt3) from hemagglutinin__InfluenzaA__AIC73825

SEQ ID NO: 140496 - RNA, 1701 nt, Artificial Sequence
  derived and/or modified CDS sequence (opt3) from hemagglutinin__InfluenzaA__AIC73827
augaaggccauccuggugguccuccuuuacaccuucgcuacagcaaacgccgacacucugugcauuggcuaucacgcgaauaacagcacggauaccguugacacaguguuggagaagaauguaacugugacccauuccgucaacuuacuggaagauaagcacaaugggaaacuauguaagcucagaggaguggcuccccugcaucuugguaaaugcaacauagccggcuggauccuggggaauccugagugugaaccauugucuacagcaucaaguuggagcuacauuguugagaccuccucuucggacaacggaacuugcuauccgggcgauuuuaucaauuacgaagaacucagggagcagcugucaagcgugaguuccuucgaacgguuugagauuuuccccaagacaucuagcuggccuaaccacgacuccaauaagggugucaccgccgcuuguccacaugcaggggccaaaucauuuuauaagaaccugaucuggcucgugaaaaagggaaauaguuaccccaaauuaagccaaucuuauauaaacgauaagggcaaggaaguacugguucuuuggggcauccaccacccuuccacgacugcugaccagcagucauuguaccagaaugccgaugcguacguguucgucgggaccagccgcuauaguaaaaaguuuaaaccagagauugcaauccgacccaaggugcgugaccaagagggaagaaugaacuacuauuggacacugguggaaccuggugauaaaauuacuuucgaggccaccggcaaccuagucguuccaagguacgcuuuuacaauggaacggaaugccgggucuggaaucauaauuuccgacaccccggugcaugauugcaacacgacuugucagacacccgagggcgcaaucaauaccagccucccuuuccagaacauucacccaaucacuaucgguaagugccccaaauauguaaagucgacaaagcugcgccuugcuaccgggcugagaaaugugccuucuauucaguccaggggauuguuuggcgccauagcgggcuucaucgaagggggauggacggguauggucgacggcugguacggguaucaucaccaaaacgagcagggaucaggcuacgccgcagaccucaaaaguacccagaaugcuauugauaagaucacaaacaaagugaauagcguuauagagaagaugaacacucaguuuaccgccguggguaaagaguucaaucaccuggagaagcggauugaaaacuuaaauaagaaagucgacgauggguuccuggacaucuggacauacaacgcugagcuccuugugcuguuggaaaaugagcgcacucuagauuaucaugacuccaacguaaagaaccuguacgagaaaguucgaaaucaacucaagaacaaugccaaagaaaucggcaacggauguuuugaguucuaucacaagugcgauaauaccuguauggaaucugugaagaacggcacauacgacuauccaaaauacagcgaggaagcaaagcugaauagagagaaaauugauggggucaaacuugagucaaccaggaucuaucagauucuggccauauacaguacuguggcuuccagcuugauccucgucgugucucugggagcgauuucauuuuggaugugcaguaacgguagcuuacagugccggaucuguaucuga

SEQ ID NO: 140497 - RNA, 1701 nt, Artificial Sequence
  derived and/or modified CDS sequence (opt3) from hemagglutinin__InfluenzaA__AIC73828
augaaggccauccuggugguccuccuuuacaccuucgcuacagcaaacgccgacacucugugcauuggcuaucacgcgaauaacagcacggauaccguugacacaguguuggagaagaauguaacugugacccauuccgucaacuuacuggaagauaagcacaaugggaaacuauguaagcucagaggaguggcuccccugcaucuugguaaaugcaacauagccggcuggauccuggggaauccugagugugaaucuuugucaacagcaaguagcugguccuacauuguugagaccucuucgucagacaacggaacuugcuauccaggcgauuuuaucaauuacgaagaacucagggagcagcugagcaguguguccucuuucgaacgguuugagauuuucccgaagacaagcuccuggcccaaccacgacucaaauaagggugucaccgccgcuuguccucaugcaggggccaaaaguuuuuauaagaaccugaucuggcucgugaaaaagggaaauagcuacccaaaauuaucucaauccuauauaaacgauaagggcaaggaaguacugguucuuuggggcauccaccaccccucaacgacugcugaccagcagagcuuguaccagaaugccgaugcguacguguucgucgggaccagucgcuauucuaaaaaguuuaaaccugagauugcaauccgaccaaaggugcgugaccaagagggaagaaugaacuacuauuggacacugguggaacccggugauaaaauuacuuucgaggccaccggcaaccuagucguuccuagguacgcuuuuacaauggaacggaaugccggguccggaaucauaauuagcgacaccccagugcaugauugcaacacgacuugucagacaccggagggcgcaaucaauaccucgcuccccuuccagaacauucacccuaucacuaucgguaagugcccaaaauauguaaagucuacaaagcugcgccuugcuaccgggcugagaaaugugcccuccauucagucaaggggauuguuuggcgccauagcgggcuucaucgaagggggauggacggguauggucgacggcugguacggguaucaucaccaaaacgagcagggaaguggcuacgccgcagaccucaaaagcacccagaaugcuauugauaagaucacaaacaaaguuaauuccgugauagagaagaugaacacucaguuuaccgccguggguaaagaguucaaucaccuggagaagcggauugaaaacuuaaauaagaaagucgacgauggguuccuggacaucuggacauacaacgcugagcuccuugugcuguuggaaaaugagcgcacucuagauuaucaugacucuaacguaaagaaccuguacgagaaaguucgaaaucaacucaagaccaacgccaaagaaaucggcaauggauguuuugaguucuaucacaagugcgauaacacauguauggaaagcgugaagaauggcaccuacgacuauccuaaauacucagaggaagcaaagcugaacagagagaaaauugauggggucaaacuugagaguacuaggaucuaucagauucuggccauauacuccacggcugcgagcucuuuggugcucgucgugucacugggagcaaucaguuuuuggaugugcagcaaugguuccuuacagugccggauuuguaucuga

SEQ ID NO: 140498 - RNA, 1701 nt, Artificial Sequence
  derived and/or modified CDS sequence (opt3) from hemagglutinin__InfluenzaA__AIC73830
augaaggccauccuggugguccuccuuuacaccuucgcuacagcaaacgccgacacucugugcauuggcuaucacgcgaauaacagcacggauaccguugacacaguguuggagaaaaauguaacugugacccauuccgucaacuuacuggaagauaagcacaaugggaaacuauguaagcucaaaggaguggcuccccugcaucuugguaagugcaacauagccggcuggauccuggggaauccugagugugaaucuuugucaacagcaaguagcugguccuacauuguugagaccucuucgucagacaacggaacuugcuauccaggcgauuuuaucaauuacgaagaacucagagagcagcugagcaguguguccucuuucgaaagguuugagauuuucccgaagacaagcuccuggcccaaccacgacucaaauaaaggugucaccgccgcuuguccucaugcaggggccaagaguuuuuauaaaaaccugaucuggcucgugaagaaaggaaauagcuacccaaaguuaucucaauccuauauaaacgauaagggcaaagaaguacugguucuuuggggcauccaccaccccucaacgacugcugaccagcagagcuuguaccagaaugccgaugcguacguguucgucgggaccagucgguauucuaagaaauuuaagccugagauugcaauccgcccaaaagugcgagaccaagagggacguaugaacuacuauuggacacugguggaacccggugauaagauuacuuucgaggccaccggcaaccuagucguuccuagauacgcuuuuacaauggaaaggaaugccggguccggaaucauaauuagcgacaccccagugcaugauugcaacacgacuugucagacaccggagggcgcaaucaauaccucgcuccccuuccagaacauucacccuaucacuaucgguaaaugcccaaaguauguaaagucuacaaaacugcggcuugcuaccgggcugcgcaaugugcccuccauucagucaagaggauuguuuggcgccauagcgggcuucaucgaagggggauggacggguauggucgacggcugguacggguaucaucaccaaaacgagcagggaaguggcuacgccgcagaccucaagagcacccagaaugcuauugauaaaaucacaaacaagguaaauuccguuauagagaaaaugaacacucaguuuaccgccguggguaaggaguucaaucaccuggagaagaggauugaaaacuuaaauaaaaaggucgacgauggguuccuggacaucuggacauacaacgcugagcuccuugugcuguuggaaaaugagcggacucuagauuaucaugacucuaacgugaaaaaccuguacgagaagguucgcaaucaacucaaaaacaaugccaaggaaaucggcaacggauguuuugaguucuaucacaagugcgauaauaccuguauggaaagcgugaaaaacggcacauacgacuauccuaaguacucagaggaagcaaaacugaaucgagagaagauugauggggucaaacuugagaguaccagaaucuaucagauucuggccauauacuccacuguggcuagcucuuugguccucgugguuucacugggagcgaucaguuuuuggaugugcagcaacgguuccuuacagugcaggauuuguaucuga

SEQ ID NO: 140499 - RNA, 1701 nt, Artificial Sequence
  derived and/or modified CDS sequence (opt3) from hemagglutinin__InfluenzaA__AIC73833
augaaggccauccuggugguccuccuuuacaccuucgcuacagcaaacgccgacacucugugcauuggcuaucacgcgaauaacagcacggauaccguugacacaguguuggagaagaauguaacugugacccauuccgucaacuuacuggaagauaagcacaaugggaaacuauguaagcucagaggaguggcuccccugcaucuugguaaaugcaacauagccggcuggauccuggggaauccugagugugaaucuuugucaacagcaaguagcugguccuacauuguugagaccucuucgucagacaacggaacuugcuauccaggcgauuuuaucaauuacgaagaacucagggagcagcugagcaguguguccucuuucgaacgguuugagauuuucccgaagacaagcuccuggcccaaccacgacucaaauaagggugucaccgccgcuuguccucaugcaggggccaaaaguuuuuauaagaaccugaucuggcucgugaaaaagggaaauagcuacccaaaauuaucucaauccuauauaaacgauaagggcaaggaaguacugguucuuuggggcauccaccaccccucaacgacugcugaccagcagagcuuguaccagaaugccgaugcguacguguucgucgggaccagucgcuauucuaaaaaguuuaaaccugagauugcaauccgaccaaaggugcgugaccaagagggaagaaugaacuacuauuggacacugguggaacccggugauaaaauuacuuucgaggccaccggcaaccuagucguuccuagguacgcuuuuacaauggaacggaaugccggguccggaaucauaauuagcgacaccccagugcaugauugcaacacgacuugucagacaccggagggcgcaaucaauaccucgcuccccuuccagaacauucacccuaucacuaucgguaagugcccaaaauauguaaagucuacaaagcugcgccuugcuaccgggcugagaaaugugcccuccauucagucaaggggauuguuuggcgccauagcgggcuucaucgaagggggauggacggguauggucgacggcugguacggguaucaucaccaaaacgagcagggaaguggcuacgccgcagaccucaaaagcacccagaaugcuauugauaagaucacaaacaaaguuaauuccgugauagagaagaugaacacucaguuuaccgccguggguaaagaguucaaucaccuggagaagcggauugaaaacuuaaauaagaaagucgacgauggguuccuggacaucuggacauacaacgcugagcuccuugugcuguuggaaaaugagcgcacucuagauuaucaugacucuaacguaaagaaccuguacgagaaaguucgaaaucaacucaagaacaaugccaaagaaaucggcaacggauguuuugaguucuaucacaagugcgauaauaccuguauggaaagcgugaagaacggcacauacgacuauccuaaauacucagaggaagcaaagcugaauagagagaaaauugauggggucaaacuugagaguaccaggaucuaucagauucuggccauauacuccacugcugcgagcucuuuggugcucgucgugucacugggagcaaucaguuuuuggaugugcagcaacgguuccuuacagugccggauuuguaucuga

SEQ ID NO: 140500 - RNA, 1701 nt, Artificial Sequence
  derived and/or modified CDS sequence (opt3) from hemagglutinin__InfluenzaA__AIC73834
augaaggccauccuggugguccuccuuuacaccuucgcuacagcaaacgccgacacucugugcauuggcuaucacgcgaauaacagcacggauaccguugacacaguguuggagaagaauguaacugugacccauuccgucaacuuacuggaagauaagcacaaugggaaacuauguaagcucagaggaguggcuccccugcaucuugguaaaugcaacauagccggcuggauccuggggaauccugagugugaaucuuugucaacagcaaguagcugguccuacauuguugagaccucuucgucagacaacggaacuugcuauccaggcgauuuuaucaauuacgaagaacucagggagcagcugagcaguguguccucuuucgaacgguuugagauuuucccgaagacaagcuccuggcccaaccacgacucaaauaagggugucaccgccgcuuguccucaugauggggcaaaaaguuuuuauaagaaccugaucuggcucgugaaaaagggaaauagcuacccaaaauuaucucaauccuauauaaacgacaagggcaaggaaguacugguucuuuggggcauccaccaccccucaacgacugccgggcagcagagcuuguaccagaaugcugaugccuacguguucgucggaaccagucgcuauucuaaaaaguuuaaaccugagauugcgauccgaccaaaggugcgugaccaagaggguagaaugaacuacuauuggacacugguggaacccggcgauaaaauuacuuucgaggcaaccgggaaccuagucguuccuagguacgccuuuacaauggaacggaaugcuggauccggcaucauaauuagcgacaccccagugcaugauugcaacacgacuugucagacaccggagggugccaucaauaccucgcuccccuuccagaacauucacccuaucacuaucgggaagugcccaaaauauguaaagucuacaaagcugcgccuugcaaccggacugagaaaugugcccuccauucagucaaggggcuuguuuggcgcuauagccggguucaucgaaggagguuggacgggcauggucgacgggugguacggauaucaucaccaaaacgagcagggcagugguuacgcggccgaccucaaaagcacccagaaugcaauugauaagaucacaaacaaaguuaauuccgugauagagaagaugaacacucaguuuaccgcuguggggaaagaguucaaucaccuggagaagcggauugaaaacuuaaauaagaaagucgacgauggcuuccuggacaucuggacauacaacgccgagcuccuugugcuguuggaaaaugagcgcacucuagauuaucaugacucuaacguaaagaaccuguacgagaaaguucgaaaucaacucaagaacaaugcuaaagaaaucggaaacggcuguuuugaguucuaucacaagugcgauaauaccuguauggaaagcgugaagaacgggacauacgacuauccuaaauacucagaggaagccaagcugaauagagagaaaauugauggagucaaacuugagaguaccaggaucuaucagauucuggcaauauacuccacuguggccagcucuuugguccucgugguuucacugggugcuaucaguuuuuggaugugcagcaacggcuccuuacagugccggauuuguaucuga

SEQ ID NO: 140501 - RNA, 1701 nt, Artificial Sequence
  derived and/or modified CDS sequence (opt3) from hemagglutinin__InfluenzaA__AIC73835
augaaggccauccuggugguccuccuuuacaccuucgcuacagcaaacgccgacacucugugcauuggcuaucacgcgaauaacagcacggauaccguugacacaguguuggagaagaauguaacugugacccauuccgucaacuuacuggaagauaagcacaaugggaaacuauguaagcucagaggaguggcuccccugcaucuugguaaaugcaacauagccggcuggauccuggggaauccugagugugaaucuuugucaacagcaaguagcugguccuacauuguugagaccucuucgucagacaacggaacuugcuauccaggcgauuuuaucaauuacgaagaacucagggagcagcugagcaguguguccucuuucgaacgguuugagauuuucccgaagacaagcuccuggcccaaccacgacucaaauaagggugucaccgccgcuuguccucaugcaggggccaaaaguuuuuauaagaaccugaucuggcucgugaaaaagggaaauagcuacccaaaauuaucucaauccuauauaaacgauaagggcaaggaaguacugguucuuuggggcauccaccaccccucaacgacugcugaccagcagagcuuguaccagaaugccgaugcguacguguucgucgggaccagucgcuauucuaaaaaguuuaaaccugagauugcaauccgaccaaaggugcgugaccaagagggaagaaugaacuacuauuggacacugauugaacccggugauaaaaucacuuucgaggccaccggcaaccuaguggucccuagguacgcuuuuacaauggaacggaaugccggguccggaauaauuaucagcgacaccccaguucaugauugcaacacgacuugucagacaccggagggcgcaauuaauaccucgcuccccuuccagaacauccacccuaucacuauugguaagugcccaaaauaugugaagucuacaaagcugcgccuugcuaccgggcugagaaauguacccuccauacagucaaggggauuguuuggcgccaucgcgggcuucauugaagggggauggacggguaugguggacggcugguacggguaucaucaccaaaacgagcagggaaguggcuacgccgcagaccucaaaagcacccagaaugcuaucgauaagauaacaaacaaagucaauuccgugauugagaagaugaacacucaguuuaccgccguugguaaagaguucaaucaccuggagaagcggaucgaaaacuuaaauaagaaaguggacgauggguuccuggacaucuggacauacaacgcugagcuccuuguccuguuggaaaaugagcgcacucuagauuaucaugacucuaacgugaagaaccuguacgagaaaguacgaaaucaacucaagaacaaugccaaagaaauuggcaacggauguuuugaguucuaucacaagugcgauaauaccuguauggaaagcguuaagaacggcacauacgacuauccuaaauacucagaggaagcaaagcugaauagagagaaaaucgauggggugaaacuugagaguaccaggauuuaucagauacuggccaucuacuccacugucgcuagcucuuuggugcucgucgugucacugggagcgauuaguuuauggaugugcagcaacgguucccugcagugccggaucuguaucuga

SEQ ID NO: 140502 - RNA, 1701 nt, Artificial Sequence; identical to SEQ ID NO: 140444
  derived and/or modified CDS sequence (opt3) from hemagglutinin__InfluenzaA__AIC73836

SEQ ID NO: 140503 - RNA, 1701 nt, Artificial Sequence
  derived and/or modified CDS sequence (opt3) from hemagglutinin__InfluenzaA__AIC73837
augaagaccaucauugcccugagcuacauacucugccuuguguucgcucagaaacugcccggcaacgacaauuccacagcaacuuuguguuuagggcaccaugccgucccuaacggaacgaucguuaagaccauuacaaaugauagaaucgaggugacuaacgcgaccgaacugguacaaaauucuucaauuggugagaucugcgacaguccacaccagauacuagauggcgaaaacuguacacucaucgacgcucugcuuggggauccgcagugcgacggauuucagaauaaaaagugggaucuguucguggagaggagcaaagccuauuccaacuguuaccccuaugacgucccugauuacgcaucuuugcggucgcucguggccucaagcggcacccuggaauuuaauaacgagaguuucaauugggcugguguuacucaaaacgggacauccucugcaugcauucgcggaagcaauuccucauuuuucagucgacugaacuggcucacccauuuaaauuuuaaguauccagcccugaacgugacgaugcccaacaaugagcaguucgacaaguuguacaucuggggcguccaccauccuggcacugauaaagaccagauuuuucuuuaugcucagagcucugggcguaucaccguguccacaaagagaucacaacaggccguaauaccaaacauuggaagcaggccccggauccgcaauauuccuaguagaaucucuaucuacuggacuauuguuaaaccaggugauauacugcuaaucaacuccaccggcaaucucauugcgccgaggggguacuucaagauccggagcggaaaaucgucuauaaugcgcuccgacgcacccauuggcaaguguaagucagaaugcaucacaccuaacgguaguaucccaaaugacaaacccuuucagaacgugaaucgaauuaccuauggggccuguccuagauacgucaagcagagcacgcugaaacuugcuacuggaaugaggaacgugccagagaagcaaacacggggcaucuucggcgccauugcaggguuuauagaaaauggaugggaggguaugaaagauggcugguauggguuccgucaccagaacuccgagggacgcggccaggcugccgaccugaagucuacccaagcggccaucgaucagauuaaugguaaauugaacagacucaucgggaagacuaaugaaaaguuccaccagaucgagaaagaauuuagcgagguggaaggcaggauucaggaccuggagaaguacgucgaggauacaaaaauagacuuauggucauauaacgcagaacugcucguugcucuugagaaccaacauaccaucgaucugacggacagugaaaugaauaaguuguucgagaaaaccaagaagcagcuacgggaaaacgccgaggauaugggaaauggcugcuuuaaaauuuaccacaagugugacaacgcuugcaucggguccauucgaaauggaacauaugaucaugacguguaccgcgacgaggcccugaacaauagauuccagaucaaagguguagaacucaagagcggcuacaaagauuggauacuguggaucucuuuugcaauuucaugcuuccuucuguguguggccuugcucggguuuaucaugugggcuugccagaagggaaacauuagguguaauaucugcauauga

SEQ ID NO: 140504 - RNA, 1701 nt, Artificial Sequence
  derived and/or modified CDS sequence (opt3) from hemagglutinin__InfluenzaA__AIC73838
augaagaccaucauugcccugagcuacauacucugccuuguguucgcucagaaacugcccggcaacgacaauuccacagcaacuuuguguuuagggcaccaugccgucccuaacggaacgaucguuaagaccauuacaaaugauagaaucgaggugacuaacgcgaccgaacugguacaaaauucuucaauuggugagaucugcaacaguccacaccagauacuagacggcgaaaauuguacacucaucgaugcucugcuuggggacccgcagugcgauggauuucagaacaaaaagugggaccuguucguggagaggagcaaagccuauuccaauuguuaccccuaugaugucccugacuacgcaucuuugcggucgcucguggccucaagcggcacccuggaauuuaacaaugagaguuucaacugggcugguguuacucaaaaugggacauccucugcaugcauucgcggaagcaacuccucauuuuucagucgacugaauuggcucacccauagcaacuuuaaguauccagccuuaaacgugacgaugcccaauaacgagcaguucgauaagcuguacaucuggggcguccaccauccuggcacugacaaagaucagauuuuucuuuaugcucagucuuccgggcguaucaccgugucaacaaagagaagccaacaggccguaauaccaaauauuggaaguaggccccggauccgcaacauuccuucuagaaucuccaucuacuggacuauuguuaaaccaggugacauauugcugaucaauagcaccggcaaccuaauugcgccgaggggguacuucaagauccggucgggaaaaucuuccauaaugcgcucagaugcacccauuggcaaguguaagagugaaugcaucacaccuaaugguagcaucccaaacgacaaacccuuucagaaugugaaccgaauuaccuauggggccuguccuagauacgucaagcaguccacgcucaaacuggcuacuggaaugaggaaugugccagagaagcaaacacggggcaucuucggcgccauugcaggguuuauagaaaacggaugggaggguaugauggacggcugguauggguuccgucaccaaaauucugagggacgcggccaggcugccgaucuuaaaagcacccaggcggccaucgaccagauuaacgguaagcugaauagauugaucgggaaaacuaacgaaaaguuccaccagaucgagaaggaauuuucagagguggaaggcaggauucaggaucucgagaaauacgucgaggacacaaagauagaucuguggaguuauaacgcagaauuacugguugcucucgagaaucaacauaccaucgaccuuacggauuccgaaaugaacaaacuguucgagaagaccaaaaagcaguugcgggaaaaugccgaggaccuaggaaacggcugcuuuaagauuuaccacaaaugugauaaugcuugcaucgggagcauucgaaacggaacauaugaccaugauguguaccgcgacgaggcccugaauaacagauuccagaucaaggguguagaacucaaaucuggcuacaaggacuggauacuguggaucucauuugcaauuaguugcuuccuucuguguguggccuugcucggguuuaucaugugggcuugccagaaaggaaauauuagguguaacaucugcauauga

SEQ ID NO: 140505 - RNA, 1701 nt, Artificial Sequence
  derived and/or modified CDS sequence (opt3) from hemagglutinin__InfluenzaA__AIC73839
augaaggccauccuggugguccuccuuuacaccuucgcuacagcaaacgccgacacucugugcauuggcuaucacgcgaauaacagcacggauaccguugacacaguguuggagaagaauguaacugugacccauuccgucaacuuacuggaagauaagcacaaugggaaacuauguaagcucagaggaguggcuccccugcaucuugguaaaugcaacauagccggcuggauccuggggaauccugagugugaaucuuugucaacagcaaguagcugguccuacauuguugagaccucuucgucagacaacggaacuugcuauccaggcgauuuuaucaauuacgaagaacucagggagcagcugagcaguguguccucuuucgaacgguuugagauuuucccgaagacaagcuccuggcccgaccacgauucaaacaagggugucaccgccgcuuguccucaugcaggggccaaaaguuuuuauaagaaucugaucuggcucgugaaaaagggaaacagcuacccaaaauuaucucaauccuauauaaaugacaagggcaaggaaguacugguucuuuggggcauccaccaccccucaacgacugcugaucagcagagcuuguaccagaacgccgacgcguacguguucgucgggaccagucgcuauucuaaaaaguuuaaaccugagauugcaauccgaccaaaggugcgugaucaagagggaagaaugaauuacuauuggacacugguggaacccggugacaaaauuacuuucgaggccaccggcaaccuagucguuccuagguacgcuuuuacaauggaacggaacgccggguccggaaucauaauuagcgauaccccagugcaugacugcaauacgacuugucagacaccggagggcgcaaucaacaccucgcuccccuuccagaauauucacccuaucacuaucgguaagugcccaaaauauguaaagucuacaaagcugcgccuugcuaccgggcugagaaacgugcccuccauucagucaaggggauuguuuggcgccauagcgggcuucaucgaagggggauggacggguauggucgacggcugguacggguaucaucaccaaaaugagcagggaaguggcuacgccgcagaucucaaaagcacccagaacgcuauugacaagaucacaaauaaagugaacuccguuauagagaagaugaauacucaguuuaccgccguggguaaagaguucaaccaccuggagaagcggauugaaaauuuaaacaagaaagucgaugacggguuccuggauaucuggacauacaaugcugagcuccuugugcuguuggaaaacgagcgcacucuagacuaucaugauucuaauguaaagaaccuguacgagaaaguucgaaaccaacucaagaauaacgccaaagaaaccggcaauggauguuuugaguucuaucacaagugcgacaacacauguauggaaagcgugaagaauggcaccuacgauuauccuaaauacucagaggaagcaaagcugaacagagagaaaaucgacggggucaaacuugagaguacuaggauuuaucagauccuggccauuuacuccacgguggcuagcucuuugguccucgugguuucacugggagcgauaaguuuuuggaugugcagcaaugguuccuuacagugccggaucuguauuuga

SEQ ID NO: 140506 - RNA, 1701 nt, Artificial Sequence; identical to SEQ ID NO: 138088
  derived and/or modified CDS sequence (opt3) from hemagglutinin__InfluenzaA__AIC73840

SEQ ID NO: 140507 - RNA, 1701 nt, Artificial Sequence
  derived and/or modified CDS sequence (opt3) from hemagglutinin__InfluenzaA__AIC73841
augaaggccauccuggugguccuccuuuacaccuucgcuacagcaaacgccgacacucugugcauuggcuaucacgcgaauaacagcacggauaccguugacacaguguuggagaagaauguaacugugacccauuccgucaacuuacuggaagauaagcacaaugggaaacuauguaagcucagaggaguggcuccccugcaucuugguaaaugcaacauagccggcuggauccuggggaauccugagugugaaucuuugucaacagcaaguagcugguccuacauuguugagaccucuucgucagacaacggaacuugcuauccaggcgauuuuaucaauuacgaagaacucagggagcagcugagcaguguguccucuuucgaacgguuugagauuuucccgaagacaagcuccuggcccaaccacgacucaaauaagggugucaccgccgcuuguccucaugcaggggccaaaaguuuuuauaagaaccugaucuggcucgugaaaaagggaaauagcuacccaaaauuaucucaauccuauauaaacgauaagggcaaggaaguacugguucuuuggggcauccaccaccccucaacgauugcugaccagcagagcuuguaccagaaugccgaugcguacguguucgucgggaccagucgcuauucuaaaaaguuuaaaccugagaucgcaauucgaccaaaggugcgugaccaagagggaagaaugaacuacuauuggacucugguggaacccggugauaaaaucacauucgaggccacuggcaaccuagucguuccuagguacgcuuuuaccauggaacggaaugccggguccggaauaauuaucagcgacacaccagugcaugauugcaacaccacgugucagacuccggagggcgcaauuaauacaucgcuccccuuccagaacauccacccuaucaccauugguaagugcccaaaauauguaaagucuacuaagcugcgccuugcuacagggcugagaaauauacccuccauccagucaaggggauuguuuggcgccauugcgggcuucaucgaagggggauggaccgguaugguggacggcugguacggguaucaucaccaaaacgagcagggaaguggcuacgccgcagaccucaaaagcacgcagaaugcuauagauaagauuaccaacaaagucaauuccgugaucgagaagaugaacacacaguuuacugccguugguaaagaguucaaucaccuggagaagcggaucgaaaacuuaaauaagaaaguggacgauggguuccuggacauuuggaccuacaacgcugagcuccuuguccuguuggaaaaugagcgcacacuagauuaucaugacucuaacgugaagaaccuguacgagaaaguacgaaaucaacucaagaacaaugccaaagaaaucggcaacggauguuuugaguucuaucacaagugcgauaauacuuguauggaaagcguuaagaacggcaccuacgacuauccuaaauacucagaggaagcaaagcugaauagagagaaaauugauggggugaaacuugagaguacaaggauauaucagauccuggccauuuacuccaccgucgcuagcucuuuggugcucgucgugucacugggagcgaucaguuuuuggaugugcagcaacgguuccuuacagugccggaucuguauuuga

SEQ ID NO: 140508 - RNA, 1701 nt, Artificial Sequence; identical to SEQ ID NO: 140503
  derived and/or modified CDS sequence (opt3) from hemagglutinin__InfluenzaA__AIC73842

SEQ ID NO: 140509 - RNA, 1707 nt, Artificial Sequence
  derived and/or modified CDS sequence (opt3) from hemagglutinin__InfluenzaA__AID48082
auggagaagaucgugcuccuguucgccauugucagccuuguuaaauccgaccagauaugcaucggcuaccacgcuaacaauucuaccgaacaaguggauacaauuauggagaagaacguaacugugacgcaugcacaggacauccuggaaaagacccacaaugggaaguugugugauuuagacggagucaaaccccugauucuaagagauugcucaguggccgguuggcuccugggcaacccuaugugugacgaguuuaucaauguuccagaauggaguuauauaguggagaaggcgaacccggucaaugaucuuugcuaccccggggacuucaacgauuaugaggaacugaagcauuugcucagcaggaucaaucacuuugagaaaauucagaucauuccuaaguccucuuggucgucacaugaagcuagccugggagugaguuccgccuguccauaccagggcaaaucuagcuucuuucggaacguaguuuggcugaucaagaaaaauuccacauaucccacuauaaagcgcucauacaacaauaccaaccaagaggaccucuuagugcugugggguauucaccacccuaaugaugcagccgagcagacaaaacuuuaucagaacccaaccacuuacaucagugucgggacaagcaccuugaaccagcgacuggugccccguauugcuacgagaucuaaagugaauggacaauccggcaggauggaguucuuuuggacuauccuaaagccuaacgacgcaaucaauuucgaaucaaacggcaauuuuauugccccagaauacgcuuauaaaauagucaagaaaggggauagcaccaucaugaagagugagcucgaauacggaaacugcaauacaaaaugucagacuccgaugggugccauuaacucuuccaugcccuuccauaauauccacccucugaccauaggcgagugcccaaaguauguuaagagcaaccggcuugugcuggcgacaggguugcgcaauucgccccagagagagaggcggcgcaaaaagcgaggacucuuuggcgcaauugccgguuucaucgaagggggauggcagggcaugguagacggcugguacggguaucaucacucuaacgagcaaggauccgguuacgcugccgacaaagaaucaacccagaaggcaaucgauggcgugacgaauaaagucaacaguauuaucgacaagaugaauacucaguuugaggcuguggggagagaguucaaccaccuggaaaggcggauugagaacuuaaauaagaaaauggaagauggauuccuggacguuuggacauauaacgccgagcuccuugugcugauggaaaaugagcguaccuuggauuuucaugacagcaacgucaagaaucuauacgauaaagugcgccugcaacucagagacaacgcgaaggaacugggcaaugguuguuucgaguuuuaccacaaaugcgaugacgaguguauggaauccguaaggaacgggacuuaugauuacccucaguauucugaggaagcccggcuuaagcgagaggagauaagcggcguuaagcuggaaucaaucggaauuuaccagaucuugaguaucuauuccacaguggcaagcucucucgcucuggccauuauggucgcuggcuuaucacuguggaugugcaguaaugggagccuacagugccgcauauguaucuga

SEQ ID NO: 140510 - RNA, 1701 nt, Artificial Sequence
  derived and/or modified CDS sequence (opt3) from hemagglutinin__InfluenzaA__AID70444
augaaggccgugcuggucguucuccuuuacaccuucgcuacagcaaacgccgacacucugugcaucggcuaucacgcgaauaacagcacggauaccguggacacaguauuggagaaaaaugugacugucacccauuccgugaacuuacuggaagauaagcacaaugggaaacuauguaagcucagaggaguugcuccccugcaucuugguaaaugcaacauugccggcuggauacuggggaauccugagugugaaucuuuggcaacagccucaaguuggagcuacaucguggagaccuccaacucugacaauggaacuugcuauccaggcgauuuuauugacuacgaagaacucagggagcagcugucgucagucagcaguuucgaacgguuugagaucuucccgaagacauccucuuggcccaaccacgauagcaauaagggugugaccgcugcauguccucaugccggggcuaaauccuuuuauaagaaccugauuuggcucguuaaaaagggaaauucauacccaaaauuaaguaagagcuauaucaacgacaagggccgcgaaguacuggugcuuuggggcauacaccaccccucuacguccgccgaucaacagucauuguaccagaaugcggacacuuacgucuucguggggaccagccgauauaguaaaaaguuuaaaccugagaucgcaauucguccaaaggugagagaucaggagggaaggaugaacuacuauuggacacuggucgaacccggugacaaaaucacuuucgaggccaccggcaaccuaguugugccucgguacgcuuuugccauggaacgcaaugcagggucuggaauuaucauauccgauacaccaguacaugacugcaacaccacgugucaaacuccgaagggcgcuauuaauacaagccuccccuuccagaacauccacccuauuaccaucgguaaaugcccaaaguaugugaagucgacuaaacugagacuugccacagggcugaggaauguccccucuauccagucccggggauuguuuggcgcgauugccggcuucauagaagggggauggaccgguaugguggacggcugguacggguaucaucaccagaacgaacaaggaucaggcuacgcagcugaucucaagaguacgcagaaugccaucgacgagauuaccaacaaaguuaauagcgugaucgagaagaugaacacacaguuuacugcugucgguaaagaguucaaucaccuggagaagcgcauagaaaacuuaaauaagaaaguggaugacggguuccuggauauuuggaccuacaacgccgagcuccuuguaguucuggaaaaugagcgaacauuggaguaucaugacuccaacgugaagaaccuauacgaaaaagucagaucucaggugaagaauaacgcaaaagagaucggcaauggauguuuugaguucuaucacaagugcgauaacacuuguauggagagcgucaagaauggcaccuacgacuauccuaaauacucagaagaggccaagcugaacagggaggaaaucgauggggugaaacucgagaguacacggauuuaucaaauccuggcuauuuacuccaccguugcgagcucucuugugcugguagucucauugggagcaauaaguuuuuggaugugcuucaaugguagccuccagugccguaucuacauuuga

SEQ ID NO: 140511 - RNA, 1701 nt, Artificial Sequence
  derived and/or modified CDS sequence (opt3) from hemagglutinin__InfluenzaA__AID70445
augaaggccauccuggugguccuccuuuacaccuucgcuacagcaaacgccgacacucugugcauuggcuaucacgcgaauaacagcacggauaccguugacacaguguuggagaaaaauguaacugugacccauuccgucaacuuacuggaagauaagcacaaugggaaacuauguaagcucagaggaguggcuccccugcaucuugguaaaugcaacauagccggcuggauccuggggaauccugagugugaaucuuugucaacagcaaguagcugguccuacauuguugagaccucuucgucagacaacggaacuugcuauccaggcgauuuuaucgacuacgaggagcucagggagcagcugagcaguguguccucuuucgaacgguuugagauuuucccgaagacaagcuccuggcccaaucacgauucaaacaagggugucaccgccgcuuguccucaugcaggggccaaaaguuuuuauaagaaucugaucuggcucgugaaaaagggaaacagcuacccaaaauuaucuaaguccuauauaaaugacaagggcaaagaaguacugguucuuuggggcauccaccaccccucaacgacugcugaucaacagagcuuguaccagaacgccgacaccuacguguucgucgggacaagucgcuauucuaagaaauuuaagccugagauugcgauccgaccaaaagugcgugaucaggagggaagaaugaauuacuauuggacucugguggaacccggugacaagauuaccuucgaggcaacaggcaaccuagucguuccuagguacgccuuugcuauggaacggaacgccggguccggaaucauaauuagcgauaccccagugcaugacugcaauacgacuugucaaacaccgaaaggcgcaaucaacaccucgcuccccuuccagaauauucacccuaucacuaucgguaagugcccaaaguauguaaaaucuacaaagcugcgccuugcuaccgggcugagaaacgugcccuccauucagucaaggggauuguuuggcgccauagcgggcuucaucgaagggggauggacggguauggucgacggcugguacggguaucaucaccagaaugaacaaggaaguggcuacgccgcagaucucaaaagcacccagaacgcuauugacaagaucacaaauaaagugaacuccguuauagagaagaugaauacucaguuuaccgccguggguaaggaguucaaccaccuggaaaaacggauugagaauuuaaacaagaaagucgaugacggguuccuggauaucuggacauacaaugcugaacuccuugugguacuggagaacgaacgcacuuuggaguaucaugacucuaauguuaagaaccuauacgagaaagugcgaaaccagcugaagaauaacgccaaggaaaucggcaauggauguuuugaguucuaucacaaaugcgauaacaccuguauggaaagcgucaagaauggcauuuacgacuauccuaaauacucagaggaagcaaagcucaacagagaggagaucgauggggugaaacuggaaaguacaaggauuuaucaaauacuugccaucuacuccaccgucgcuagcucucuggugcagguugugucauugggagcgauuaguuuuuggaugugcuucaaugguagccuccagugccggaucuguaucuga

SEQ ID NO: 140512 - RNA, 1701 nt, Artificial Sequence
  derived and/or modified CDS sequence (opt3) from hemagglutinin__InfluenzaA__AID70446
augaaggccgugcuggucguucuccuuuacaccuucgcuacagcaaacgccgacacucugugcaucggcuaucacgcgaauaacagcacggauaccguggacacaguauuggagaaaaaugugacugucacccauuccgugaacuuacuggaagauaagcacaaugggaaacuauguaagcucagaggaguugcuccccugcaucuugguaaaugcaacauugccggcuggauacuggggaauccugagugugaaucuuugucaacagcaaguagcugguccuacaucguggagaccucuucgucagacaacggaacuugcuauccaggcgauuuuauugacuacgaggaacucagggagcagcugagcagugucuccucuuucgaacgguuugagaucuucccgaagacaagcuccuggcccaaucacgauucaaacaagggugugaccgccgcuuguccucaugcaggggccaaaaguuuuuauaagaaucugauuuggcucguuaaaaagggaaacagcuacccaaaauuaucuaaguccuauaucaaugacaagggcaaagaaauacugguacuuuggggcauccaccaccccucaacgacugcugaucaacagagcuuguaccagaacgccgacaccuacguguucgucgggacaagucgcuauucuaagaaauuuaagccugagauugcgauccgaccaaaagugcgugaucaggagggaagaaugaauuacuauuggacucugguggaacccggugacaagauuaccuucgaggcaacaggcaaccuagucguuccuagguacgccuuugcuauggaacggaacgccggguccggaaucauaauuagcggcaccccagugcaugauugcaauacgacuugucaaacaccgaaaggugcaaucaacaccucgcuccccuuccagaauauucacccuaucacuaucgggaagugcccaaaguauguaaaaucuacaaagcugcgccuugcuaccggacugagaaacgugcccuccauucagucaaggggcuuguuuggcgccauagcgggguucaucgagggagguuggacgggcauggucgacgggugguacggauaucaucaccagaaugaacaaggcagugguuacgccgcagaccucaaaagcacccagaacgcuauugauaagaucacaaauaaagugaacuccguuauagagaagaugaauacucaguuuaccgccguggggaaggaguucaaccaccuggaaaaacggauugagaauuuaaacaagaaagucgacgauggcuuccuggacaucuggacauacaaugcugaacuccuugugguacuggagaacgaacgcacuuuggaguaucaugauucuaauguuaagaaccuauacgagaaagugcgaaaccagcugaagaauaacgccaaggaaaucggaaauggcuguuuugaguucuaucacaaaugcgacaacaccuguauggaaagcgucaagaaugggauuuacgauuauccuaaauacucagaggaagcaaagcucaacagagaggagaucgacggagugaaacuggaaaguacaaggauuuaucaaauacuugccaucuacuccaccgucgcuagcucucuggugcagguugugucauugggugcgauuaguuuuuggaugugcuucaauggcagccuccagugccggaucuguaucuga

SEQ ID NO: 140513 - RNA, 1701 nt, Artificial Sequence
  derived and/or modified CDS sequence (opt3) from hemagglutinin__InfluenzaA__AID70447
augaaggccauccuggugguccuccuuuacaccuucgcuacagcaaacgccgacacucugugcauuggcuaucacgcgaauaacagcacggauaccguugacacaguguuggagaaaaauguaacugugacccauuccgucaacuuacuggaagauaagcacaaugggaaacuauguaagcucagaggaguggcuccccugcaucuugguaaaugcaacauagccggcuggauccuggggaauccugagugugaaucuuugucaacagcaaguagcugguccuacauuguugagaccucuucgucagacaacggaacuugcuauccaggcgauuuuaucgacuacgaggaacucagggagcagcugagcaguguguccucuuucgaacgguuugagauuuucccgaagacaagcuccuggcccaaucacgauucaaacaagggugucaccgccgcuuguccucaagcaggggccaaaggauuuuauaagaaucugcucugguuagugaaaaagggcaacaguuacccaaaacugagcaagucuuauaucaaugacaagggcaaagaaguacuuguuuugugggggauacaucaccccuccacgacugcugaucagcagucacuguaccagaacgccgacaccuacguguucgucggaacaagccgcuauaguaagaaauuuaagccugagaucgcgauucgaccaaaagugcgugaucaagaggguagaaugaauuacuauuggacucuaguggaacccggcgacaagaucaccuucgaggcaacagggaaccucgucguuccuagguacgccuuugcuauggaacggaacgccggaucuggcauuaucauauccgauaccccagugcacgacugcaauacgacuugucagacaccgaaaggugcaauuaacaccagccugcccuuccagaauauccauccuauuacuaucgggaagugcccaaaguauguaaaaucgacaaaacuucgccuggcuaccggauugagaaacgugcccucuauccaguccaggggccucuuuggcgccauugcgggguucauagagggagguuggacgggcauggucgacgggugguacggauaucaccaucaaaaugaacagggcucagguuacgccgcagaucugaagaguacccagaacgcuaucgacaagauuacaaauaaagugaacagcguuaucgagaagaugaauacucaguuuaccuccguggggaaggaguucaaccacuuagaaaaacggauggagaaucugaacaagaaagucgaugacggcuuccucgauauauggacauacaaugccgaacuucuggugguauuggagaacgaacgcacucuagaguaucacgacucuaauguuaagaaccuguacgagaaagugcgaaaccaacucaagaauaacgcuaaggaaauuggaaauggcuguuuugaguucuaucauaaaugcgauaacaccuguauggaaagcgucaagaaugggaucuacgacuauccuaaauacucagaggaagccaagcugaacagagaggagaucgauggagugaaacuugaaaguacaaggauuuaucagauccuggcaauuuacuccaccgucgccagcucuuuggugcucguugugucacugggugcuauaaguuuuuggaugugcuucaauggcagcuuacagugccggaucuguauuuga

SEQ ID NO: 140514 - RNA, 1701 nt, Artificial Sequence
  derived and/or modified CDS sequence (opt3) from hemagglutinin__InfluenzaA__AID70448
augaaggccauccuggugguccuccuuuacaccuucgcuacagcaaacgccgacacucugugcauuggcuaucacgcgaauaacagcacggauaccguugacacaguguuggagaagaauguaacugugacccauuccgucaacuuacuggaagauaagcacaaugggaaacuauguaagcucagaggaguggcuccccugcaucuugguaaaugcaacauagccggcuggauccuggggaauccugagugugaaucuuugucaacagcaaguagcugguccuacauuguugagaccucuucgucagacaacggaacuugcuauccaggcgauuuuaucgacuacgaggaacucagggagcagcugagcaguguguccucuuucgaacgguuugagauuuucccgaagacaagcuccuggcccaaucacgauucaaacaagggugucaccgccgcuuguccucaugcaggggccaaaggauuuuauaagaaucugaucuggcucgugaaaaagggcaacaguuacccaaaauuaagcaagucuuauauaaaugacaagggcaaagaaguacugguucuuugggggauccaccaccccuccacgacugcugaucaacagucauuguaccagaacgccgacaccuacguguucgucggaacaagccgcuauaguaagaaauuuaagccugagauugcgauccgaccaaaagugcgugaucaggaggguagaaugaauuacuauuggacucugguggaacccggcgacaagauuaccuucgaggcaacagggaaccuagucguuccuagguacgccuuuaccauggaacgggaugcuggaucuggcaucauaauuuccgacacgccagugcaugacugcaacacuacaugucaaaccccgaaaggugccaucaauacuagccuccccuuccagaacauucacccuaucacaaucgggaagugcccaaaguauguaaaaucgaccaagcugcgccuugcaacgggacugagaaaugugcccucuauucaguccaggggcuuguuuggcgcuauagccggguucaucgagggagguuggaccggcauggucgaugggugguacggauaucaucaccagaacgaacaaggcucagguuacgcggccgaccucaaaaguacacagaaugcaauugauaagaucacuaacaaagugaauagcguuauagagaagaugaacacccaguuuacagcuguggggaaggaguucaaucaccuggaaaaacggauugagaacuuaaauaagaaagucgacgauggcuuccuggacaucuggacuuacaacgccgaacuccuugugguacuggagaaugaacgcaccuuggaguaucaggauuccaacguuaagaaucuauacgagaaagugcgaaaccaacugaagaacaaugcuaaggaaaucggaaacggcugucucgaguuuuaucauaaauucgacaauacaugcauggaaucugucaagaacgggaccuacgauuauccuaaauacagcgaggaagccaagcugaauagagagaaaauugacggagugaaacuugagucaacuaggaucuaucagauucuggcaauauacaguacggucgccuccagcuuggugcucguugugucucuggguacaaucucauuuuggauguguuucaacggcaguuuacagugccggauuugcaucuga

SEQ ID NO: 140515 - RNA, 1701 nt, Artificial Sequence
  derived and/or modified CDS sequence (opt3) from hemagglutinin__InfluenzaA__AID70449
augaaggccauccuggugguccuccuuuacaccuucgcuacagcaaacgccgacacucugugcauuggcuaucacgcgaauaacagcacggauaccguugacacaguguuggagaaaaauguaacugugacccauuccgucaacuuacuggaagauaagcacaaugggaaacuauguaagcucagaggaguggcuccccugcaucuugguaaaugcaacauagccggcuggauccuggggaauccugagugugaaucuuugucaacagcaaguagcugguccuacauuguugagaccucuucgucagacaacggaacuugcuauccaggcgauuuuaucgacuacgaggagcucagggagcagcugagcaguguguccucuuucgaacgguuugagauuuucccgaagacaagcuccuggcccaaucacgauucaaacaagggugucaccgccgcuuguccucaugcaggggccaaaaguuuuuauaagaaucugaucuggcucgugaaaaagggaaacagcuacccaaaauuaucuaaguccuauauaaaugacaagggcaaagaaguacugguucuuuggggcauccaccaccccucaacgacugcugaucaacagagcuuguaccagaacgccgacaccuacguguucgucgggacaagucgcuauucuaagaaauuuaagccugagauugcgauccgaccaaaagugcgugaucaggagggaagaaugaauuacuauuggacucugguggaacccggugacaagauuaccuucgaggcaacaggcaaccuagucguuccuagguacgccuuugcuauggaacggaacgccggguccggaaucauaauuagcgauaccccagugcaugacugcaauacgacuugucaaacaccgaaaggcgcaaucaacaccucgcuccccuuccagaauauucacccuaucacuaucgguaagugcccaaaguauguaaaaucuacaaagcugcgccuugcuaccgggcugagaaacgugcccuccauucagucaaggggauuguuuggcgccauagcgggcuucaucgaagggggauggacggguauggucgacggcugguacggguaucaucaccagaaugaacaaggaaguggcuacgccgcagaucucaaaagcacccagaacgcuauugacaagaucacaaauaaagugaacuccguuauagagaagaugaauacucaguuuaccgccguggguaaggaguucaaccaccuggaaaaacggauugagaauuuaaacaagaaagucgaugacggguuccuggauaucuggacauacaaugcugaacuccuugugguacuggagaacgaacgcacuuuggaguaucaugacucuaauguuaagaaccuauacgagaaagugcgaaaccagcugaagaauaacgccaaggaaaucggcaauggauguuuugaguucuaucacaaaugcgauaacaccuguauggaaagcgucaagaauggcacauacgacuauccuaaauacucagaggaagcaaagcucaacagagaggagauugauggggugaaacuggaaaguaccaggaucuaucaaauucuugccauauacuccacugucgcuagcucucugguguugguugugucacucggagcgaucaguuuuuggaugugcuucaaugguagccugcagugccggauuuguguauga

SEQ ID NO: 140516 - RNA, 1701 nt, Artificial Sequence
  derived and/or modified CDS sequence (opt3) from hemagglutinin__InfluenzaA__AID70450
augaaggccauccuggugguccuccuuuacaccuucgcuacagcaaacgccgacacucugugcauuggcuaucacgcgaauaacagcacggauaccguugacacaguguuggagaaaaauguaacugugacccauuccgucaacuuacuggaagauaagcacaaugggaaacuauguaagcucagaggaguggcuccccugcaucuugguaaaugcaacauagccggcuggauccuggggaauccugagugugaaucuuugucaacagcaaguagcugguccuacauuguugagaccucuucgucagacaacggaacuugcuauccaggcgauuuuaucgacuacgaggaacucagggagcagcugagcaguguguccucuuucgaacgguuugagauuuucccgaagacaagcuccuggcccaaucacgauucaaacaagggugucaccgccgcuuguccucaugcaggggccaaaggauuuuauaagaaucugaucuggcucgugaaaaagggcaacaguuacccaaaauuaagcaagucuuauauaaaugacaagggcaaagaaguacugguucuuugggggauccaccaccccuccacgacugcugaucaacagucauuguaccagaacgccgacaccuacguguucgucggaacaagccgcuauaguaagaaauuuaagccugagauugcgauccgaccaaaagugcgugaucaggaggguagaaugaauuacuauuggacucugguggaacccggcgacaagauuaccuucgaggcaacagggaaccuagucguuccuagguacgccuuugcuauggaacgggaugccggaucuggcaucauaauuuccgacaccccagugcaugacugcaacacgacuugucaaacaagcaaaggugcaaucaauaccucgcucccguuccagaacauucaccccaucacuaucgggaagugcccuaaguauguaaaaucuacaaagcugcgccuugcuaccggacugagaaaugugccauccauucagucaaggggcuuguuuggcgccauagcgggguucaucgagggagguuggacgggcauggucgaugggugguacggauaucaucaccagaacgaacaaggcagugguuacgccgcagaccucaaaagcacccagaaugcuauugauaagaucacaaacaaaguuaauuccgugauagagaagaugaacacucaguuuaccgccguggggaaggaguucaaucaccuggaaaaacggauugagaacuuaaauaagaaagucgacgauggcuuccuggacaucuggacauacaacgcugaacuccuugugguacuggagaaugaacgcacuuuggaguaucaugauucuaacguuaagaaucuauacgagaaagugcgaaaccagcugaagaacaaugccaaggaaaucggaaacggcuguuuugaguucuaucacaaauuugacaauaccugcauggaaagcgucaagaacgggacauacgauuaucccaaauacucagaggaagcaaagcucaauagagagaaaauugacggagugaagcuggagaguaccaggaucuaucaaauucuugccauauacuccacugucgcuagcucucuggugcagguugugucauugggugcgaucaguuucuggauguguuuuaacggcagccuccagugccggauuugcaucuga

SEQ ID NO: 140517 - RNA, 1701 nt, Artificial Sequence
  derived and/or modified CDS sequence (opt3) from hemagglutinin__InfluenzaA__AID70451
augaaggccauccugguggucaugcucuacaccuucgcuacagcaaacgccgacacucuuugcauuggcuaucacgcgaauaacagcacggauaccguugacacagugcuggagaaaaauguaacugugacccauuccgucaacuuguuagaagauaagcacaaugggaaacuguguaagcuaagaggaguggcuccccuccaucuggguaaaugcaacauagccggcuggauccuugggaauccugagugugaaucucugucaacagcaaguagcugguccuacauuguugagaccucuucgucagacaacggaacuugcuauccaggcgauuuuaucgacuacgaagaguugagggagcagcucagcaguguguccucuuucgaacgguuugagauuuucccgaagacaagcuccuggcccaaucacgauucaaacaagggugucaccgccgcuuguccucaugcaggggccaaaggauuuuauaagaaucugaucuggcuggugaaaaagggcaacaguuacccaaaacucagcaagucuuauauaaaugacaagggcaaagaaguauuaguucugugggggauccaccaccccuccacgacugcugaucaacagucacuuuaccagaacgccgacaccuacguguucgucggaacaagccgcuauaguaagaaauuuaagccugagauugcgauccgaccaaaagugcgugaucaggaggguagaaugaauuacuauuggacuuugguggaacccggcgacaagauuaccuucgaggcaacagggaaccuggucguuccuagguacgccuuugcuauggaacggaacgccggaucuggcaucauaauuuccgauaccccagugcaugacugcaauacgacuugucaaacaccgaaaggugcaaucaacaccagccuacccuuccagaauauucacccuaucacuaucgggaagugcccaaaguauguaaaaucgacaaagcuccgccuggcuaccggacuuagaaacgugcccucuauucaguccaggggccuguuuggcgccauagcgggguucaucgagggagguuggacgggcauggucgacgggugguacggauaucaucaccagaaugaacaaggcucagguuacgccgcagauuugaaaaguacccagaacgcuauugacaagaucacaaauaaagugaacagcguuauagagaagaugaauacucaguuuaccgccguggggaaggaguucaaccaccucgaaaaacggauugagaaucugaacaagaaagucgaugacggcuucuuagauaucuggacauacaaugcugaacugcucgugguacuugagaacgaacgcacucuggaguaucaugacuccaauguuaagaacuuguacgagaaagugcgaaaccagcuaaagaauaacgccaaggaaaucggaaauggcuguuuugaguucuaucacaaauuugauaauaccugcauggaaucugucaagaacgggacauacgacuauccuaaauacagcgaggaagcaaagcugaacagagaggagauugauggagugaaacucgaaucaaccaggaucuaucaaauucuggccauauacaguacugucgcuuccagccuugugcugguugugucuuugggugcgaucucauucuggauguguuuuaauggcagucuccagugccggauuugcaucuga

SEQ ID NO: 140518 - RNA, 1701 nt, Artificial Sequence
  derived and/or modified CDS sequence (opt3) from hemagglutinin__InfluenzaA__AID70452
augaaggccauccuggugguccuccuuuacaccuucgcuacagcaaacgccgacacucugugcauuggcuaucacgcgaauaacagcacggauaccguugacacaguguuggagaaaaauguaacugugacccauuccgucaacuuacuggaagauaagcacaaugggaaacuauguaagcucagaggaguggcuccccugcaucuugguaaaugcaacauagccggcuggauccuggggaauccugagugugaaucuuugucaacagcaaguagcugguccuacauuguugagaccucuucgucagacaacggaacuugcuauccaggcgauuuuaucgacuacgaagaacucagggagcagcuggguagcgugaguuccuucaagcgguuugaaauuuucccgaagacaucuagcuggcccaaucacgauuccaacaaaggggucaccgccgcuuguccucaugcaggagccaagggcuuuuauaaaaaucugaucuggcucgugaagaaaggcaacucauacccaaaguuaaguaagagcuauauaaaugacaaagggaaggagguacugguucuuuggggaauccaccaccccucuacgacugcugaucaacaguccuuguaccagaacgccgacaccuacguguucgucgguacaucacgcuauagcaaaaaguuuaaaccugaaauugcgauccgaccaaaggugcgugaucaggagggcagaaugaauuacuauuggacucugguggagcccggggacaaaauuaccuucgaagcaacaggaaaccuagucguuccuagguacgccuuugcuauggagcgggaugccggcagugguaucauaauuucugacaccccagugcaugacugcaacacgacuugucaaacaccgaagggggcaaucaauaccucccuccccuuccagaacauucacccuaucacuaucggaaagugcccaaaauauguaaagagcacaaaacugcgccuugcuaccggccugagaaaugugcccucgauucagucuaggggcuuguuuggggccauagcgggauucaucgaagguggcuggacggggauggucgauggaugguacggcuaucaucaccagaacgagcaagguuccggguacgccgcagaccucaagucaacccagaaugcuauugauaaaaucacaaacaaggugaauaguguuauagaaaagaugaacacucaguuuaccgccgugggcaaagaguucaaucaccuggagaagcggauugaaaacuuaaauaaaaaggucgacgauggauuccuggacaucuggacauacaacgcugagcuccuugugguacuggaaaaugagcgcacuuuggaauaucaugauagcaacguuaaaaaucuauacgagaaggugcgaaaccagcugaagaacaaugccaaagagaucggcaacggguguuuugaguucuaucacaagugcgacaauaccuguauggaguccgucaaaaacggaauuuacgauuauccuaaguacucugaagaggcaaaacucaauagagaaaagaucgacggugugaagcuggagagcacaaggauuuaucaaauacuugccaucuacucaaccgucgcuaguucccugguguugguugugagccucggcgcgauuucuuuuuggaugcgguucaacgggucacugcagugcaguaucugcaucuga

SEQ ID NO: 140519 - RNA, 1701 nt, Artificial Sequence
  derived and/or modified CDS sequence (opt3) from hemagglutinin__InfluenzaA__AID70453
augaaggccauccuggugguccuccuuuacaccuucgcuacagcaaacgccgacacucugugcauuggcuaucacgcgaauaacagcacggauaccguugacacaguguuggagaaaaauguaacugugacccauuccgucaacuuacuggaagauaagcacaaugggaaacuauguaagcucagaggaguggcuccccugcaucuugguaaaugcaacauagccggcuggauccuggggaauccugagugugaaucuuugucaacagcaaguagcugguccuacauuguugagaccucuucgucagacaacggaacuugcuauccaggcgauuuuaucgacuacgaggaacucagggagcagcugagcaguguguccucuuucgaacgguuugagauuuucccgaagacaagcuccuggcccaaucacgauucaaacaagggugucaccgccgcuuguccucaugcaggggccaaaggauuuuauaagaaucugaucuggcucgugaaaaagggcaacaguuacccaaaauuaagcaagucuuauauaaaugacaagggcaaagaaguacugguucuuugggggauccaccaccccuccacgacugcugaucaacagucauuguaccagaacgccgacaccuacguguucgucggaacaagccgcuauaguaagaaauuuaagccugagauugcgauccgaccaaaagugcgugaucaggaggguagaaugaauuacuauuggacucugguggaacccggcgacaagauuaccuucgaggcaacagggaaccuagucguuccuagguacgccuuugcuauggaacgggaugccggaucuggcaucauaauuuccgacaccccagugcaagacugcaacacgacuugucagacaccgaaaggugcaaucaauaccagccuccccuuccagaacauucauccuaucacuaucgggaagugcccaaaguauguaaaaucgacaaagcugcgccuugugaccggacugagaaauguccccucuauucaguccaggggcuuguuuggcgcuauagccggguucaucgagggagguuggacgggcaugguggaugggugguacggauaucaccaucaaaacgaacagggcucagguuacgcggccgaccucaaaaguacccagaaugcaauugauaagaucacaaacaaaguuaauagcgugauagagaagaugaacacucaguuuaccgcugucgggaaggaguucaaucaccuggaaaaacggauugagaacuuaaauaagaaaguggacgauggcuuccuggacaucuggacauacaacgccgaacuccuuguaguucuggagaaugaacgcacuuuggaguaucacgauuccaaccuaaagaaucuguacgagaaagugcgaaaccaacucaagaacaaugcuaaggaaaucggaaacggcuguuuugaguucuaucauaaauuugacaauaccugcauggaaucugucaagaacgggacauacgauuauccuaaauacagcgaggaagccaagcugaauagagaggagauugacggagugaaacuugaaucaaccaggaucuaucagauucuggcaauauacaguacugucgccuccagcuuggugcagguugugucucucggugcuaucucauucuggaugcgguuuaacggcagucugcacugucguauuugcaucuga

SEQ ID NO: 140520 - RNA, 1701 nt, Artificial Sequence
  derived and/or modified CDS sequence (opt3) from hemagglutinin__InfluenzaA__AID70454
augaaggccauccuggugguccuccuuuacaccuucgcuacagcaaacgccgacacucugugcauuggcuaucacgcgaauaacagcacggauaccguugacacaguguuggagaaaaauguaacugugacccauuccgucaacuuacuggaagauaagcacaaugggaaacuauguaagcucagaggaguggcuccccugcaucuugguaaaugcaacauagccggcuggauccuggggaauccugagugugaaucuuugucaacagcaaguagcugguccuacauuguugagaccucuucgucagacaacggaacuugcuauccaggcgauuuuaucaauuacgaggagcucagggagcagcugagcaguguguccucuuucgaacgguuugagauuuucccgaagacaagcuccuggcccaaccacgacucaaauaagggugucaccgccgcuuguccucaugcaggggccaaaaguuuuuauaagaaccugaucuggcucgugaaaaagggaaauagcuacccaaaauuaucuaaguccuauauaaacgauaagggcaaagaaguacugguucuuuggggcauccaccaccccucaacgacugcugaccaacagagcuuguaccagaaugccgaugcguacguguucgucgggaccagucgcuauucuaagaaauuuaagccugagauugcaauccgaccaaaagugcgugaccaggagggaagaaugaacuacuauuggacacugguggaacccggugauaagauuacuuucgaggccaccggcaaccuagucguuccuagguacgcuuuugccauggaacggaaugcaggguccggaaucauaauuagcgacacaccagugcaugauugcaacaccacgugucaaacuccgaaaggcgcuaucaauacaucgcuccccuuccagaacauucacccuaucaccaucgguaagugcccaaaguauguaaaaucuacuaagaugcgccuggccacagggcuuagaaaugugcccuguauucaguccaggggacuguuuggcgcgauagccggcuucaucgaagggggauggaccgguauggucgacggcugguacggguaucaucaccagaacgaacaaggaucaggcuacgcagcugacuugaaaaguacgcagaaugccauugauaagaucaccaacaaagugaauagcguuauagagaagaugaacacacaguuuacugcuguggguaaggaguucaaucaccucgaaaaacggauugagaaccugaauaagaaagucgacgauggguucuuagacaucuggaccuacaacgccgaacugcucgugguacuugagaaugaacgcacacuggauuaucaugacuccaacguuaagaacuuguacgagaaagugcgaaaucagcuaaagaacaaugcaaaggagaucggcaacggaugcuuugaguucuaucacaaaugugauaauacuugcauggaaucugucaagaacggcaccuacgacuauccuaaauacagcgaagaggccaagcugaauagagaagagauugauggggugaaacucgagucaacaaggaucuaucaaauucuggcuauauacaguaccgucgcguccagccuugugcugguugugucuuugggagcaaucucauuuuggaugugcaguaacgguagccuccagugucggauuugcaucuga

SEQ ID NO: 140521 - RNA, 1701 nt, Artificial Sequence
  derived and/or modified CDS sequence (opt3) from hemagglutinin__InfluenzaA__AID70455
augaaggccauccuggugguccuccuuuacaccuucgcuacagcaaacgccgacacucugugcauuggcuaucacgcgaauaacagcacggauaccguugacacaguguuggagaaaaauguaacugugacccauuccgucaacuuacuggaagauaagcacaaugggaaacuauguaagcucggagguguggcuccccugcaucuuggcaaaugcaacauagccggguggauccugggaaauccugagugugaaucuuugucaacagcaaguagcugguccuacauuguugagaccucuucgucagacaacggcacuugcuauccaggugauuuuaucgacuacgaagaacucagagagcagcugagcaguguguccucuuucgaaagguuugagauuuucccgaagacaagcuccuggcccaaucacgauucaaacaagggggucaccgccgcuuguccucaugcaggagccaaaggcuuuuauaagaaucugaucuggcucgugaaaaagggcaacaguuacccaaaaauaagcaagucuuauaucaaugacaaggggaaagaaguauuaguucugugggguauucaccaccccuccacgacugcugaucaacagucacuuuaccagaacgccgacaccuacaucuucgugggaacaagccgguauaguaagaaauuuaagccugagauugcgauccgcccaaaaguccgagaucaggagggccguaugaauuacuauuggacuuugguggaacccggggacaagauaaccuucgaggcaacaggaaaccugguggucccuagauacgccuuugcuauggaaagggaugccggcucugguauuaucauuuccgacaccccaguucaugacugcaacacgacuugucaaacaccgaaaggggcaaucaauaccagccuacccuuccagaacauccacccuauuacuauaggaaagugcccaaaguaugugaaaucgacaaagcuccggcuggcuaccggccuucgcaauguacccucuauccaguccagaggccuguuuggggccauugcgggauucaucgaggguggcuggacggggaugguggauggaugguacggcuaucaucaccagaacgaacaagguucaggguacgccgcagacuugaaaaguacccagaaugcuauagauaagauuacaaacaaagucaauagcgugaucaagaagaugaacacucaguuuaccgccguuggcaaagaguucaaucaccucgagaagaggaucgaaaaccugaauaaaaagguggacgauggauucuuagacauuuggacauacaacgcugagcugcucgucgugcuugaaaaugagcggacucuggaauaucaugauuccaacguuaaaaauuuguacgagaagguacgcaaccagcuaaagaacaaugccaaagagaucggcaacggguguuuugaguucuaucacaaguuugacaauaccugcauggagucugugaaaaacggaacauacgauuauccuaaguacagcgaagaggcaaaacugaaucgagaagagauugacggugucaagcucgagucaaccagaauauaucaaauccuggccauuuacaguacuguggcuuccagccuuguccuggugguuucuuugggcgcgaucucauucuggauguguuuuaacgggagucuccagugcaggaucugcauuuga

SEQ ID NO: 140522 - RNA, 1701 nt, Artificial Sequence
  derived and/or modified CDS sequence (opt3) from hemagglutinin__InfluenzaA__AID70456
augaaggccauccuggugguccuccuuuacaccuucgcuacagcaaacgccgacacucugugcauuggcuaucacgcgaauaacagcacggauaccguugacacaguguuggagaaaaauguaacugugacccauuccgucaacuuacuggaagauaagcacaaugggaaacuauguaagcucagaggaguggcuccccugcaucuugguaaaugcaacauagccggcuggauccuggggaauccugagugugaaucuuugucaacagcaaguagcugguccuacauuguugagaccucuucgucagacaacggaacuugcuauccaggcgauuuuaucgacuacgaggagcucagggagcagcugagcaguguguccucuuucgaacgguuugagauuuucccgaagacaagcuccuggcccaaucacgauucaaacaagggugucaccgccgcuuguccucaugcaggggccaaaaguuuuuauaagaaucugaucuggcucgugaaaaagggaaacagcuacccaaaauuaucuaaguccuauauaaaugacaagggcaaagaaguacugguucuuuggggcauccaccaccccucaacgacugcugaucaacagagcuuguaccagaacgccgacaccuacguguucgucgggacaagucgcuauucuaagaaauuuaagccugagauugcgauccgaccaaaagugcgugaucaggagggaagaaugaauuacuauuggacucugguggaacccggugacaagauuaccuucgaggcaacaggcaaccuagucguuccuagguacgccuuugcuauggaacggaacgccggguccggaaucauaauuagcgauaccccagugcaugacugcaauacgacuugucaaacaccgaaaggcgcaaucaacaccucgcuccccuuccagaauauucacccuaucacuaucgguaagugcccaaaguauguaaaaucuacaaagcugcgccuugcuaccgggcugagaaacgugcccuccauucagucaaggggauuguuuggcgccauagcgggcuucaucgaagggggauggacggguauggucgacggcugguacggguaucaucaccagaaugaacaaggaaguggcuacgccgcagaucucaaaagcacccagaacgcuauugacaagaucacaaauaaagugaacuccguuauagagaagaugaauacucaguuuaccgccguggucaaggaguucaaccaccuggaaaaacggauugagaauuuaaacaagaaaguggaugacgguuuccuggauaucuggacauacaaugcugaacuccuuguaguucuggagaacgaacgcacuuuggaguaucaugacucuaaucuaaagaaccuguacgagaaagugcgaaaccagcucaagaauaacgccaaggaaaucgggaauggcuguuuugaguucuaucacaaauuugauaauaccugcauggaaagcgucaagaacggaacauacgacuauccuaaauacucagaggaagcaaagcugaacagagaggagauugauggcgugaaacuugaaaguaccaggaucuaucaaauucuggccauauacuccacugucgcuagcucuuuggugcagguugugucacucggggcgaucaguuucuggauguguuuuaauggaagccugcagugccggauuugcaucuga

SEQ ID NO: 140523 - RNA, 1701 nt, Artificial Sequence
  derived and/or modified CDS sequence (opt3) from hemagglutinin__InfluenzaA__AID70457
augaaggccauccuggugguccuccuuuacaccuucgcuacagcaaacgccgacacucugugcauuggcuaucacgcgaauaacagcacggauaccguugacacaguguuggagaaaaauguaacugugacccauuccgucaacuuacuggaagauaagcacaaugggaaacuauguaagcucagaggaguggcuccccugcaucuugguaaaugcaacauagccggcuggauccuggggaauccugagugugaaucuuugucaacagcaaguagcugguccuacauuguugagaccucuucgucagacaacggaacuugcuauccaggcgauuuuaucgacuacgaggaacucagggagcagcugagcaguguguccucuuucgaacgguuugagauuuucccgaagacaagcuccuggcccaaucacgauucaaacaagggugucaccgccgcuuguccucaugcaggggccaaaggauuuuauaagaaucugaucuggcucgugaaaaagggcaacaguuacccaaaauuaagcaagucuuauauaaaugacaagggcaaagaaguacugguucuuugggggauccaccaccccuccacgacugcugaucaacagucauuguaccagaacgccgacaccuacguguucgucggaacaagccgcuauaguaagaaauuuaagccugagauugcgauccgaccaaaagugcgugaucaggaggguagaaugaauuacuauuggacucugguggaacccggcgacaagauuaccuucgaggcaacagggaaccuagucguuccuagguacgccuuugcuauggaacgggaugccggaucuggcaucauaauuuccgacaccccagugcaugacugcaacacgacuugucaaacaccgaaaggugcaaucaauaccagccuccccuuccagaacauucacccuaucacuaucgggaagugcccaaaguauguaaaaucgacaaagcugcgccuugcuaccggacugagaaaugugcccucuauucaguccaggggcuuguuuggcgccauagcgggguucaucgagggagguuggacgggcauggucgaugggugguacggauaucaucaccagaacgaacaaggcucagguuacgccgcagaccucaaaaguacccagaaugcuauugauaagaucacaaacaaagugaauagcguuauagagaagaugaacacucaguuuaccgccguggggaaggaguucaaucaccuggaaaaacggauugagaacuuaaauaagaaagucgacgauggcuuccuggacaucuggacauacaacgcugaacuccuugugguacuggagaaugaacgcacuuuggaguaucaugauuccaacguuaagaaucuauacgagaaagugcgaaaccagcugaagaacaaugccaaggaaaucggaaacggcuguuuugaguucuaucacaaauuugacaauaccugcauggaaucugucaagaacgggacauacgauuauccuaaauacagcgaggaagcaaagcucaauagagagaaaauugacggagugaagcuggagucaaccaggaucuaucaaauucuugccauauacaguacugucgcuuccagccuggugcagguugugucuuugggugcgaucucauucuggaaguguuuuaacggcagucuccagugccggauuugcagcuga

SEQ ID NO: 140524 - RNA, 1701 nt, Artificial Sequence
  derived and/or modified CDS sequence (opt3) from hemagglutinin__InfluenzaA__AID70458
augaagaccaucauugcccugagcuacauacucugccuuguguucgcucagaaauuucccggcaacgacaauuccauggcaacacuguguuuggggcaccaugccgucccuaacggaacuaugguuaagacgaucaccaaugaucaaauugaggugacaaacgcgacugaauuaguacagucuucaaguaccgguggcaucugcaauagcccacaccagauucuggacgggggaaacuguacacuaaucgaugcucuccugggcgacccgcagugcgaugguuuccaaaauaaaaagugggaccuuuuuguggagagauccaaagccuauucuaacuguuaccccuaugaugucccugacuacgcaucgcugaggucaauaguggccagcagugggaccuuggaguucaauaacgaauccuuuaauuggacuggaguuacacagaacggcaagucugcuagcugcaagcggggcuccgauaauucauucuuuagucgccucaacuggcugacccaucugaauuauaaauacccagcacucaaggugacgaugcccaacaacgaaaaauucgacaaguuauauaucuggggaguccaccauccugggacuuacaaugaucagauuagccuguacgcccaggcuucugguaucauuaccguguccacaaaacgaaaccaacagacuguaaucccaaauauaggcucacgucccagaguuagggacauuccuagccggaucaguauuuauuggaccaucgugaagccaggggauauccuuuugauuaacucuacaggaaaucugauagccccgcgcggcuacuuuaagauccaguccgguaaaagcucgauuaugagaucugacgcgcccaucgggaaguguaacuccgagugcauaaccccuaauggaucaauuccaaacgacaaacccuuccagaaugucaacaggaucacguauggcgcauguccucgguacgugaagcaaaauacucuaaaacucgccacaggcaugcgcaacgugccagagaagcagacccgagggaucuuuggagcuauugccgguuucaucgaaaauggcugggaggggauggucgauggaugguauggcuuuagacaccagaacagugaagguauggggcaagcagcugaccugaaaagcacucaggccgcgauuaaucagauaaacggcaaacuuaacaggcugaucggaaagacaauugagaaguuccaccagaucgagaaggaguucuccgaaguugaaggccggauccaagauuuggagaaauacguggaagacaccaagauugaucucuggucuuauaaugccgagcuguuaguagcacuggagaaccagcauacgauagaccucaccgauagcgaaauggacaaacuuuuugagcguacaaagaagcagaugcgcgaaaaugcugaggauauggggaacggaugcuucaaaaucuaccacaagugugacaaugccugcauugguucaaucagaaacggcauuuacgauagggacaucuaucgggacgaagcucugaguaaucgauuucagauaaaagggguggaguugaaggccggauacaaagauuggauccuauggauuuccuucgcaaucagcugcuuucugcucugugucgugcugcuuggcuucauuaugugggccugccaaaaggguaaccugcgcuguaauaucugcauauga

SEQ ID NO: 140525 - RNA, 1701 nt, Artificial Sequence
  derived and/or modified CDS sequence (opt3) from hemagglutinin__InfluenzaA__AID70459
augaagaccaucauugcccugagcuacauacucugccuuguguucgcucagaaaguccccggcaacgacaauuccacagcaacucuguguuuggggcaccaugccguuccuaacggaacgaucgugaagaccauuacaaaugaucaaaucgagguaacuaacgcgaccgaauuagugcagucuucaaguacaggugagauuugcaauagcccacaccagauccuggacggcgaaaacuguacccuaauagaugcucuccugggggacccgcagugcgauggauuucaaaauaaaaagugggaccuuuucgucgagagauccaaagcccauucuaacuguuaucccuacgaugugccugacuaugcaucgcugaggucauugguugccagcaguggcacucucgaauuuaauaacgaguccuucaauuggacaggugugacccagaacgggacgucuagcgcuugcauccggcgcuccaauaacucauuuuucagucgacugaauuggcugacucaccucaacuuuaaguacccagcauuaaacgucaccaugcccaauaacgagcaguucgauaagcuguauauuuggggagugcaucacccuggcacagacaaagaucagaucuuucuuuacgcccaagcuagcggccguauuacuguaucuaccaagaaaucccagcaggccguuaucccaaauauagggucaagacccagggugcggaacauuccuagccgcgucaguaucuauuggacaauugugaagccaggagacaucuugcugaucaauucuaccgguaaccuaauugcgccgagaggcuacuucaaaauaagguccgggaaaagcucgaucaugcggucugaugcacccauuggaaaguguaauuccgccugcaucacgccuaacggcucaauaccaaaugacaaacccuuucagaacgugaaucgcauuacuuacggugcuuguccucgauaugucaagcaaaacacacucaaacuggccccagggaugagaaauguucccgaaaagcagaccaggggaaucuucggcgcaaucgcuggcuuuauugagaacgggugggaaggaaugguggacgguugguacggcuuccggcaccagaauagugaggggcguggacaagccgcggaucuuaaaagcacucaggccgcaaucgaccagauuaacggcaagcugaaccgcuugauagguaaaacaaucgagaaguuccaucagauugaaaaugaguuuuccgaaguagaggggagaauccaagaucucgaaaaguauguggaggacaccaaaaucgaucuguggucuuacauugcugaguuacuggucgcccucgaaaaccagcacacgauagaccuuaccgauagcgagaugaauaagcuguucgaaaagacaaagaaacaguugagggagaacgcugaagacaugggcaauggaugcuuuaagaucuaucauaagugugauaacgccugcauuggcucaauccggaaugggauuuacgaccacgauguguaucgagacgaggcacuaaacaaucgcuuccagaucaaaggaguugagcugaagagugguuacaaagacuggauacucuggaucuccuuugccauuagcugcuuccugcuuuguguggcucuguugggcuuuaucaugugggcgugccaaaaggggaacauuagauguaauaucugcauauga

SEQ ID NO: 140526 - RNA, 1701 nt, Artificial Sequence
  derived and/or modified CDS sequence (opt3) from hemagglutinin__InfluenzaA__AID70460
augaagaccaucauugcccugagcuacauacucugccuuguguucgcucagaaacugcccggcaacgacaauuccacagcaacuuuguguuuagggcaccaugccgucccuaacggaacgaucguuaagaccauuacaaaugaucaaaucgaggugacuaacgcgaccgaacugguacagucuucaaguacaggugagauuugcaauagcccacaccagauccuagacggcgaaaacuguacccucauagaugcucugcuuggggacccgcagugcgauggauuucaaaauaaaaagugggaccuguucguggagagauccaaagcccauucuaacuguuaucccuacgaugucccugacuaugcaucguugaggucacucguggccagcaguggcacucuggaauuuaauaacgaguccuucaauuggacagguguuacccagaacgggacgucuagcgcuugcauccggcgcuccaauaacucauuuuucagucgacugaauuggcucacucacuuaaacuuuaaguacccagcacugaacgugaccaugcccaauaacgagcaguucgauaaacuuuauauuuggggaguccaucacccuggcacagacaaggaucagaucuuuuuguacgcccaagcuagcggccguauuacugugucuaccaagaaaucccagcaggccguaaucccaaauauagggucaagacccaggguucggaacauuccuagccgcgugaguaucuauuggacaauugucaagccaggagacauccugcuaaucaauucuaccgguaaccucauugcgccgagaggcuacuucaaaauaagguccggaaagagcucgaucaugcggucugaugcacccauugggaaguguaauuccgccugcaucacgccuaacggcucaauaccaaaugacaaacccuuucagaacgugaaucgcauuacuuacggugcuuguccucgauaugugaagcaaaacacacugaaacuugccaccgggaugagaaaugucccagaaaagcagacuaggggaaucuucggcgcaaucgcuggcuuuauugagaacgggugggaaggaaugguugacgguugguacggcuuccggcaccagaauagugaggggcguggacaagccgcggaucugaaaagcacacaggccgcaaucgaccagauuaacggcaaguugaaccgccucauagguaaaaccaucgagaaguuccaucagauugaaaaggaguuuuccgaaguggaggggagaauccaagaucuggaaaaauauguagaggacacgaagaucgauuuauggucuuacaaugcugagcugcucguggcccuugaaaaccagcacaccauugaccugacagauagcgagaugaauaaauuguucgaaaagacuaaaaagcagcuaagggagaacgcugaagacaugggcaauggaugcuuuaagauauaucauaaaugugauaacgccugcaucggcucaauucggaaugggaucuacgaccacgaugucuaucgagacgaggcacugaacaaucgcuuccagauuaagggaguggagcucaaaagugguuacaaggacuggauccuguggauauccuuugccaucagcugcuuccuucuguguguugcuuugcucggcuuuauuaugugggcgugccaaaaagggaacaucagauguaauauuugcaucuga

SEQ ID NO: 140527 - RNA, 1701 nt, Artificial Sequence
  derived and/or modified CDS sequence (opt3) from hemagglutinin__InfluenzaA__AID70461
augaagaccaucauugcccugagcuacauacucugccuuguguucgcucagaaacugcccggcaacgacaauuccacagcaacuuuguguuuagggcaccaugccgucccuaacggaacgaucguuaagaccauuacaaaugaucaaaucgaggugacuaacgcgaccgaacugguacagucuucaaguacaggugagauuugcaauagcccacaccagauccuagacggcgaaaacuguacccucauagaugcucugcuuggggacccgcagugcgauggauuucaaaauaaaaagugggaccuguucguggagagauccaaagcccauucuaacuguuaucccuacgaugucccugacuaugcaucguugaggucacucguggccagcaguggcacucuggaauuuaauaacgaguccuucaauuggacagguguuacccagaacgggacgucuagcgcuugcauccggcgcuccaauaacucauuuuucagucgacugaauuggcucacucacuuaaacuuuaaguacccagcacugaacgugaccaugcccaauaacgagcaguucgauaaacuuuauauuuggggaguccaucacccuggcacagacaaggaucagaucuuuuuguacgcccaagcuagcggccguauuacugugucuaccaagaaaucccagcaggccguaaucccaaauauagggucaagacccaggguucggaacauuccuagccgcgugaguaucuauuggacaauugucaagccaggagacauccugcuaaucaauucuaccgguaaccucauugcgccgagaggcuacuucaaaauaagguccggaaagagcucgaucaugcggucugaugcacccauugggaaguguaauuccgaaugcaucacgccuaacggcucaauaccaaaugacaaacccuuucagaacgugaaucgcauuacuuacggugccuguccucgauaugugaagcaaaacacacugaaacuugcuaccgggaugagaaaugucccagagaagcagacuaggggaaucuucggcgccaucgcaggcuuuauugaaaacgggugggagggaaugguugacgguugguacggcuuccggcaccagaauagugaggggcguggacaagcugccgaucugaaaagcacacaggcggccaucgaccagauuaacggcaaguugaaccgccucauagguaaaaccaucgaaaaguuccaucagauugagaaggaauuuuccgagguggaagggagaauccaagaucuggagaaauauaucgaggacacgaagauugauuuauggucuuacaaugcagaacugcucguagcucuugagaaccagcacaccauagaccugacagauagcgaaaugaauaaauuguucgagaagacuaaaaagcagcuaagggaaaacgccgaggacaugggcaauggaugcuuuaagaucuaucauaaaugugauaacgcuugcauuggcucaauccggaaugggauuuacgaccacgauguguaucgagacgaggcccugaacaaucgcuuccagaucaagggagucgaacucaaaagugguuacaaggacuggauacuguggaucuccuuugcaauuagcugcuuccuucuguguguggccuugcucggcuuuaucaugugggcuugccaaaaagggaacauuagauguauaaccugcaucuga

SEQ ID NO: 140528 - RNA, 1701 nt, Artificial Sequence
  derived and/or modified CDS sequence (opt3) from hemagglutinin__InfluenzaA__AID70463
augaagaccaucauugcccugagcuacauacucugccuuguguucgcucagaaaauccccggcaacgacaauuccacagcaacucuguguuuggggcaccaugccgucccuaacggaacgauuguuaagaccaucacaaaugaucaaauugaggugacuaacgcgaccgaauuaguacagucuucaaguacaggugagaucugcaauagcccacaccagauacuggacggcgaaaacuguacccuaaucgaugcucuccugggggacccgcagugcgauggauuucaaaauaaaaagugggaccuuuucguggagagauccaaagcccauucuaacuguuaucccuacgaugucccugacuaugcaucgcugaggucauugguggccagcaguggcacucucgaauuuaauaacgaguccuucaauuggacagguguuacccagaacgggacgucuagcgcuugcauucggcgcuccaauaacucauuuuucagucgacugaauuggcugacucaccucaacuuuaaguacccagcauuaaacgugaccaugcccaauaacgagcaguucgauaagcuguauaucuggggaguccaucacccuggcacagacaaagaucagauuuuucuuuacgcccaagcuagcggccguaucacugugucuaccaagaaaucccagcaggccguaauaccaaauauugggucaagacccaggguucggaacaucccuagccgcgugaguauuuauuggacaaucgucaagccaggagacaucuugcugauuaauucuaccgguaaccuaauagcgccgagaggcuacuucaaaaucagguccggaaagagcucgauuaugcggucugaugcacccaucgggaaguguaauuccgccugcauaacgccuaacggcucaauuccaaaugacaaacccuuucagaacgugaaucgcaucacuuacggugcuuguccucgauaugugaagcaaaacacacucaaacuggccaccgggaugagaaaugucccagaaaagcagacuaggggaaucuucggcgcaauugcuggcuuuaucgagaacgggugggaaggaaugguugacgguugguacggcuuccggcaccagaauagugaggggcguggacaagccgcggaucuuaaaagcacacaggccgcaauugaccagauaaacggcaagcugaaccgcuugaucgguaaaaccauugagaaguuccaucagaucgaaaaggaguuuuccgaaguggaggggagaauccaagaucucgaaaaauauguagaggacacgaagauugaucuguggucuuacaaugcugaguuacugguggcccucgaaaaccagcacaccauagaccuuacagauagcgagaugaauaaacuguucgaaaagacuaaaaagcaguugagggagaacgcugaagacaugggcaauggaugcuuuaagaucuaucauaaaugugauaacgccugcauuggcucaauccggaaugggauuuacgaccacgaugucuaucgagacgaggcacuaaacaaucgcuuccagaucaagggaguggagcugaaaagugguuacaaggacuggauacucuggaucuccuuugccauuagcugcuuccugcuuuguguugcucuguugggcuuuaucaugugggcgugccaaaaagggaacauuagauguaauaucugcauauga

SEQ ID NO: 140529 - RNA, 1701 nt, Artificial Sequence
  derived and/or modified CDS sequence (opt3) from hemagglutinin__InfluenzaA__AID70464
augaagaccaucauugcccugagcuacauacucugccuuguguucgcucagaaacugcccggcgacgauaacuccacagcaacuuuguguuuagggcaccaugccgucccuaauggaacgaucguuaagaccauuacaaacgaccaaaucgaggugacuaaugcgaccgaacugguacagucuucaaguacaggugagauuugcaacagcccacaccagauccuagauggcgaaaauuguacccucauagacgcucugcuuggggauccgcagugcgacggauuucaaaacaaaaagugggaucuguucguggagagauccaaagcccauucuaauuguuaucccuacgacgucccugauuaugcaucguugaggucacucguggccagcaguggcacucuggaauuuaacaaugaguccuucaacuggacagguguuacccagaaugggacgucuagcgcuugcauccggcgcuccaacaauucauuuuucagucgacugaacuggcucacucacuuaaauuuuaaguacccagcacugaacgugaccaugcccaacaaugagcaguucgacaaacuuuauauuuggggaguccaucacccuggcacagauaaggaccagaucuuuuuguacgcccaagcuagcggccguauuacugugucuaccaagaaaucccagcaggccguaaucccaaacauagggucaagacccaggguucggaauauuccuagccgcgugaguaucuauuggacaauugucaagccaggagauauccugcuaaucaacucuaccgguaaucucauugcgccgagaggcuacuucaaaauaagguccggaaagagcucgaucaugcggucugacgcacccauugggaaguguaacuccgccugcaucacgccuaauggcucaauaccaaacgacaaacccuuucagaaugugaaccgcauuacuuacggugcuuguccucgauaugugaagcaaaauacacugaaacuugccaccgggaugagaaacgucccagaaaagcagacuaggggaaucuucggcgcaaucgcuggcuuuauugagaaugggugggaaggaaugguugaugguugguacggcuuccggcaccagaacagugaggggcguggacaagccgcggaccugaaaagcacacaggccgcaaucgaucagauuaauggcaaguugaaccgccucauagguaaaaccaucgagaaguuccaucagauugaaaaggaguuuuccgaaguggaggggagaauccaagaccuggaaaaauauguagaggauacgaagaucgacuuauggucuuacaacgcugagcugcucguggcccuugaaaaucagcacaccauugaucugacagacagcgagaugaacaaauuguucgaaaagacuaaaaagcagcuaagggagaaugcugaagauaugggcaacggaugcuuuaagauauaucauaaaugugacaaugccugcaucggcucaauucggaacgggaccuacgaucacgacgucuaucgagacgaggcacugaauaaccgcuuccagaucaagggaguggagcucaaaagugguuacaaggauuggauucuguggaucuccuuugccauaagcugcuuccuucuguguguugcuuugcucggcuuuaucaugugggcgugccaaaaagggaauauuagauguaacaucugcauuuga

SEQ ID NO: 140530 - RNA, 1701 nt, Artificial Sequence
  derived and/or modified CDS sequence (opt3) from hemagglutinin__InfluenzaA__AID70465
augaagaccaucauugcccugagcuacauacucugccuuguguucgcucagaaacugcccggcgacgauaacuccacagcaacuuuguguuuagggcaccaugccgucccuaauggaacgaucguuaagaccauuacaaacgaccaaaucgaggugacuaaugcgaccgaacugguacagucuucaaguacaggugagauuugcaacagcccacaccagauccuagauggcgaaaauuguacccucauagacgcucugcuuggggauccgcagugcgacggauuucaaaacaaaaagugggaucuguucguggagagauccaaagcccauucuaauuguuaucccuacgacgucccugauuaugcaucguugaggucacucguggccagcaguggcacucuggaauuuaacaaugaguccuucaacuggacagguguuacccagaaugggacgucuagcgcuugcauccggcgcuccaacaauucauuuuucagucgacugaacuggcucacucacuuaaauuuuaaguacccagcacugaacgugaccaugcccaacaaugagcaguucgacaaacuuuauauuuggggaguccaucacccuggcacagauaaagaccagaucuuuuuguacgcccaagcuagcggccguauuacugugucuaccaagaaaucccagcaggccguaaucccaaacauagggucaagacccaggguucggaauauuccuagccgcgugaguaucuauuggacaauugucaagccaggagauauccugcuaaucaacucuaccgguaaucucauugcgccgagaggcuacuucaaaauaagguccggaaagagcucgaucaugcggucugacgcacccauugggaaguguaacuccgccugcaucacgccuaauggcucaauaccaaacgacaaacccuuucagaaugugaaccgcauuacuuacggugcuuguccucgauaugugaagcaaaauacacugaaacuugccaccgggaugagaaacgucccagaaaagcagacuaggggaaucuucggcgcaaucgcuggcuuuauugagaaugggugggaaggaaugguugaugguugguacggcuuccggcaccagaacagugaggggcguggacaagccgcggaccugaaaagcacacaggccgcaaucgaucagauuaauggcaaguugaaccgccucauagguaaaaccaucgagaaguuccaucagauugaaaaggaguuuuccgaaguggaggggagaauccaagaccuggaaaaauauguagaggauacgaagaucgacuuauggucuuacaacgcugagcugcucguggcccuugaaaaucaccaugcuauugaucugaccgacagcgagaugaacaaauuguucgaaaagacaaagaagcagaugagggagaaugccgaagauaugggcaacggaugcuuuaagauauaucuaaaaugugacaaugcaugcaucggcucaauucggaacgggaucuacgaucacgacgucuaucgagacgaggcccugaauaaccgcuuccagauuaagggaguggagcucaaaagugguuacaaggauuggauccuguggauauccuuuacugaaagcugcuuccuucuguguguugcuuugcucggcuuuaucaugugggcgugccagaaagggaauauuagauguaacaucugcauuuga

SEQ ID NO: 140531 - RNA, 1701 nt, Artificial Sequence
  derived and/or modified CDS sequence (opt3) from hemagglutinin__InfluenzaA__AID70466
augaagaccaucauugcccugagcuacauacucugccuuguguucgcucagaaacugcccggcaacgacaauuccacagcaacuuuguguuuagggcaccaugccgucccuaacggaacgaucguuaagaccauuacaaaugaucaaaucgaggugacuaacgcgaccgaacugguacagucuucaaguacaggugagauuugcaauagcccacaccagauccuagacggcgaaaacuguacccucauagaugcucugcuuggggacccgcagugcgauggauuucaaaauaaaaagugggaccuguucguggagagauccaaagcccauucuaacuguuaucccuacgaugucccugacuaugcaucguugaggucacucguggccagcaguggcacucuggaauuuaauaacgaguccuucaauuggacagguguuacccagaacgggacgucuagcgcuugcauccggcgcuccaauaacucauuuuucagucgacugaauuggcucacucacuuaaacuuuaaguacccagcacugaacgugaccaugcccaauaacgagcaguucgauaaacuuuauauuuggggaguccaucacccuggcacagacaaagaucagaucuuuuuguacgcccaagcuagcggccguauuacugugucuaccaagaaaucccagcaggccguaaucccaaauauagggucaagacccaggguucggaacauuccuagccgcgugaguaucuauuggacaauugucaagccaggagacauccugcuaaucaauucuaccgguaaccucauugcgccgagaggcuacuucaaaauaagguccggaaagagcucgaucaugcggucugaugcacccauugggaaguguaauuccgccugcaucacgccuaacggcucaauaccaaaugacaaacccuuucagaacgugaaucgcauuacuuacggugcuuguccucgauaugugaagcaaaacacacugaaacuugccaccgggaugagaaaugucccagaaaagcagacuaggggaaucuucggcgcaaucgcuggcuuuauugagaacgggugggaaggaaugguugacgguugguacggcuuccggcaccagaauagugaggggcguggacaagccgcggaucugaaaagcacacaggccgcaaucgaccagauuaacggcaaguugaaccgccucauagguaaaaccaucgagaaguuccaucagauugaaaaugaguuuuccgaaguggaggggagaauccaagaucuggaaaaguauguagaggacacgaaaaucgauuuauggucuuacauuggcgagcugcucguggcucuugaaaaccagcacaccauagaccugacagauagcgagaugaauaaguuguucgaaaagacuaagaaacagcuaagggagaacgccgaagacaugggaaauggcugcuuuaagaucuaucauaagugugauaacgcuugcauugggucaauccggaauggaauuuacgaccacgaugucuaucgagacgaggcccugaacaaucgcuuccagaucaaagguguggagcucaagaguggcuacaaagacuggauacuguggaucuccuuugcaauuagcugcuuccuucuguguguugccuugcucggguuuaucaugugggcuugccaaaagggaaacauuagauguaauaucugcauauga

SEQ ID NO: 140532 - RNA, 1701 nt, Artificial Sequence
  derived and/or modified CDS sequence (opt3) from hemagglutinin__InfluenzaA__AID70467
augaagaccaucauugcccugagcuacauacucugccuuguguucgcucagaaacugcccggcaacgacaauuccacagcaacuuuguguuuagggcaccaugccgucccuaacggaacgaucguuaagaccauuacaaaugaucaaaucgaggugacuaacgcgaccgaacugguacagucuucaaguacaggugagauuugcaauagcccacaccagauccuagacggcgaaaacuguacccucauagaugcucugcuuggggacccgcagugcgauggauuucaaaauaaaaagugggaccuguucguggagagauccaaagcccauucuaacuguuaucccuacgaugucccugacuaugcaucguugaggucacucguggccagcaguggcacucuggaauuuaauaacgaguccuucaauuggacagguguuacccagaacgggacgucuagcgcuugcauccggcgcuccaauaacucauuuuucagucgacugaauuggcucacucacuuaaacuuuaaguacccagcacugaacgugaccaugcccaauaacgagcaguucgauaaacuuuauauuuggggaguccaucacccuggcacagacaaagaucagaucuuuuuguacgcccaagcuagcggccguauuacugugucuaccaagaaaucccagcaggccguaaucccaaauauagggucaagacccaggguucggaacauuccuagccgcgugaguaucuauuggacaauugucaagccaggagacauccugcuaaucaauucuaccgguaaccucauugcgccgagaggcuacuucaaaauaagguccggaaagagcucgaucaugcggucugaugcacccauugggaaguguaauuccgccugcaucacgccuaacggcucaauaccaaaugacaaacccuuucagaacgugaaucgcauuacuuacggugcuuguccucgauaugugaagcaaaacacacugaaacuugccaccgggaugagaaaugucccagaaaagcagacuaggggaaucuucggcgcaaucgcuggcuuuauugagaacgggugggaaggaaugguugacgguugguacggcuuccggcaccagaauugcgaggggcguggacaagccgcggaucugaaaaguacacaggccgcaaucgaccagauuaacggcaaguugaaccgccucauagguaaaaccaucgagaaguuccaucagauugaaaaugaguuuagcgaaguggaggggagaauccaaggccuggaaaaguauguagaggauacgaaaaucgacuuaugguccuacauugcugagcugauaguggcccucgaaaaccagcacaccaucgaucuuacagacucugagaugaauaagcuguucgaaaagacuaagaaacagaugagggagaacgcugaagauaugggaaauggcuguuuuaagauuuaucauaagugcgacaacgccugcaucgggagcauucggaauggaaucuacgaucacgacgucuaucgagaugaggcauugaacaaucgcuuccagauaaaagguguggagcuaaagucaggcuacaaagacuggauccuguggauuaguuuugccaucuccuguuuccuccugugcguugcgcuucugggguuuauuaugugggcuugucaaaagggaaacaucagaugcaauauauguauuuga

SEQ ID NO: 140533 - RNA, 1701 nt, Artificial Sequence
  derived and/or modified CDS sequence (opt3) from hemagglutinin__InfluenzaA__AID70468
augaagaccaucauugcccugagcuacauacucugccuuguguucgcucagaaacugcccggcaacgacaauuccacagcaacuuuguguuuagggcaccaugccgucccuaacggaacgaucguuaagaccauuacaaaugaucaaaucgaggugacuaacgcgaccgaacugguacagucuucaaguacaggugagauuugcaauagcccacaccagauccuagacggcgaaaacuguacccucauagaugcucugcuuggggacccgcagugcgauggauuucaaaauaaaaagugggaccuguucguggagagauccaaagcccauucuaacuguuaucccuacgaugucccugacuaugcaucguugaggucacucguggccagcaguggcacucuggaauuuaauaacgaguccuucaauuggacagguguuacccagaacgggacgucuagcgcuugcauccggcgcuccaauaacucauuuuucagucgacugaauuggcucacucacuuaaacuuuaaguacccagcacugaacgugaccaugcccaauaacgagcaguucgauaaacuuuauauuuggggaguccaucacccuggcacagacaaggaucagaucuuuuuguacgcccaagcuagcggccguauuacugugucuaccaagagaucccagcaggccguaaucccaaauauagggucaaggccccggguucgcaacauuccuagcagagugaguaucuauuggacaauugucaaaccaggagacauccugcuaaucaauucuaccgguaaccucauugcgccgaggggcuacuucaagauacgguccgggaaaagcucgaucaugcgcucugaugcacccauuggaaaguguaauuccgccugcaucacgccuaacggcucaauaccaaaugacaagcccuuucagaacgugaaucgaauuacuuacggugcuuguccuagauaugugaaacaaaacacacugaaacuugccaccgggaugaggaaugucccagaaaagcagacucggggaaucuucggcgcaaucgcuggcuuuauugagaacgggugggaaggaaugguugacgguugguacggcuuccgucaccagaauugcgaggggcgcggacaagccgcggaucugaagaguacacaggccgcaaucgaccagauuaacggcaaauugaacagacucauggguaagagcauagagaaauuccaucagaucgaaaaugaguuuuccgaaguggaggggaggauucaaggccuggaaaaguauguagaggauaccaagaucgacuuauggucuuacaacggagagcugaucguggcucucgaaaaucagcacgccauugaucuuacggacagcgagaugaacaaacuguucgaaaagaccaaaaagcagaugcgggagaaugcugaagauaugggcaacggguguuuuaaaauauauuugaagugcgacaaugccugcaucggaucaauucgaaacgguaucuacgaucaugacgucuaucgcgaugaggcacuaaauaacagauuccagauuaagggcguggagcugaaaaguggguacaaggacuggauccucuggauauccuuuacaaucagcuguuuccugcuuugcguugcccuguugggauuuauuaugugggcuaggcaaaaaggcaauauccgguguaacauuugcaucuga

SEQ ID NO: 140534 - RNA, 1701 nt, Artificial Sequence
  derived and/or modified CDS sequence (opt3) from hemagglutinin__InfluenzaA__AID70469
augaagaccaucauugcccugagcuacauacucugccuuguguucgcucagaaaguccccggcaacgaaaauuccacagcaacucuguguuuggggcaccaugccguuccuaacggaacgaucgugaagaccauuacaaaugaccaaaucgagguaacuaacgcgaccgaguuagugcagucuucaaguacaggugaaauuugcaauagcccacaccagauccuggauggcgagaacuguacccuaauagacgcucuccugggggauccgcagugcgacggauuucaaaauaaaaagugggaucuuuucgucgaaagauccaaagcccauucuaacuguuaucccuacgacgugccugauuaugcaucgcugaggucauugguugccagcaguggcacucucgaguuuaauaacgaguccuucaauuggacaggugugacccagaacgggacgucuagcgcuugcauccggcgcuccaauaacucauuuuucagucgacugaauuggcugacucaccucaacuuuaaguacccagcauuaaacgucaccaugcccaauaacgaacaguucgacaagcuguauauuuggggagugcaucacccuggcacagauaaagaccagaucuuucuuuacgcccaagcuagcggccguauuacuguaucuaccaagagaucccagcaggccguuaucccaaauauagggucaaggccccgggugcgcaacauuccuagcagagucaguaucuauuggacaauugugaaaccaggagauaucuugcugaucaauucuaccgguaaccuaauugcgccgaggggcuacuucaagauacgguccgggaaaagcucgaucaugcgcucugacgcacccauuggaaaguguaauuccgccugcaucacgccuaacggcucaauaccaaaugauaagcccuuucagaacgugaaucgaauuacuuacggugcuuguccuagauaugucaaacaaaacacacucaagcuggccaccgggaugaggaauguuccagagaaacagacucggggaaucuucggcgcaaucgcuggcuuuauugaaaacgggugggagggaaugguggacgguugguacggcuuccgucaccagaauugcgaggggcgcggacaagccgcggaccuuaagaguacacaggccgcaaucgaucagauuaacggcaaacugaacagauugauagguaagaccaucgaaaaauuccaucagauugagaaggaauuuagcgagguagaagggaggauccaaggccucgagaaguauguggaggacacgaaaaucgaucugugguccuacaaugcugaauuacuggucgcccucgagaaccagcacaccauugaccuuacagauucugaaaugaauaagcuguucgagaaaacuaagaaacagaugcgggaaaacgcugaggacaugggaaauggcuguuuuaagauauaucauaagugcgauaacgccugcaucgggagcauucgaaauggaaucuacgaccacgauguguaucgcgacgaggcauugaacaauagauuccagauuaaagguguugaacuaaagucaggcuacaaagauuggauccuguggauaaguuuuaccaucuccuguuuccuccugugcguggcccuucugggguuuauuaugugggcuugucaaaagggaaacaucaggugcaauauuuguaucuga

SEQ ID NO: 140535 - RNA, 1701 nt, Artificial Sequence
  derived and/or modified CDS sequence (opt3) from hemagglutinin__InfluenzaA__AID70470
augaagaccaucauugcccugagcuacauacucugccuuguguucgcucagaaaguccccggcaacgaaaauuccacagcaacucuguguuuggggcaccaugccguuccuaacggaacgaucgugaagaccauuacaaaugaccaaaucgagguaacuaacgcgaccgaguuagugcagucuucaaguacaggugaaauuugcaauagcccacaccagauccuggauggcgagaacuguacccuaauagacgcucuccugggggauccgcagugcgacggauuucaaaauaaaaagugggaucuuuucgucgaaagauccaaagcccauucuaacuguuaucccuacgacgugccugauuaugcaucgcugaggucauugguugccagcaguggcacucucgaguuuaauaacgaguccuucaauuggacaggugugacccagaacgggacgucuagcgcuugcauccggcgcuccaauaacucauuuuucagucgacugaauuggcugacucaccucaacuuuaaguacccagcauuaaacgucaccaugcccaauaacgaacaguucgacaagcuguauauuuggggagugcaucacccuggcacagauaaagaccagaucuuucuuuacgcccaagcuagcggccguauuacuguaucuaccaagagaucccagcaggccguuaucccaaauauagggucaaggccccgggugcgcaacauuccuagcagagucaguaucuauuggacaauugugaaaccaggagauaucuugcugaucaauucuaccgguaaccuaauugcgccgaggggcuacuucaagauacgguccgggaaaagcucgaucaugcgcucugacgcacccauuggaaaguguaauuccgccugcaucacgccuaacggcucaauaccaaaugauaagcccuuucagaacgugaaucgaauuacuuacggugcuuguccuagauaugucaaacaaaacacacucaagcuggccaccgggaugaggaauguuccagagaaacagacucggggaaucuucggcgcaaucgcuggcuuuauugaaaacgggugggagggaaugguggacgguugguacggcuuccgucaccagaauugcgaggggcgcggacaagccgcggaccuuaagaguacacaggccgcaaucgaucagauuaacggcaaacugaacagauugauagguaagaccaucgaaaaauuccaucagauugagaaggaauuuagcgagguagaagggaggauccaaggccucgagaaguauguggaggacacgaaaaucgaucugugguccuacaauggagaauuacuggucgcucucgagaaccaccauaccauugaccuuacagauucugaaaugaauaagcuguucgagaaaacuaagaaacagaugcgggaaaacgccgaggacaugggcaauggguguuuuaagauauaucacaagugcgauaacgcuugcaucggaagcauucgaaaugguaucuacgaccacgauguguaucgcgacgaggccuugaacaauagauuccagauuaaaggcguugaacuaaagucaggguacaaagauuggauccuguggauaaguuuuaccaucuccuguuuccuccugugcguggcacuucugggauuuauuaugugggccugucagaagggcaacaucaggugcaauauuuguaucuga

SEQ ID NO: 140536 - RNA, 1701 nt, Artificial Sequence
  derived and/or modified CDS sequence (opt3) from hemagglutinin__InfluenzaA__AID70471
augaagaccaucauugcccugagcuacauacucugccuuguguucacacagaaacugcccggcaacgacaauuccacugcuacguuguguuuagggcaccaugcagucccuaacggaaccaucguuaagacaauuacuaaugaucaaaucgaggugaccaacgccacagaacugguacagucuucaaguaccggugagauuugcaauagcccacaccagauccuagacggcgaaaacuguacucucauagaugcgcugcuuggggacccgcagugcgauggauuucaaaauaaaaagugggaccuguucguggagagauccaaagcucauucuaacuguuaucccuacgaugucccugacuaugccucguugaggucacucguggcaagcaguggcacacuggaauuuaauaacgaguccuucaauuggaccgguguuacgcagaacgggacuucuagcgccugcauccggcgcuccaauaacucauuuuucagucgacugaauuggcucacccacuuaaacuuuaaguacccagcucugaacgugacaaugcccaauaacgagcaguucgauaaacuuuauauuuggggaguccaucacccuggcacugacaaagaucagaucuuuuuguacgcacaagccagcggccguauuaccgugucuacaaagaaaucccagcaggcuguaaucccaaauauagggucaagacccaggguucggaacauuccuagccgcgugaguaucuauuggaccauugucaagccaggagacauccugcuaaucaauucuacggguaaccucauugccccgagaggcuacuucaaaauaagguccggaaagagcucgaucaugcggucugaugcgcccauugggaaguguaauuccgcaugcaucacuccuaacggcucaauaccaaaugacaaacccuuucagaacgugaaucgcauuacauacggugccuguccucgauaugugaagcaaaacacccugaaacuugcuacugggaugagaaaugucccagaaaagcagacaaggggaaucuucggcgccaucgcaggcuuuauugagaacgggugggaaggaaugguugacgguugguacggcuuccggcaccagaauagugaggggcguggacaagcugccgaucugaaaagcacccaggcggccaucgaccagauuaacggcaaguugaaccgccucauagguaaaacgaucgagaaguuccaucagauugaaaaugaguuuuccgaaguggaggggagaauccaagaucuggaaaaguauguagaggacaccaaaaucgauuuauggucuuacaacgcagagcugauuguggcucucgaaaaucaccauacaauagaccuuacugauagcgagaugaacaagcuguucgaaaagaccaagaaacagaugagggagaaugccgaagacaugggcaacggaugcuuuaagaucuaucacaagugugauaaugcuugcauuggcucaauccggaacgggauuuacgaccacgaugucuaucgagacgaggccuugaauaaccgcuuccagaucaaaggaguggagcuaaagagugguuacaaagacuggauacuguggaucuccuuugcaauuagcugcuuccucaucuguguugcccugcuuggcuuuauuaugugggcuugccagaaggggaaucugagauguaacaucugcauauga

SEQ ID NO: 140537 - RNA, 1701 nt, Artificial Sequence
  derived and/or modified CDS sequence (opt3) from hemagglutinin__InfluenzaA__AID70472
augaagaccaucauugcccugagcuacauacucugccuuguguucgcucagaaacugcccggcaacgacaauuccacagcaacuuuguguuuagggcaccaugccgucccuaacggaacgaucguuaagaccauuacaaaugaucaaaucgaggugacuaacgcgaccgaacugguacagucuucaaguacaggugagauuugcaauagcccacaccagauccuagacggcgaaaacuguacccucauagaugcucugcuuggggacccgcagugcgauggauuucaaaauaaaaagugggaccuguucguggagagauccaaagcccauucuaacuguuaucccuacgaugucccugacuaugcaucguugaggucacucguggccagcaguggcacucuggaauuuaauaacgaguccuucaauuggacagguguuacccagaacgggacgucuagcgcuugcauccggcgcuccaauaacucauuuuucagucgacugaauuggcucacucacuuaaacuuuaaguacccagcacugaacgugaccaugcccaauaacgagcaguucgauaaacuuuauauuuggggaguccaucacccuggcacagacaaggaucagaucuuuuuguacgcccaagcuagcggccguauuacugugucuaccaagaaaucccagcaggccguaaucccaaauauagggucaagacccaggguucggaacauuccuagccgcgugaguaucuauuggacaauugucaagccaggagacauccugcuaaucaauucuaccgguaaccucauugcgccgagaggcuacuucaaaauaagguccggaaagagcucgaucaugcggucugaugcacccauugggaaguguaauuccgccugcaucacgccuaacggcucaauaccaaaugacaaacccuuucagaacgugaaucgcauuacuuacggugcuuguccucgauaugugaagcaaaacacacugaaacuugccaccgggaugagaaaugucccagaaaagcagacuaggggaaucuucggcgcaaucgcuggcuuuauugagaacgggugggaaggaaugguugacgguugguacggcuuccggcaccagaauagugaggggcguggacaagccgcggaucugaaaagcacacaggccgcaaucgaccagauuaacggcaaguugaaccgccucauagguaaaaccaucgagaaguuccaucagauugaaaaggaguuuuccgaaguggaggggagaauccaagaucuggaaaaauauguagaggacacgaagaucgauuuauggucuuacaaugcugagcugcucguggcccuugaaaaccaccauaccauugaccugacagauagcgagaugaauaaauuguucgaaaagacuaaaaagcagaugagggagaacgcugaagacaugggcaauggaugcuuuaagauauaucacaaaugugauaacgccugcaucggcucaauucggaaugggaucuacgaccacgaugucuaucgagacgaggcacuaaacaaucgcuuccagauuaagggaguggagcugaaaagugguuacaaggacuggauccucuggauauccuuugccaucagcugcuuccugcuuuguguugcucuguugggcuuuauuaugugggcgugccagaaagggaacaucagauguaauauuugcaucuga

SEQ ID NO: 140538 - RNA, 1701 nt, Artificial Sequence
  derived and/or modified CDS sequence (opt3) from hemagglutinin__InfluenzaA__AID70473
augaagaccaucauugcccugagcuacauacucugccuuguguucgcucagaaacugcccggcaacgacaauuccacagcaacuuuguguuuagggcaccaugccgucccuaacggaacgaucguuaagaccauuacaaaugaucaaaucgaggugacuaacgcgaccgaacugguacagucuucaaguacaggugagauuugcaauagcccacaccagauccuagacggcgaaaacuguacccucauagaugcucugcuuggggacccgcagugcgauggauuucaaaauaaaaagugggaccuguucguggagagauccaaagcccauucuaacuguuaucccuacgaugucccugacuaugcaucguugaggucacucguggccagcaguggcacucuggaauuuaauaacgaguccuucaauuggacagguguuacccagaacgggacgucuagcgcuugcauccggcgcuccaauaacucauuuuucagucgacugaauuggcucacucacuuaaacuuuaaguacccagcacugaacgugaccaugcccaauaacgagcaguucgauaaacuuuauauuuggggaguccaucacccuggcacagacaaggaucagaucuuuuuguacgcccaagcuagcggccguauuacugugucuaccaagaaaucccagcaggccguaaucccaaauauagggucaagacccaggguucggaacauuccuagccgcgugaguaucuauuggacaauugucaagccaggagacauccugcuaaucaauucuaccgguaaccucauugcgccgagaggcuacuucaaaauaagguccggaaagagcucgaucaugcggucugaugcacccauugggaaguguaauuccgccugcaucacgccuaacggcucaauaccaaaugacaaacccuuucagaacgugaaucgcauuacuuacggugcuuguccucgauaugugaagcaaaacacacugaaacuugccaccgggaugagaaaugucccagaaaagcagacuaggggaaucuucggcgcaaucgcuggcuuuauugagaacgggugggaaggaaugguugacgguugguacggcuuccggcaccagaauugcgaggggcguggacaagccgcggaucugaaaaguacacaggccgcaaucgaccagauuaacggcaaguugaaccgccucauagguaaaaccaucgagaaguuccaucagauugaaaaggaguuuagcgaaguggaggggagaauccaaggccuggaaaaauauguagaggauacgaagaucgacuuaugguccuacaaugcugagcugcucguggcccuugaaaaccagcacaccauugaucugacagacucugagaugaauaaauuguucgaaaagacuaaaaagcagaugagggagaacgcugaagauaugggaaauggcuguuuuaagauauaucauaaaugcgacaacgccugcaucgggagcauucggaauggaaucuacgaucacgacgucuaucgagaugaggcacuaaacaaucgcuuccagauuaaggguguggagcugaaaucaggcuacaaggacuggauccucuggauaaguuuugccaucuccuguuuccugcuuugcguugcucuguugggguuuauuaugugggcgugucaaaaaggaaacaucagaugcaauauuuguaucuga

SEQ ID NO: 140539 - RNA, 1701 nt, Artificial Sequence
  derived and/or modified CDS sequence (opt3) from hemagglutinin__InfluenzaA__AID70474
augaagaccaucauugcccugagcuacauacucugccuuguguucgcucagaaacugcccggcaacgacaauuccacagcaacuuuguguuuagggcaccaugccgucccuaacggaacgaucguuaagaccauuacaaaugaucaaaucgaggugacuaacgcgaccgaacugguacagucuucaaguacaggugagauuugcaauagcccacaccagauccuagacggcgaaaacuguacccucauagaugcucugcuuggggacccgcagugcgauggauuucaaaauaaaaagugggaccuguucguggagagauccaaagcccauucuaacuguuaucccuacgaugucccugacuaugcaucguugaggucacucguggccagcaguggcacucuggaauuuaauaacgaguccuucaauuggacagguguuacccagaacgggacgucuagcgcuugcauccggcgcuccaauaacucauuuuucagucgacugaauuggcucacucacuuaaacuuuaaguacccagcacugaacgugaccaugcccaauaacgagcaguucgauaaacuuuauauuuggggaguccaucacccuggcacagacaaagaucagaucuuuuuguacgcccaagcuagcggccguauuacugugucuaccaagaaaucccagcaggccguaaucccaaauauagggucaagacccaggguucggaacauuccuagccgcgugaguaucuauuggacaauugucaagccaggagacauccugcuaaucaauucuaccgguaaccucauugcgccgagaggcuacuucaaaauaagguccggaaagagcucgaucaugcggucugaugcacccauugggaaguguaauuccgccugcaucacgccuaacggcucaauaccaaaugacaaacccuuucagaacgugaaucgcauuacuuacggugcuuguccucgauaugugaagcaaaacacacugaaacuugccaccgggaugagaaaugucccagaaaagcagacuaggggaaucuucggcgcaaucgcuggcuuuauugagaacguuugggaagggaugguggacggaugguucgguuuccggcaccagaucugcgagggccgugggcaagccgcgggacuggagaguacacaggccgcaauugaucagauaaauggcaaaaugaaccgcuugauggguaagaccaucgggaaauuucaucagauuguaaacgaguucagcgaaguggaaggcagaauccaagaccucgagaaguacgucgaagauacgaagaucgaccugugguccuauauuggagaguuacugguggcucucgagaaucaccaugccauagaucuuaccgacucugaaaugaacaaacuguuugagaagacaaagaagcagaugagggaaaaugcugaggauaugggcaacggguguuucaaaaucuaccacaagugcgacaaugccugcauuggaagcauccggaacgguauuuaugaucgagacguuuaccgcgaugaagcauugaauaacagauuucacaucaagggcguggagcuaaaaucaggguauaaggacuggauaaucuggauuaguuccacugagagcuguuuccugcucugcgucgcccugcuuggauuuaucaugugggcuugucagaaaggcaauauuaggucuaacaucugcauauga

SEQ ID NO: 140540 - RNA, 1701 nt, Artificial Sequence
  derived and/or modified CDS sequence (opt3) from hemagglutinin__InfluenzaA__AID70475
augaagaccaucauugcccugagcuacaugcucugccuuguguucgcucagaaacugcccggcaacgacaauuccacagcaacuuuguguuuagggcaccaugccgucccuaacggaacgauaguuaagaccaucacaaaugaucaaauugaggugacuaacgcgaccgaacugguacagucuucaaguacaggugagaucugcaauagcccacaccagauucuagacggcgaaaacuguacccucaucgaugcucugcuuggggacccgcagugcgauggauuucaaaauaaaaagugggaccuguucguggagagauccaaagcccauucuaacuguuaucccuacgaugucccugacuaugcaucguugaggucacucguggccagcaguggcacucuggaauuuaauaacgaguccuucaauuggacagguguuacccagaacgggacgucuagcgcuugcauacggcgcuccaauaacucauuuuucagucgacugaauuggcucacucacuuaaacuuuaaguacccagcacugaacgugaccaugcccaauaacgagcaguucgauaaguuguauaucuggggaguccaucacccuggcacagacaaagaucagauuuuucuuuacgcccaagcuagcggccguaucacugugucuaccaagaaaucccagcaggccguaauuccaaauaucgggucaagacccaggguucggaacauaccuagccgcgugaguauuuauuggacaaucgucaagccaggagacauucugcuaaucaauucuaccgguaaccucaucgcgccgagaggcuacuucaaaauuagguccggaaagagcucgauaaugcggucugaugcacccaucgggaaguguaauuccgccugcauuacgccuaacggcucaaucccaaaugacaaacccuuucagaacgugaaucgcauaacuuacggugcuuguccucgauaugugaagcaaaacacacugaaacuugccaccgggaugagaaaugucccagaaaagcagacuaggggaauuuucggcgcaaucgcuggcuuuaucgagaacguuugggaagggaugguggacggaugguacgguuuccggcaccagaauugcgagggccgugggcaagccgcggaucugaaaagugcccaggcagcuauugaccccaucaacggaaaguugaaccgccucaugggcaaaacaauugguaaguuccaucagauagagaaggaauuuagcgagguagaagggagaauccaggaucuggagaaauauguggaagacaccaagauugauuuaugguccuacaauggcgagcugcucgucgcccuugagaaccaacacgcuaucgaccugacggauucugaaaugaauaaaguguucgagaagaccaaaaagcaguugagggaaaacgccgaggacaugggaaauggcuguuuuaagaucuaucauaaaugcgauaacgcaugcauugggagcauacggaauggaaucuacgaccacgauguuuaucgaaacgaagcccuaaauaaccgcuuccagauuaaggguguggagcugaaaucaggcuacaaggacuggauccucuggauuaguuuugcuaucuccuguuuccugcuuagcgucgcgucucugggguuuauaaugugggcauaccagaaaggaaauaucagaugcaacauuuguaucuga

SEQ ID NO: 140541 - RNA, 1701 nt, Artificial Sequence
  derived and/or modified CDS sequence (opt3) from hemagglutinin__InfluenzaA__AID70476
augaagaccaucauugcccugagcuacauacucugccuuguguucgcucagaaacugcccggcaacgaaaauuccacagcaacuuugggguuaggacaccaugccgucccuaacgguacgaucguuaagaccauuacaaaugaccaaaucgaagugacuaacgcgaccgagcugguacagucuucaaguacaggcgaaauuuguaauagcccacaccagauccuagauggggagaacugcacccucauagacgcucugcuuggagauccgcagugugacgauuuucaaaauaaaaagugggaccuguucguggaaagauccaaagcccauucuaacugcuaucccuacgaugucccugacuaugcaucguugaggucacucguggccagcaguggcacucuggaguuuaauaacgaguccuucaauuggacagguguuacccagaacgggacgucuagcgcuuguauccggcgcuccaauaacucauuuuucagucgacugaauuggcucacucacuuaaacuuuaaguacccagcacugaacgugaccaugcccaauaacgaacaguucgauaaacuuuauauuuggggaguccaucacccuggcacagacaaagaucagaucuuuuuguacgcccaagcuagcggccguauuacugugucuaccaagaaaucccagcaggccguaaucccaaauauagggucaagacccaggguucggaacauuccuagccgcgugaguaucuauuggacaauugucaagccaggagacauccugcuaaucaauucuaccgguaaccucauugcgccgagaggcuacuucaaaauaagguccggaaagagcucgaucaugcggucugaugcacccauugggaagugcaauuccgccuguaucacgccuaacggcucaauaccaaaugacaaacccuuucagaacgugaaucgcauuacuuacggugcuugcccucgauaugugaagcaaaacaaucugaaacuugccacagggaugagaaacgucccagagaagcagaccaggggaaucuucggcgcaaucgcuggcuuuauugaaaaugggugggagggaaugguugacgguugguacggcuuccggcaccagaacagugaggggcguggacaagccgcggaucugaaaagcacucaggccgcaaucgaccagauuaacggcaaguugaaucgccucauagguaaaacaaucgaaaaguuccaucagauugagaaggaauuuuccgagguggaagggagaauccaaggcagggagaaauauguagaggauaccaagaucgaccuguggucuuacauuggagaguucauaguggcuuuagagaaccagcacacgaucgaucugaccgacagcgaaaugaauaaacucuuugagaagacaaagaagcagaugcgggaaaacgccgaggauaugggcaauggguguuucaagauuuaucauaaaugcgacaacgcuuguaucggaucaauucgaaaugguaucuacgaucacgacgucuaucgcgaugaggcccuuaacaauagauuucagauaaagggcguggaacugaaaaguggguacaaggacuggaucuuguggauuuccuucgcaaucagcugcuuucuacugugcguugcccuccugggauucauuaugugggcuugucaaaaaggcaacaucaggugcaauauauguauuuga

SEQ ID NO: 140542 - RNA, 1701 nt, Artificial Sequence
  derived and/or modified CDS sequence (opt3) from hemagglutinin__InfluenzaA__AID70477
augaagaccaucauugcccugagcuacauacucugccuuguguucgcucagaaacugcccggcaacgacuccucuacagggacuuuguguuuaggacaccaugcagucccuaaugguacgaucguuaagaccauuacaaacgaucaaaucgaggugacuaaugccaccgaacugguacagucaaguagcacaggcgagauuugcaacagaccacaccagauccuagacggggaaaauuguacccucauagaugcgcugcuuggagacccgcagugcgauggcuuucaaaacaaaaagugggaccuguucguggagagguccaaagcucauucuaauuguuaucccuacgaugucccugacuaugccucguugcggucacucguggcaagcagugguacucuggaauuuaacaaugaguccuucaacuggacagggguuacccagaauggaacgucuagcgccugcauccgccgauccaacaauucauuuuucaguauucugaacuggcucacucacuuaaauuuuaaguacccagcucugaacgugaccaugcccaacaaugagcaguucgauaaacuuuauaucuggggcguccaucacccuggcacagacaaagaucagaucuuuuuguacgcacaagccagcgggcguauuacugugucuaccaagaaaucccagcaggcuguaauaccaaacauuggaucaagacccaggguucggaauaucccuagccgcgugaguauuuauuggacaaucgucaagccaggugaaauccugcuaauuaacucuaccggcaaucucauagccccgagaggguacuucaaaaucagguccggaaagagcucgauuaugcggucugacgcgcccaucggcaaguguuacuccgcaugcauaacgccuaacgguucaauuccaaaugauaaacccuuucagaacgugaaucgcaucacuuauggggccuguccucgauacgugaagcaacacccacugaaacuugcuacaggaaugagaaacguccccgagaagcagaccaggggcaucuucggcgccauugcaggguuuaucgaaaauggaugggaggguaugguugacggcugguauggguuccggcaucagauuugcgagggacguggccaagcugccgaccugaaaaguacucaggcggccauagaucagaucaacgguaaguugaaucgccucauugggaaaacaaucgaaaaguuccaccagaucgagaaggaauuuagcgagguggaauggaggauucaaggccuggagaaauacguagaggacaccaagguggauuuaugguccuauaacggagaacugauagucgcacucgagaaucaucacacgaucgaccuuaccgauucugaaaugaacaaacuguucgagaagacaaagaagcagaugagagaaaacgcugaggacaugggcaauggguguuuuaagauuuacuugaaaugcgauaacgccugcaucggaagcauucggaaugguaucuaugaccacgauguguaccgagacgaggcucuaaacaaucgcuuccagauaaagggcguugaacugaaaucaggguacaaggauuggauccucuggauuaguuuuacugaguccuguuuccugcuuagcguggcccuguugggauuuaucaugugggcaugccagaaaggcaacauuagauguaauaucugcauauga

SEQ ID NO: 140543 - RNA, 1701 nt, Artificial Sequence
  derived and/or modified CDS sequence (opt3) from hemagglutinin__InfluenzaA__AID70478
augaagaccaucauugcccugagcuacauacucugccuuguguucgcucagaaacugcccggcaacgacaauuccacagcaacuuuguguuuagggcaccaugccgucccuaacggaacgaucguuaagaccauuacaaaugaucaaaucgaggugacuaacgcgaccgaacugguacagucuucaaguacaggugagauuugcaauagcccacaccagauccuagacggcgaaaacuguacccucauagaugcucugcuuggggacccgcagugcgauggauuucaaaauaaaaagugggaccuguucguggagagauccaaagcccauucuaacuguuaucccuacgaugucccugacuaugcaucguugaggucacucguggccagcaguggcacucuggaauuuaauaacgaguccuucaauuggacagguguuacccagaacgggacgucuagcgcuugcauccggcgcuccaauaacucauuuuucagucgacugaauuggcucacucacuuaaacuuuaaguacccagcacugaacgugaccaugcccaauaacgagcaguucgauaaacuuuauauuuggggaguccaucacccuggcacagacaaggaucagaucuuuuuguacgcccaagcuagcggccguauuacugugucuaccaagaaaucccagcaggccguaaucccaaauauagggucaagacccaggguucggaacauuccuagccgcgugaguaucuauuggacaauugucaagccaggagacauccugcuaaucaauucuaccgguaaccucauugcgccgagaggcuacuucaaaauaagguccggaaagagcucgaucaugcggucugaugcacccauugggaaguguaauuccgccugcaucacgccuaacggcucaauaccaaaugacaaacccuuucagaacgugaaucgcauuacuuacggugcuuguccucgauaugugaagcaaaacacacugaaacuugccaccgggaugagaaaugucccagaaaagcagacuaggggaaucuucggcgcaaucgcuggcuuuauugagaacgggugggaaggaaugguugacgguugguacggcuuccggcaccagaauugcgaggggcguggacaagccgcggaucuggagaguacacaggccgcaaucgaccagauuaacggcaaaaugaaccgcuugauggguaagaccauagaaaaauuccaucagaucgagaaggaauuuagcgagguggaagggaggauucaaggcagagagaaguauguagaggauacgaaaaucgaccucugguccuacaauggagaacuguuaguggaucuggagaaccagcacaccaucgaccucacagauucugaaaugaauaaggucuucgagaaaacuaagaaacagaugcgggaaaacgcugaggacaugggcaauggguguuuuaagauuuaucauaagugcgauaacgccugcauaggaagcauccgaaaugguauuuacgaccacgauguguaucgcgacgaggcucuuaacaauagauuccagaucaaaggcguugaacugaagucaggguacaaagacuggauucaauggaucaguuuuaccauauccuguuucuugcuaugcgugagccugcucggauuuaucaugugggccugucagaagggcaacauuaggugcaauaucuguauuuga

SEQ ID NO: 140544 - RNA, 1701 nt, Artificial Sequence; identical to SEQ ID NO: 138088
  derived and/or modified CDS sequence (opt3) from hemagglutinin__InfluenzaA__AID70632

SEQ ID NO: 140545 - RNA, 1683 nt, Artificial Sequence
  derived and/or modified CDS sequence (opt3) from hemagglutinin__InfluenzaA__AID70634
augaacacccagauccugguguucgcccucauugcuauaauccccacaaaugcagacaagauuugccuuggccaccaugccgucagcaacgggacuaaaguuaauacgcugaccgagagaggaguggaaguagugaacgcgacagagacugucgaaaggaccaauaucccucggauuuguuccaaggguaaacgcacaguggauuugggccaaugcggguuacugggaaccaucacuggcccaccgcagugugaccaguuucuagaguucucugcugaucucauaaucgaacgacgugaggguucagacguuugcuaccccgggaaguuugugaacgaggaagcccugagacagauucuuagggagaguggaggcaucgauaaagaagcaaugggcuucacauauagcgggauucggaccaauggagccacguccgcuugucgcagaucugguucgucauuuuacgcagagaugaaguggcuguugagcaacacugacaaugccgcuuucccucaaaugaccaagaguuauaaaaacacaaggaaguccccagcccucaucgucuggggcauacaccauucugugagcacugcggagcagaccaaacuguacggguccggaaauaagcugguaacaguuggcucaaguaacuaucagcagagcuuugugcccucuccuggugcacggccacaagucaaugggcucuccggacgcauugauuuccacugguuaaugcugaaccccaaugacaccgugacguuuucauucaacggcgccuuuaucgcuccugaucgagccagcuuccuuagaggcaaaaguauggggauucagucuggagugcaggucgacgcaaacugcgaaggugauuguuaccauuccggcgggacuaucaucagcaauuugccauuucagaacauugacucgagggcuguuggaaagugcccgcgguaugugaagcaacguucucugcuacucgccacaggcaugaaaaauguacccgagauaccuaagggucgcgggcuguucggcgcgaucgccggauucauugaaaacggcugggaggggcuuaucgauggaugguacgguuuuagacaccagaaugcacagggcgaagggaccgcugccgacuacaaauccacucaaucagcuauagaccagauuacaggaaagcugaacaggaucaucgagaaaaccaaucagcaguucgaguugauugauaacgaauuuaaugagguggaaaagcaaaucaguaacgucauuaauuggacgcgggacagcauaaccgaggugugguccuauaacgccgaacuccugguugcaauggagaaucagcacacaaucgauuuagccgacucugagauggauaaacuguacgaacgagugaagcgccagcucagagagaacgcugaagaggacggcacugguuguuucgaaauuuuucauaagugcgaugacgauuguauggcgagcaucaggaauaacaccuaugaccacucaaaauaccgggaggaggcaaugcagaaccgcauccaaauugauccagucaaacuuaguuccggguauaaggacgugauacugugguucagcuuuggcgccucuugcuucaucuugcuagcuauuguaaugggacugguuuuuaucugcgugaagaauggcaacaugagauguacaauuugcaucuga

SEQ ID NO: 140546 - RNA, 1701 nt, Artificial Sequence
  derived and/or modified CDS sequence (opt3) from hemagglutinin__InfluenzaA__AIF72902
augaagaccaucauugcccugagcuacauacucugccuuguguucgcucagaaacugcccggcaacgacaauuccacagcaacuuuguguuuagggcaccaugccgucccuaacggaacgaucguuaagaccauuacaaaugaucaaaucgaggugacuaacgcgaccgaacugguacagucuucaagugcuggugagauuugcgacagcccacaccagauccuagauggcgaaaauuguacacucauagacgcccugcuuggggauccgcagugcgacggauuucaaaacaaaaagugggaucuguucguggagagauccagggcauauucuaauuguuaccccuaugacgucccugauuacgccucguugcggucacucguggcuagcaguggcacccuggaauuuaacaaugaguccuucaacuggacugguguuacacagaaugggaccucuagcgcaugcauccgccgauccaacaauucauuuuucagucgucugaacuggcucacgcauuuaaauuuuaaauauccagcccugaacgugacuaugcccaacaaugagcaguucgacaaacuuuacauuuggggaguccaccauccuggcaccgauaaggaccagaucuuuuuguaugcucaagccagcggcagaauuacagugucuacuaaaaggucccagcaggcgguaaucccaaacauagggucacggccccgcguuagaaauauuccuagcaggaucaguauuuacuggaccaucgugaagccaggagauauccugcuaauuaacucuacagguaaucucauagcaccgcggggcuacuucaaaauccgcuccggaaagagcucgauuaugcgaucugacgcccccaucgggaaauguaacuccgaaugcauaaccccuaauggcucaauuccaaacgacaagcccuuucagaaugucaacagaaucacguauggugcuuguccuagguacgugaagcaaaguacucugaaacuugccacagggaugcggaaugugccagagaagcagacccguggaaucuucggcgcaauugcuggcuuuaucgaaaacgggugggagggaauggucgaugguugguauggcuuccgccaccagaauagcgaggggagaggacaagccgcggaccugaaauccacucaggccgcaauugaucagauaaacggcaaguugaauaggcucaucgguaaaacaaacgaaaaguuccaccagauugagaaagaauuuucugagguugaagggcggauccaagaccuggagaaguacguggaggauaccaagaucgacuuauggagcuauaacgcugaacugcucguagcccuugagaaucagcauacgauugaucugaccgacucagaaaugaacaaauuguucgagaagacaaagaagcagcuacgagaaaaugcugaggauaugggcaacggaugcuuuaaaauauaccacaagugugacaaugccugcaucggcaguauucgcaacgggacuuaugaucaugacguguacagagacgaggcacugaauaacagguuccagaucaagggagucgaacucaaauccgguuacaaggauuggauucuguggaucagcuuugccauaucuugcuuccuucuguguguggcuuugcucggcuuuaucaugugggcgugccaaaaagggaauauucgguguaacaucugcauuuga

SEQ ID NO: 140547 - RNA, 1701 nt, Artificial Sequence
  derived and/or modified CDS sequence (opt3) from hemagglutinin__InfluenzaA__AIF72903
augaagaccaucauugcccugagcuacauacucugccuuguguucgcucaggagcugcccggcaacgacaauuccacagcaacuuuguguuuagggcaccaugccgucccuaacggaacgaucguuaaaaccauuacaaaugaucaaaucgaagugacuaacgcgaccgagcugguacagucuucaagugcuggugaaauuugcgacagcccacaccagauccuagauggcgagaauuguacacucauagacgcccugcuuggggauccgcagugcgacggauuucaaaacaagaaaugggaucuguucguggaaagauccagggcauauucuaauuguuaccccuaugacgucccugauuacgccucguugcggucacucguggcuagcaguggcacccuggaguuuaacaaugaguccuucaacuggacugguguuacacagaaugggaccucuagcgcaugcauccgccgauccaacaauucauuuuucagucgucugaacuggcucacgcauuuaaauuuuaaguauccagcccugaacgugacuaugcccaacaaugaacaguucgacaaacuuuacauuuggggaguccaccauccuggcaccgauaaggaccagaucuuuuuguaugcucaagccagcggcagaauuacagugucuacuaagaggucccagcaggcgguaaucccaaacauagggucacggccccgcguuagaaauauuccuagcaggaucaguauuuacuggaccaucgugaaaccaggagauauccugcuaauuaacucuacagguaaucucauagcaccgcggggcuacuucaagauccgcuccgggaaaagcucgauuaugcgaucugacgcccccaucggaaaguguaacuccgagugcauaaccccuaauggcucaauuccaaacgacaaacccuuucagaaugucaacagaaucacguauggugcuuguccuagguacgugaagcaaaguacucugaaacuugccacagggaugcggaaugugccagaaaaacagacccguggaaucuucggcgcaauugcuggcuuuaucgagaacgggugggagggaauggucgaugguugguauggcuuccgccaccagaauagcgaagggagaggacaagccgcggaccugaaguccacucaggccgcaauugaucagauaaacggcaaauugaauaggcucaucgguaagacaaacgagaaauuccaccagauugaaaaggaguuuucugaaguugaggggcggauccaagaccuggagaaauacguggaagauaccaagaucgacuuauggagcuauaacgcugagcugcucguagcccuugaaaaucagcauacgauugaucugaccgacucagagaugaacaaguuguucgaaaagacaaagaaacagcuacgagagaaugcugaggauaugggcaacggaugcuuuaagauauaccacaaaugugacaaugccugcaucggcaguauucgcaacgggacuuaugaucaugacguguacagagacgaagcacugaauaacagguuccagaucaagggagucgagcucaaguccgguuacaaagauugggugcuguggauuagcuuugccaucucuugcuuccuucuguguguugcuuugcucggcuuuauaaugugggcgugccaaaaggggaauauccgguguaacauuugcaucuga

SEQ ID NO: 140548 - RNA, 1701 nt, Artificial Sequence
  derived and/or modified CDS sequence (opt3) from hemagglutinin__InfluenzaA__AIF72904
augaagaccaucauugcccugagcuacauacucugccuuguguucgcucaggagcugcccggcaacgacaauuccacagcaacuuuguguuuagggcaccaugccgucccuaacggaacgaucguuaaaaccauuacaaaugaucaaaucgaagugacuaacgcgaccgagcugguacagucuucaagugcuggugaaauuugcgacagcccacaccagauccuagauggcgagaauuguacacucauagacgcccugcuuggggauccgcagugcgacggauuucaaaacaagaaaugggaucuguucguggaaagauccagggcauauucuaauuguuaccccuaugacgucccugauuacgccucguugcggucacucguggcuagcaguggcacccuggaguuuaacaaugaguccuucaacuggacugguguuacacagaaugggaccucuagcgcaugcauccgccgauccaacaauucauuuuucagucgucugaacuggcucacgcauuuaaauuuuaaguauccagcccugaacgugacuaugcccaacaaugaacaguucgacaaacuuuacauuuggggaguccaccauccuggcaccgauaaggaccagaucuuuuuguaugcucaagccagcggcagaauuacagugucuacuaagaggucccagcaggcgguaaucccaaacauagggucacggccccgcguuagaaauauuccuagcaggaucaguauuuacuggaccaucgugaaaccaggagauauccugcuaauuaacucuacagguaaucucauagcaccgcggggcuacuucaagauccgcuccgggaaaagcucgauuaugcgaucugacgcccccaucggaaaguguaacuccgagugcauaaccccuaauggcucaauuccaaacgacaaacccuuucagaaugucaacagaaucacguauggugcuuguccuagguacgugaagcaaaguacucugaaacuugccacagggaugcggaaugugccagaaaaacagacccguggaaucuucggcgcaauugcuggcuuuaucgagaacgggugggagggaaugauggaugguugguauggcuuccgccaccagaauagcgaagggagaggacaagccgcggaccugaaguccacucaggccgcaauugaucagauaaacggcaaauugaauaggcucaucgguaagacaaacgagaaauuccaccagauugaaaaggaguuuucugaagucgaggggcggauccaagaccuggagaaauacguugaagauaccaagaucgacuuauggagcuauaacgcugagcugcucguggcccuugaaaaucagcauacgauugaucugaccgacucagagaugaacaaguuguucgaaaagacaaagaaacagcuacgagagaaugcugaggauaugggcaacggaugcuuuaagauauaccacaaaugugacaaugccugcaucggcaguauucgcaacgggacuuaugaucaugacguauacagagacgaagcacugaauaacagguuccagaucaagggaguggagcucaaguccgguuacaaagauuggguccuguggauuagcuuugccaucucuugcuuccuucuguguguggcuuugcucggcuuuauaaugugggcgugccaaaaggggaauauccgguguaacauuugcaucuga

SEQ ID NO: 140549 - RNA, 1701 nt, Artificial Sequence
  derived and/or modified CDS sequence (opt3) from hemagglutinin__InfluenzaA__AIF72905
augaagaccaucauugcccugagcuacauacucugccuuguguucgcucagaaacugcccggcaacgacaauuccacagcaacuuuguguuuagggcaccaugccgucccuaacggaacgaucguuaagaccauuacaaaugaucaaaucgaggugacuaacgcgaccgaacugguacagucuucaagugcuggugagauuugcgacagcccacaccagauccuagauggcgaaaauuguacacucauagacgcccugcuuggggauccgcagugcgacggauuucaaaacaaaaagugggaucuguucguggagagauccagggcauauucuaauuguuaccccuaugacgucccugauuacgccucguugcggucacucguggcuagcaguggcacccuggaauuuaaaaacgaguccuucaauuggacugguguuacacagaacgggaccucuagcgcaugcauccgccgauccaauaacucauuuuucagucgucugaauuggcucacgcauagcaacuuuaaguauccagccuuaaaugugacuaugcccaacaacgagcaguucgacaagcuguacauuuggggaguccaccauccuggcaccgauaaagaccagaucuuucuuuaugcucaagccucuggcagaauuacaguguccacuaagaggucacagcaggcgguaaucccaaauauagggagccggccccgcguuagaaacauuccuaguaggaucucuauuuacuggaccaucgugaaaccaggagauaucuugcugauuaauuccacagguaaccuaauagcaccgcggggcuacuucaagauccgcagcgggaaaucgucuauuaugcgauccgacgcccccaucggaaaguguaauucagaaugcauaaccccuaacggcaguauuccaaaugacaagcccuuucagaacgucaauagaaucacguauggugcuuguccuagguacgugaaacaaagcacucucaagcuggccacagggaugcggaacgugccagagaaacagacccguggaaucuucggcgcaauugcuggcuuuaucgaaaaugggugggagggaaugauggaugguugguauggcuuccgccaccagaacuccgaggggagaggacaagccgcggaccuuaagucuacucaggccgcaauugaucagauaaauggcaaacugaacagguugaucgguaagacaaaugaaaaauuccaccagauugagaaggaauuuagcgaggucgaagggcggauccaagaccucgagaaguacguugaggauaccaaaaucgaccuguggucauauaacgcugaauuacugguggcccucgagaaccagcauacgauugaucuuaccgacagugaaaugaauaagcuguucgagaaaacaaagaaacaguugcgagaaaacgcugaggauaugggcaauggaugcuuuaagauauaccacaagugugacaacgccugcaucggcuccauucgcaaugggacuuaugaucaugacguauacagagacgaggcacuaaacaauagguuccagaucaaaggaguggaacucaagagcgguuacaaagauuggauucuguggaucucuuuugccauaucaugcuuccugcuuugugucgcucuguugggcuuuaucaugugggcgugccaaaaggggaacauucgguguaauaucugcauuuga

SEQ ID NO: 140550 - RNA, 1701 nt, Artificial Sequence; identical to SEQ ID NO: 131459
  derived and/or modified CDS sequence (opt3) from hemagglutinin__InfluenzaA__AIF72906

SEQ ID NO: 140551 - RNA, 1701 nt, Artificial Sequence; identical to SEQ ID NO: 131459
  derived and/or modified CDS sequence (opt3) from hemagglutinin__InfluenzaA__AIF72907

SEQ ID NO: 140552 - RNA, 1701 nt, Artificial Sequence; identical to SEQ ID NO: 131459
  derived and/or modified CDS sequence (opt3) from hemagglutinin__InfluenzaA__AIF72908

SEQ ID NO: 140553 - RNA, 1701 nt, Artificial Sequence
  derived and/or modified CDS sequence (opt3) from hemagglutinin__InfluenzaA__AIF72909
augaagaccaucauugcccugagcuacauacucugccuuguguucgcucagaaacugcccggcaacgacaauuccacagcaacuuuguguuuagggcaccaugccgucccuaacggaacgaucguuaagaccauuacaaaugaucaaaucgaggugacuaacgcgaccgaacugguacagucuucaagugcuggugagauuugcgacggcccacaccagauccuagauggggaaaauuguacacucauagacgcccugcuuggagauccgcagugcgacggcuuucaaaacaaaaagugggaucuguucguggagagaagcagggcauauuccaauuguuaccccuaugacgucccugauuacgccucuuugcggucgcucguggcuucaagcgguacccuggaauuuaacaaugagaguuucaacuggacugggacaacccagaauggaacguccucugcaugcauccgccgaagcaacaauuccuuuuucucacgucugaacuggcucacucauuuaaauuuuaaauauccagcccugaacguuaccaugcccaacaaugagcaguucgacaaacuuuacauuuggggcgugcaccauccuggcacagauaaggaccagaucuuuuuguaugcucaagccagugggagaauuacugucagcaccaagaggucucagcaggcggugaucccaaacauaggaucccggccccgcguaagaaauauuccuucaaggaucagcauuuacuggacaaucguuaagccaggugauauccugcuaauuaacaguaccggcaaucucauagcaccgcggggguacuucaaaauccgcucuggaaaguccagcauuaugcgaucggacgcccccaucggcaaauguaacucugaaugcauaacgccuaaugguuccauuccaaacgacaagcccuuucagaaugugaacagaaucacuuauggggcuuguccuagguacgucaagcaaucaacacugaaacuugccaccggaaugcggaaugugccagagaagcagacucguggcaucuucggcgcaauugcuggguuuaucgaaaacggaugggaggguaugguggauggcugguauggguuccgccaccagaauagugagggaagaggccaagccgcggaccugaaaagcacacaggccgcaauugaucagauaaacgguaaguugaauaggcucaucgggaaaaccaacgaaaaguuccaccagauugagaaagaauuuuccgaggucgaaggccggauccaagaccuggagaaguacguugaggauacgaagaucgacuuauggucuuauaacgcugaacugcucguggcccuugagaaucagcauaccauugaucugacagacagcgaaaugaacaaauuguucgagaagacuaaaaagcagcuacgagaaaaugcugaggauaugggaaacggcugcuuuaaaauauaccacaagugugacaaugccugcaucgggucaauucgcaacggaaccuaugaucaugacguauacagagacgaggcacugaauaacagguuccagaucaaggguguggaacucaaaaguggcuacaaggauuggauucuguggaucuccuuugccauaagcugcuuccuucugugugucgcuuugcucggguuuaucaugugggcgugccaaaaaggaaauauucgguguaacaucugcauuuga

SEQ ID NO: 140554 - RNA, 1701 nt, Artificial Sequence; identical to SEQ ID NO: 131459
  derived and/or modified CDS sequence (opt3) from hemagglutinin__InfluenzaA__AIF72910

SEQ ID NO: 140555 - RNA, 1701 nt, Artificial Sequence; identical to SEQ ID NO: 131459
  derived and/or modified CDS sequence (opt3) from hemagglutinin__InfluenzaA__AIF72911

SEQ ID NO: 140556 - RNA, 1701 nt, Artificial Sequence; identical to SEQ ID NO: 140546
  derived and/or modified CDS sequence (opt3) from hemagglutinin__InfluenzaA__AIF72912

SEQ ID NO: 140557 - RNA, 1701 nt, Artificial Sequence; identical to SEQ ID NO: 131459
  derived and/or modified CDS sequence (opt3) from hemagglutinin__InfluenzaA__AIF72913

SEQ ID NO: 140558 - RNA, 1701 nt, Artificial Sequence
  derived and/or modified CDS sequence (opt3) from hemagglutinin__InfluenzaA__AIF72914
augaagaccaucauugcccugagcuacauacucugccuuguguucgcucagaaacugcccggcaacgacaauuccacagcaacuuuguguuuagggcaccaugccgucccuaacggaacgaucguuaagaccauuacaaaugaucaaaucgaggugacuaacgcgaccgaacugguacagucuucaaguacaggugagauuugcgacagcccacaccagauccuagauggcgaaaauuguacccucauagacgcucugcuuggggauccgcagugcgacggauuucaaaacaaaaagugggaucuguucguggagagauccaaagccuauucuaauuguuaccccuaugacgucccugauuacgcaucguugaggucacucguggccagcaguggcacucuggaauuuaacaaugaguccuucaacuggacagguguuacccagaaugggacgucuagcgcuugcauccggcgcuccaacaauucauuuuucagucgacugaacuggcucacucauuuaaauuuuaaguauccagcacugaacgugaccaugcccaacaaugagcaguucgacaaacuuuacauuuggggaguccaccauccuggcacagauaaagaccagaucuuuuuguaugcccaagcuagcggccguauuacugugucuaccaagagaucccagcaggccguaaucccaaacauagggucaaggccccggguucgcaauauuccuagcagaaucaguauuuacuggacaaucgugaaaccaggagauauccugcuaauuaacucuaccgguaaucucauagcgccgaggggcuacuucaagauccgcgggggaaaauccagcauuaugcggucggacgcacccaucggcaaguguaacucugaaugcauaacgccuaaugguuccauuccaaacgacaagcccuuucagaaugucaaccgaaucacuuauggggccuguccuagauacgugaaacaaaauacacugaaacuugcuaccggaaugaggaacgugccagagaagcagacucggggcaucuucggcgccauugcaggguuuaucgaaaauggaugggaggguauggucgauggcugguauggguuccgucaccagaacucagagggacgcggccaagcugccgaccugaagaguacacaggcggccauugaucagauaaaugguaaauugaacagacucaucgggaagaccaacgaaaaauuccaccagauugagaaggaauuuagcgagguugaaggcaggauccaugaccuggagaaguacguggaggauacguuauucgaccuguggguauauaauuccgaacuccuuguggcacugcaaaaccagcacaccaucgauuugcccgacucugagaugaauaaacuauuugaaaagacaaagaagcagcugcgggagaacgcugaagauaugggaaauggcugcuucaaaauuuaccauaagugugacaacgccugcauagggagcauccgaaauggaacuuaugaucacgacgucuaccgcgacgaggcucucaacaauagauuucagauuaaggguguggagcugaaaucaggcuacaaggauuggauccuuuggauuaguuucgccaucuccugcuuucuguuguguguugcacuccugggguucauaaugugggccugccaaaaaggaaacaucagguguaauauuugcaucuga

SEQ ID NO: 140559 - RNA, 1701 nt, Artificial Sequence
  derived and/or modified CDS sequence (opt3) from hemagglutinin__InfluenzaA__AIF72915
augaagaccaucauugcccugagcuacauacucugccuuguguucgcucagaaacugcccggcaacgacaauuccacagcaacuuuguguuuagggcaccaugccgucccuaacggaacgaucguuaagaccauuacaaaugaucaaaucgaggugacuaacgcgaccgaacugguacagucuucaaguacaggugagauuugcgacagcccacuacagauccucgauggcgaaaauuguacccugauagacgcuuugcugggggauccgcagugcgacggauuucaaaacaaaaagugggauuuguucguggagagauccaaagccuauucuaauuguuaccccuaugacgucccugauuacgcaucgcucaggucacugguggccagcaguggcacucuggaauuuaacaaugaguccuucaacuggacagguguuacccagaaugggacgucuagcgcuugcauccggcgcuccaacaauucauuuuucagucgacucaacugguuaacucaccugaauuuuaaguauccagcacuuaacgugaccaugcccaacaaugagcaguucgacaaguuguacauuuggggaguccaucacccuggcacagauaaagaccagaucuuucuguaugcccaagcuagcggccguauuacugugucuaccaagagaucccagcaggccguaaucccaaacauagggucaaggccccggguucgcaauauuccuagcagaaucaguauuuacuggacaaucgugaaaccaggagauauccuacucauuaacucuaccgguaaucugauagcgccgaggggcuacuucaagauccgguccgggaaaagcucgauuaugcgcucuaacgcacccaucggaaaguguaauuccgaaugcauaacgccuaacggcucaauuccaaaugacaagcccuuucagaacgucaaucgaaucacuuauggugccuguccuagauacgugaaacaaaacacacuuaagcuggcuaccgggaugaggaaugugccagagaaacagacucggggaaucuucggcgccauugcaggcuuuaucgaaaacgggugggagggaauggucgacgguugguauggcuuccgucaucagaauagugaggggcgcggacaagcugccgaucuuaagagcacacaggcggccauugaccagauaaacggcaaacucaacagacugaucgguaagaccaaugaaaaauuccaccagauugagaaggaauuuuccgagguugaagggaggauccaagauuuagagaaguacguggaggacacgaaaaucgaucuguggucuuauaacgcagaacuccuuguagcucuggagaaucagcacaccauugacuugacagauagcgaaaugaacaagcuauucgagaaaacuaagaaacagcugcgggaaaaugccgaggacaugggcaacggaugcuuuaagauauaccauaagugugauaaugcuugcaucggcucaauucgaaacgggaccuaugaccacgauguguaccgcgacgaggcccucaauaacagauuccagaucaaaggagucgaacugaagagugguuacaaagacuggauucuuuggaucuccuuugcaauaagcugcuuccuguuguguguggcccuccugggcuuuaucaugugggcuugccaaaaggggaauauuagguguaacaucugcauuuga

SEQ ID NO: 140560 - RNA, 1701 nt, Artificial Sequence; identical to SEQ ID NO: 131459
  derived and/or modified CDS sequence (opt3) from hemagglutinin__InfluenzaA__AIF72916

SEQ ID NO: 140561 - RNA, 1701 nt, Artificial Sequence
  derived and/or modified CDS sequence (opt3) from hemagglutinin__InfluenzaA__AIF72917
augaagaccaucauugcccugagcuacauacucugccuuguguucgcucagaaacugcccagaaacgacaauuccacagcaacuuuguguuuaggccaccaugccgucccuaacgggacgaucguuaagaccauuacaaaugaucaaaucgaggugacuaacgcgaccgaacugguacagucuucaaguacaggagagauuugcgacagcccacaccagauccuagauggugaaaauuguacccucauagacgcucugcuuggcgauccgcagugcgacggguuucaaaacaaaaagugggaucuguucguggagagguccaaagccuauucuaauuguuaccccuaugacgucccugauuacgcaucguugcggucacucguggccagcaguggaacucuggaauuuaagaacgaguccuucaauuggacaggcguuacccagaacgguacgucuagcgcuugcauccgccgauccaauaacucauuuuucagucgucugaauuggcucacucauuuaaacuuuaaguauccagcacugaaugugaccaugcccaacaacgagcaguucgacaaacuuuacauuuggggaguccaccauccugggacagauaaggaccagaucuuuuuguaugcccaagcuagcggcagaauuacugugucuaccaaaaggucccagcaggccguaaucccaaauauaggcucacggccccgcguuagaaacauuccuagcaggaucaguauuuacuggacaaucgugaagccaggggauauccugcuaauuaauucuaccggaaaccucauagcgccgcgggguuacuucaaaauccgcuccggcaagagcucgauuaugcgaucugacgcacccaucgggaaguguaauuccgaaugcauaacgccuaacggaucaauuccaaaugacaaacccuuucagaacgucaauagaaucacuuauggcgccuguccuagguacgugaagcaaaacacacugaaacuugcuaccgguaugcggaaugugccagagaagcagacucgugggaucuucggagccauugcaggcuuuaucgaaaacggcugggaggggauggucgauggaugguaugguuuccgccaccagaauagugagggcagagggcaagcugccgaccugaaaagcacacaggcggccauugaucagauaaacggaaaguugaauaggcucaucggcaaaaccaacgaaaaguuccaccagauugagaaggaauuuuccgagguugaaggucggauccaagaccuggagaaauacguggaggauacgaagaucgacuuauggucuuauaacgcagaacugcucguagcucuugagaaucagcauaccauugaucugacagacagcgaaaugaacaaauuguucgagaagacuaaaaagcagcuacgagaaaaugccgaggauauggggaacggcugcuuuaagauauaccacaaaugugacaaugcuugcaucggaucaauucgcaacggcaccuaugaucaugacguguacagagacgaggcccugaauaacagguuccagaucaagggggucgaacucaaaaguggauacaaggauuggauucuguggaucuccuuugcaauaagcugcuuccuucuguguguggccuugcucgguuuuaucaugugggcuugccaaaaaggcaauauucggugugacaucugcauuuga

SEQ ID NO: 140562 - RNA, 1683 nt, Artificial Sequence
  derived and/or modified CDS sequence (opt3) from hemagglutinin__InfluenzaA__AIG44693
auggagaccgccagccugaucacaauucuccuuguggucacuguuuccaacgcugacaagauaugcaucggcuaccagucuacuaauucaaccgaaacaguggauacucugaccgagaacaauguacccgugacacacgcaaaagaauuguuacauaccgagcacaacgggaugcugugugccacgagucuaggacaaccucucauucuggacacaugcaccaucgaaggucuuauuuauggcaauccaagcugugaucuguugcucgggggaagagagugguccuacaucgucgagaggccgucugcggugaacggccugugcuaucccgguaauguugaaaaccuggaggaacuccggucguuauucucaagcgcucgcaguuaccagcgaauacagaucuuuccugacacgauuuggaauguguccuauucugggacuagcaaggccuguuccgauucauucuaccguaguaugagauggcugacccagaaagacaacgcauauccaauccaagaugcccaguacacaaauaaccaggagaagaauauucuuuuuauguggggaaucaaccaucccccuacugacaccgcucagacaaauuuguacaccaggacggauacuacaaccagcgucgcaacugaggaaauaaaccggacauucaaaccacugauuggcccccgcccucuagugcacggccucauggggagaaucaacuauuacuggucuguacugaagccaggacaaacccuuaggauuaaguccaaugguaaccugaucgccccgugguauggccauaucuugucagggaaaagccacggacggauucucaagacggaccugaaacgcggcaauugcaccguucagugucagacagagaaggguggguuaaacacuacccugcccuuucagaaugugaguaaauacgcuuucggaaacugcucuaaguauauaggcaucaagucccucaaacuugccgucggccugcgaaaugugccuagcagaucgucuaggggguuguuuggagcgauugcagguuucaucgaaggcgggugguccggccuaguggccggaugguacgguuuucaacacucaaacgaucagggggucggcauggcugccgaccgggauaguacacagaaggcaauagacaaaauuacuagcaagguuaauaacaucguggacaaaaugaauaagcaauaugagaucauugaucaugaguucuccgaaguagagacccgucugaacaugaucaauaacaaaauugacgaucagauacaggacaucugggcuuacaaugccgaacuccuggugcuucuggagaaccagaagacauuggaugaacacgacgcgaacgucaauaaccucuacaauaaggugaaacgcgcccugggaucuaacgcaguugaggauggcaagggguguuuugaauuauaucauaaaugcgacgaucaauguauggagaccauuagaaauggaacuuacaacaggcggaaguaucaggaggaaagcaaacuggagaagcagaagaucgaaggugugaaacuagagucagaaggcacguacaagauccucacaauuuauaguaccgucgcuuccagccuggugauagccaugggguucgcugccuuucuuuucugggcaaugucuaauggaucaugccgaugcaacaucuguauuuga

SEQ ID NO: 140563 - RNA, 1701 nt, Artificial Sequence; identical to SEQ ID NO: 135030
  derived and/or modified CDS sequence (opt3) from hemagglutinin__InfluenzaA__AIJ10728

SEQ ID NO: 140564 - RNA, 1701 nt, Artificial Sequence
  derived and/or modified CDS sequence (opt3) from hemagglutinin__InfluenzaA__AIJ10729
augaagaccaucauugcccugagcuacauacucugccuuguguucgcucagaaacugcccggccacgacaacuccacagcaacuuuguguuuagggcaucacgccgucccuaauggaacgaucguuaagaccauuacaaacgaucaaaucgaggugacuaaugcgaccgaacugguacagucuucaaguacaggugagauuugcaacagcccacaucagauccuagacggcgaaaauuguacccucauagaugcucugcuuggggacccgcagugcgauggauuucaaaacaaaaagugggaccuguucguggagagauccaaagcccacucuaauuguuaucccuacgaugucccugacuaugcaucguugaggucacucguggccagcaguggcacucuggaauuuaacaaugaguccuucaacuggacagguguuacccagaaugggacgucuagcgcuugcauccggcgcuccaacaauucauuuuucagucgacugaacuggcucacucauuuaaauuuuaaguacccagcacugaacgugaccaugcccaacaaugagcaguucgauaaacuuuauauuuggggaguccaccacccuggcacagacaaggaucagaucuuuuuguacgcccaagcuagcggccguauuacugugucuaccaagagaucccagcaggccguaaucccaaacauagggucaaggccccggguucgcaauauuccuagcagagugaguaucuauuggacaauugucaaaccaggagacauccugcuaaucaacucuaccgguaaucucauugcgccgaggggcuacuucaagauacgguccgggaaaagcucgaucaugcgcucugaugcacccauuggaaaguguaacuccgccugcaucacgccuaauggcucaauaccaaacgacaagcccuuucagaaugugaaccgaauuacuuacggugcuuguccuagauaugugaaacaaaauacacugaaacuugccaccgggaugaggaacgucccagaaaagcagacuaagggaaucuucggcgcaaucgcuggcuuuauugagaaugggugggaaggaaugguugacgguugguacggcuuccggcaucagaacagugaggggcguggacaagccgcggaucugaaaagcacacaggccgcaaucgaccagauuaauggcaaguugaaccgccucauagguaaaaccaacgagaaguuccaccagaucgaaaaggaguuuuccgaaguggaggggaggauucaagaucuggaaaaauauguagaggacacgaagaucgauuuauggucuuacaaugcugagcugcucguggcccuugaaaaccagcauaccaucgaccugacagauagcgagaugaauaaauuguucgaaaagacuaaaaagcagcuaagagagaacgcugaagacaugggcaauggaugcuuuaagauuuaucacaaaugugauaacgccugcauaggcucaauccggaaugggaccuacgaccacgaugucuaucgagacgaggcacugaacaaucgcuuccagauuaagggaguggagcucaaaagugguuacaaggacuggauccuguggauuuccuuugccaucagcugcuuccuucuguguguugcuuugcucggcuuuauaaugugggcgugccaaaaagggaacaucagauguaauauuugcaucuga

SEQ ID NO: 140565 - RNA, 1701 nt, Artificial Sequence; identical to SEQ ID NO: 135030
  derived and/or modified CDS sequence (opt3) from hemagglutinin__InfluenzaA__AIJ10730

SEQ ID NO: 140566 - RNA, 1701 nt, Artificial Sequence; identical to SEQ ID NO: 135030
  derived and/or modified CDS sequence (opt3) from hemagglutinin__InfluenzaA__AIJ10731

SEQ ID NO: 140567 - RNA, 1701 nt, Artificial Sequence
  derived and/or modified CDS sequence (opt3) from hemagglutinin__InfluenzaA__AIJ10732
augaagaccaucauugcccugagcuacauacucugccuuguguucgcucaggagcugcccggcaacgacaauuccacagcaacuuuguguuuagggcaccaugccgucccuaacggaacgaucguuaaaaccauuacaaaugaucaaaucgaagugacuaacgcgaccgagcugguacagucuucaaguacaggugaaauuugcaauagcccacaccagauccuagacggcgagaacuguacccucauagaugcucugcuuggggacccgcagugcgauggauuucaaaauaagaaaugggaccuguucguggaaagauccaaggcccauucuaacuguuaucccuacgaugucccugacuaugcaucguugaggucacucguggccagcaguggcacucuggaguuuaauaacgaguccuucaauuggacagguguuacccagaacgggacgucuagcgcuugcauccggcgcuccaauaacucauuuuucagucgacugaauuggcucacucacuuaaacuuucguuacccagcacugaacgugaccaugcccaauaacgaacaguucgauaaacuuuauauuuggggaguccaucacccuggcacagacaaggaucagaucuuuuuguacgcccaagcuagcggcagaauuacugugucuaccaagaggucccagcaggccguaaucccaaauauagggucacggccccgcguuagaaacauuccuagcagggugaguaucuauuggacaauugucaaaccaggagacauccugcuaaucaauucuaccgguaaccucauugcgccgcggggcuacuucaagauacgcuccgggaaaagcucgaucaugcgaucugaugcacccauuggaaaguguaauuccgccugcaucacgccuaacggcucaauaccaaaugacaaacccuuucagaacgugaauagaauuacuuacggugcuuguccuagguaugugaagcaaaacacacugaagcuggccaccgggaugcggaaugucccagagaaacagacucguggaaucuucggcgcaaucgcuggcuuuauugaaaacgggugggagggaaugguugacgguugguacggcuuccgccaccagaauagugaggggagaggacaagccgcggaucuuaagagcacacaggccgcaaucgaccagauuaacggcaaauugaacaggcucauagguaagaccaaugaaaaauuccaucagaucgagaaggaauuuuccgagguggaagggcggauucaagaucuggagaaauauguagaggacacgaagaucgauuuauggucuuacaacgcugaacugcucguggcccuugagaaucagcacaccaucgaccugacagauagcgaaaugaacaaguuguucgagaaaacuaagaaacagcuacgagaaaaugcugaggacaugggcaacggaugcuuuaagauuuaucauaaaugugauaaugccugcauaggcucaauccgcaacgggaccuacgaccacgaugucuauagagacgaggcacugaauaacagguuccagauuaagggaguggaacucaagagugguuacaaagacuggauccuguggauuuccuuugccaucagcugcuuccuucuguguguugcuuugcucggcuuuauaaugugggcgugccaaaaggggaauauccgguguaacauuugcaucuga

SEQ ID NO: 140568 - RNA, 1701 nt, Artificial Sequence
  derived and/or modified CDS sequence (opt3) from hemagglutinin__InfluenzaA__AIJ10733
augaagaccaucauugcccugagcuacauacucugccuuguguucgcucaggagcugcccggcaacgacaauuccacagcaacuuuguguuuagggcaccaugccgucccuaacggaacgaucguuaaaaccauuacaaaugaucaaaucgaagugacuaacgcgaccgagcugguacagucuucaaguacaggugaaauuugcaauagcccacaccagauccuagacggcgagaacuguacccucauagaugcucugcuuggggacccgcagugcgauggauuucaaaauaagaaaugggaccuguucguggaaagauccaaggcccauucuaacuguuaucccuacgaugucccugacuaugcaucguugaggucacucguggccagcaguggcacucuggaguuuaauaacgaguccuucaauuggacagguguuacccagaacgggacgucuagcgcuugcauccggcgcuccaauaacucauuuuucagucgacugaauuggcucacucacuuaaacuuucguuacccagcacugaacgugaccaugcccaauaacgaacaguucgauaaacuuuauauuuggggaguccaucacccuggcacagacaaggaucagaucuuuuuguacgcccaagcuagcggcagaauuacugugucuaccaagaggucccagcaggccguaaucccaaauauagggucacggccccgcguuagaaacauuccuagcagggugaguaucuauuggacaauugucaaaccaggagacauccugcuaaucaauucuaccgguaaccucauugcgccgcggggcuacuucaagauacgcuccgggaaaagcucgaucaugcgaucugaugcacccauuggaaaguguaaauccgccugcaucacgccuaauggcucaauaccaaacgacaagcccuuucagaaugugaacagaauuacuuacggugcuuguccuagguaugugaagcaaaauacacugaaacuugccaccgggaugcggaacgucccagagaagcagacucguggaaucuucggcgcaaucgcuggcuuuauugaaaaugggugggagggaaugguugacgguugguacggcuuccgccaccagaacagugaggggagaggacaagccgcggaucugaaaagcacacaggccgcaaucgaccagauuaauggcaaguugaacaggcucauagguaaaaccaacgaaaaguuccaucagaucgagaaagaauuuuccgagguggaagggcggauucaagaucuggagaaguauguagaggacacgaagaucgauuuauggucuuacaaugcugaacugcucguggcccuugagaaccagcacaccaucgaccugacagauagcgaaaugaauaaauuguucgagaagacuaaaaagcagcuacgagaaaacgcugaggacaugggcaauggaugcuuuaaaauuuaucauaagugugauaacgccugcauaggcucaauccgcaaugggaccuacgaccacgaugucuauagagacgaggcacugaacaauagguuccagauuaagggaguggaacucaaaagugguuacaaggacuggauccuguggauuuccuuugccaucagcugcuuccuucuguguguugcuuugcucggcuuuauaaugugggcgugccaaaaagggaacauccgguguaauauuugcaucuga

SEQ ID NO: 140569 - RNA, 1701 nt, Artificial Sequence
  derived and/or modified CDS sequence (opt3) from hemagglutinin__InfluenzaA__AIJ10734
augaagaccaucauugcccugagcuacauacucugccuuguguucgcucagaaacugcccgagaacgacaauuccacagcaacuuuguguuuaggccaccaugccgucccuaacgggacgaucguuaagaccauuacaaaugaucaaaucgaagugacuaacgcgaccgagcugguacagucuucaaguacaggagaaauuugcaauagcccacaccagauccuagacggugagaacuguacccucauagaugcucugcuuggcgacccgcagugcgauggguuucaaaauaaaaagugggaccuguucguggaaagauccaaagcccauucuaacuguuaucccuacgaugucccugacuaugcaucguugaggucacucguggccagcaguggaacucuggaguuuaauaacgaguccuucaauuggacaggcguuacccagaacgguacgucuagcgcuugcauccggcgcuccaauaacucauuuuucagucgacugaauuggcucacucacuuaaacuuuaaguacccagcacugaacgugaccaugcccaauaacgaacaguucgauaagcuguauauuuggggaguccaucacccugggacagacaaagaucagaucuuuuuguacgcccaagcuagcggccguauuacugugucuaccaagagaucccagcaggccguaaucccaaauauaggcucaaggccccggguucgcaacauuccuagcagaaucaguauuuauuggacaaucgugaaaccaggggacauccugcuaauuaauucuaccggaaaccucauagcgccgagggguuacuucaagauccgguccggcaaaagcucgauuaugcgcucugaugcacccaucgggaaguguaauuccacgugcauaacuccuaacggaucaauuccaaaugacaagcccuuucagaacgucaaucgaaucacauacggcgccuguccuagauaugugaaacaaaacacccugaaacuugcuacugguaugaggaaugugccagagaagcagacacgggggaucuucggagccauugcaggcuuuaucgaaaacggcugggaggggauggucgacggaugguacgguuuccgucaccagaauagugagggccgcgggcaagcugccgaucuuaagagcacccaggcggccauugaccagauaaacggaaaauugaacagacucaucggcaagacgaaugaaaaauuccaucagauugagaaggaauuuuccgagguugaagguaggauccaagaucuggagaaguauguggaggacaccaaaaucgauuuauggucuuacaacgcagaacugcucguagcucuugagaaucagcacacaauugaccugacugauagcgaaaugaacaaguuguucgagaaaaccaagaaacagcuacgggaaaaugccgaggacauggggaacggcugcuuuaagauauaucauaagugugauaaugcuugcaucggaucaauucgaaacggcacauacgaccacgauguguaucgcgacgaggcccugaauaacagauuccagaucaaaggggucgaacucaagaguggauacaaagacuggauucuguggaucuccuuugcaauaagcugcuuccuucuguguguggccuugcucgguuuuaucaugugggcuugccaaaagggcaauauuagguguaacaucugcauuuga

SEQ ID NO: 140570 - RNA, 1701 nt, Artificial Sequence
  derived and/or modified CDS sequence (opt3) from hemagglutinin__InfluenzaA__AIJ10735
augaagaccaucauugcccugagcuacauacucugccuuaucuucgcucagaaacugcccgagaacgacaauuccacagcaacuuuguguuuaggccaccaugccgugccuaacgggacgauugucaagaccaucacaaaugaucaaauugaaguuacuaacgcgaccgagcuggugcagucuucaaguacaggagaaaucugcaauagcccacaccagauacuagacggugagaacuguacccucaucgaugcucugcuuggcgacccgcagugcgauggguuucaaaauaaaaagugggaccuguucguagaaagauccaaagcccauucuaacuguuaucccuacgaugugccugacuaugcaucguugaggucacucgucgccagcaguggaacucuggaguuuaauaacgaguccuucaauuggacaggcgugacccagaacgguacgucuagcgcuugcauucggcgcuccaauaacucauuuuucagucgacugaauuggcucacucacuuaaacuuuaaguacccagcacugaacguuaccaugcccaauaacgaacaguucgauaaguuguauaucuggggagugcaucacccugggacagacaaagaucagauuuuucuuuacgcccaagcuagcggccguaucacugucucuaccaagagaucccagcaggccgugauaccaaauauuggcucaaggccccggguacgcaacaucccuagcagaguuaguauuuauuggacaaucgugaaaccaggggacauccugcuaauuaauucuaccggaaaccucauagcgccgagggguuacuucaagauccgguccggcaaaagcucgauuaugcgcucugaugcacccaucgggaaguguaauuccacgugcauaacuccuaacggaucaauuccaaaugacaagcccuuucagaacgucaaucgaaucacauacggcgccuguccuagauaugugaaacaaaacacccugaaacuugcuacugguaugaggaaugugccagagaagcagacacgggggaucuucggagccauugcaggcuuuaucgaaaacggcugggaggggauggucgacggaugguacgguuuccgucaccagaauagugagggcaaggggcaagcugccgaucugaaaagcacccaggcggccauugaccagauaaacggaaaguugaaccgccucaucggcaaaacgaaugaaaaguuccaucagauugagaaggaauuuuccgagguugaagguagaauccaagaucuggagaaauauguggaggacaccaagaucgauuuauggucuuacaacgcagaacugcucguagcucuugagaaucagcacacaauugaccugacugauagcgaaaugaacaaauuguucgagaagaccaaaaagcagcuaagggaaaaugccgaggacauggggaacggcugcuuuaagauauaucauaaaugugauaaugcuugcaucggaucaauucggaacggcacauacgaccacgauguguaucgagacgaggcccugaauaaccgcuuccagaucaagggggucgaacucaaaaguggauacaaggacuggauucuguggaucuccuuugcaauaagcugcuuccuucuguguguggccuugcucgguuuuaucaugugggcuugccaaaaaggcaauauuagauguaacaucugcauuuga

SEQ ID NO: 140571 - RNA, 1701 nt, Artificial Sequence
  derived and/or modified CDS sequence (opt3) from hemagglutinin__InfluenzaA__AIJ10736
augaagaccaucauugcccugagcuacauacucugccuuguguucgcucagaaacugcccggcaacgacaauuccacagcaacuuuguguuuagggcaccaugccgucccuaacggaacgaucguuaagaccauuacaaaugauagaaucgaggugacuaacgcgaccgaacugguacaaaauucuacaauuggugagaucugcgacucaccacaccagauacuagauggcgaaaacuguacccucaucgacgcucugcuuggggauccgcagugcgacggauuucagaauaaaaagugggaucuguucguggagaggaguaaagccuauagcaacuguuaccccuaugacgucccugauuacgcauccuugcggucucucguggccucgucaggcacucuggaauuuaauaacgagagcuucaauuggacagguguuacccaaaacgggacgaguuccgcuugcauucgccgaucuaauaacagcuuuuucucccgucugaauuggcucacucauuuaaacuuuaaguauccagcacugaacgugaccaugcccaauaacgagcaguucgacaaguuguacaucuggggaguccaccauccuggcacagauaaagaccagauuuuucuuuaugcccagucaaguggcagaaucacugugagcaccaagaggucucaacaggcuguaauaccaaauauugggucccggccccgcaucagaaacauuccuucaaggaucagcaucuacuggacaauuguuaaaccaggagauauacugcuaaucaauaguaccgguaaccucauugccccgcggggcuacuucaagauccgcucugggaaauccagcauaaugcgaucggacgcgcccauuggaaaguguaagucugaaugcaucacgccuaauggcuccaucccaaacgacaaacccuuucagaaugugaacagaauuacuuauggugcauguccuagguacgucaagcagucaacacugaaacuugccaccgggaugcggaaugugccagagaagcaaacucguggaaucuucggcgcuauugccggcuuuauagaaaacgggugggagggaaugguggaugguugguauggcuuccgccaccagaauagugaggggagaggacaggcagcugaccugaaaagcacacaagccgcgaucgaucagauuaacggcaaguugaauaggcucaucgguaaaaccaacgaaaaguuccaccagaucgagaaggaauuuuccgaggucgaagggcggauucaggaccuggagaaauacguugaggauacgaagauagacuuauggucuuauaacgccgaacugcucguggcacuugagaaucaacauaccaucgaucugacagacagcgaaaugaacaaauuguucgagaagacuaaaaagcagcuacgagaaaaugcugaggauaugggcaacggaugcuuuaagauuuaccacaaaugugacaaugccugcaucggcucaauucgcaacgggaccuaugaucaugacguauacagagacgaggcucugaauaacagguuccagaucaagggaguggaacucaaaagugguuacaaggauuggauacuguggaucuccuuugccauuagcugcuuccuucugugugucgcauugcucggcuuuaucaugugggccugccagaaagggaauauucgguguaacaucugcauauga

SEQ ID NO: 140572 - RNA, 1701 nt, Artificial Sequence
  derived and/or modified CDS sequence (opt3) from hemagglutinin__InfluenzaA__AIJ10737
augaagaccaucauugcccugagcuacauacucugccuuguggucgcucagaaacugcccggcaacgacaauuccacagcaacuuuguguuuagggcaccaugccguuccuaacggaacgaucgugaagaccauuacaaaugauagaaucgagguaacuaacgcgaccgaacuggugcaaaauucuucaauuggugagaucugcgacaguccacaccagauacuagauggcgaaaacuguacacucaucgacgcucugcuuggggauccgcagugcgacggauuccagaauaaaaagugggaucuguuugucgagaggagcaaagccuauuccaacuguuaccccuaugacgugccugauuacgcaucuuugcggucgcucguugccucaagcggcacccuggaguucaauaacgaaaguuuuaauuggacuggugugacacaaaacgggaccuccucugcuugcauucgccgaagcaauaacuccuucuuuucacgucugaauuggcucacgcauuuaaacuucaaguauccagcacugaacgucacuaugcccaauaacgagcaguuugacaaacuuuacaucuggggagugcaccauccuggcaccgauaaagaccagauuuucuuguaugcccagaguagcggcagaaucacaguaucuacuaagaggucccaacaggcuguuauaccaaauauugggucacggccccgcaucagaaacauuccuagcaggaucaguaucuacuggaccauugugaaaccaggagauauacugcuaaucaauucuacagguaaccucauugccccgcggggcuacuuuaagauccgcuccgggaaaagcucgauaaugcgaucugacgcgcccauuggaaaguguaaguccgaaugcaucaccccuaauggcucaaucccaaacgacaaacccuuccagaaugucaacagaauuacguauggugcauguccuagguacgugaagcagaguacucugaaacuugccacagggaugcggaaugugccagagaagcaaacccguggaaucuuuggcgcuauugccggcuucauagaaaacgggugggagggaauggucgaugguugguauggcuuucgccaccagaauagcgaggggagaggacaggcagcugaccugaaauccacucaagccgcgaucgaucagauuaacggcaaguugaauaggcucaucgguaaaacaaacgaaaaguuccaccagaucgagaaggaguucucugaaguugaagggcggauucaggaccuggagaaauacguggaggauaccaagauagacuuauggagcuauaacgccgaacugcucguagcacuugagaaucaacauacgaucgaucugaccgacucagaaaugaacaaauuguuugagaagacaaagaagcagcuacgagaaaaugcugaggauaugggcaacggaugcuucaagauuuaccacaaaugugacaaugccugcaucggcaguauucgcaacgggacuuaugaucaugacguguacagagacgaggcucugaauaacagguuucagaucaagggagucgaacucaaauccgguuacaaggauuggauacuguggaucagcuucgccauuucuugcuuucuucuguguguggcauugcucggcuucaucaugugggccugccagaaagggaauauucgguguaacaucugcauauga

SEQ ID NO: 140573 - RNA, 1701 nt, Artificial Sequence
  derived and/or modified CDS sequence (opt3) from hemagglutinin__InfluenzaA__AIJ10738
augaagaccaucauugcccugagcuacauacucugccuuguguucgcucagaaacugcccggcaacgacaauuccacagcaacuuuguguuuagggcaccaugccgucccuaacggaacgaucguuaagaccauuacaaaugauagaaucgaggugacuaacgcgaccgaacugguacaaaauucuucaauuggugagaucugcgacaguccacaccagauacuagauggcgaaaacuguacacucaucgacgcucugcuuggggauccgcagugcgacggauuucagaauaaaaagugggaucuguucguggagaggagcaaagccuauuccaacuguuaccccuaugacgucccugauuacgcaucuuugcggucgcucguggccucaagcggcacccuggaauuuaauaacgagaguuucaauuggacugguguuacacaaaacgggaccuccucugcuugcauucgccgaagcaauaacuccuuuuucucacgucugaauuggcucacgcauuuaaacuuuaaguauccagcacugaacgugacuaugcccaauaacgagcacuucgacaaacuuuacaucuggggaguccaucacccuggcaccgauaaagaccagaucuuuuuguaugcccagaguagcggcagaauuacagugucuacuaagaggucccagcaagcuguaauaccaaauauugggucacggccccgcaucagaaacauuccuagcaggaucaguaucuacuggaccauuguuaaaccaggagauauacugcuaaucaauucuacagguaaccucauugccccgcggggcuacuucaagauccgcuccgggaaaagcucgauaaugcgaucugacgcgcccauuggaaaguguaaguccgaaugcaucaccccuaauggcucaaucccaaacgacaaacccuuucagaaugugaacagaauuacguauggugcauguccuagguacgucaagcagaguacucugaaacuugccacagggaugcggaaugugccagagaagcagacccguggaaucuucggcgcuauugccggcuuuauagaaaacgggugggagggaaugguggaugguugguauggcuuccgccaccaaaauagcgaggggagaggacaggcagcugaccugaaauccacucaggccgcgaucgaucaaauuaacggcaaguugaauaggcucaucgguaaaacaaacgaaaaguuccaucagaucgagaaggaauuuucugaggucgaagggcggauucaggaccuggagaaauacguugaggauaccaagauagacuuauggagcuauaacgccgaacugcucguggcacuugagaaucagcacacgaucgaucugaccgacucagaaaugaacaaauuguucgagaagacaaagaagcaacuacgagaaaaugcugaggauaugggcaacggaugcuuuaagauuuaccauaaaugugacaaugccugcaucggcaguauucgcaacgggacuuaugaucacgacguauacagagacgaggcucugaauaacagguuccagaucaagggaguggaacucaaauccgguuacaaggauuggauacuguggaucagcuuugccauuucuugcuuccuucugugugucgcauugcucggcuuuaucaugugggccugccagaaagggaauauucgguguaacaucugcauauga

SEQ ID NO: 140574 - RNA, 1701 nt, Artificial Sequence; identical to SEQ ID NO: 137501
  derived and/or modified CDS sequence (opt3) from hemagglutinin__InfluenzaA__AIJ10740

SEQ ID NO: 140575 - RNA, 1701 nt, Artificial Sequence; identical to SEQ ID NO: 137501
  derived and/or modified CDS sequence (opt3) from hemagglutinin__InfluenzaA__AIJ10741

SEQ ID NO: 140576 - RNA, 1701 nt, Artificial Sequence
  derived and/or modified CDS sequence (opt3) from hemagglutinin__InfluenzaA__AIJ10742
augaagaccaucauugcccugagcuacauacucugccuuguguucgcucagaaacugcccggcaacgacaauuccacagcaacuuuguguuuagggcaccaugccgucccuaacggaacgaucguuaagaccauuacaaaugauagaaucgaggugacuaacgcgaccgaacugguacaaaauucuucaauuggugagaucugcgacaguccacaccagauacuagauggcgaaaacuguacacucaucgacgcucugcuuggggauccgcagugcgacggauuucagaauaaaaagugggaucuguucguggagaggagcaaagccuauuccaacuguuaccccuaugacgucccugauuacgcaucuuugcggucgcucguggccucaagcggcacccuggaauuuaauaacgagaguuucaauuggacugguguuacacaaaacgggaccuccucugcuugcauucgccgaagcaauaacuccuuuuucucacgucugaauuggcucacgcauuuaaacuuuaaguauccagcacugaacgugacuaugcccaauaacgagcaguucgacaaacuuuacaucuggggaguccaccauccuggcaccgauaaagaccagaucuuuuuguaugcccagaguagcggcagaauuacaguggcuacuaagaggucucaacaggccguaauaccaaauauugggucccggccccgcaucagaaacauuccuucaaggaucagcaucuacuggaccauuguuaaaccaggagauauacugcuaaucaauaguacagguaaccucauugcgccgcggggcuacuucaagauccgcucugggaaauccagcauaaugcgaucggacgcacccauuggaaaguguaagucugaaugcaucaccccuaauggcuccaucccaaacgacaaacccuuucagaaugugaacagaauuacguauggugccuguccuagguacgucaagcagucaacucugaaacuugcuacagggaugcggaaugugccagagaagcaaacccguggaaucuucggcgccauugcaggcuuuauagaaaacgggugggagggaaugguggaugguugguauggcuuccgccaccagaauagugaggggagaggacaggcugccgaccugaaaagcacucaagcggccaucgaucagauuaacggcaaguugaauaggcucaucgguaaaacaaacgaaaaguuccaccagaucgagaaggaauuuuccgaggucgaagggcggauucaggaccuggagaaauacguugaggauaccaagauagacuuauggucuuauaacgcagaacugcucguggcucuugagaaucaacauacgaucgaucugaccgacagcgaaaugaacaaauuguucgagaagacaaagaagcagcuacgagaaaaugccgaggauaugggcaacggaugcuuuaagauuuaccacaaaugugacaaugcuugcaucggcucaauucgcaacgggacuuaugaucaugacguauacagagacgaggcccugaauaacagguuccagaucaagggaguggaacucaaaagugguuacaaggauuggauacuguggaucuccuuugcaauuagcugcuuccuucugugugucgccuugcucggcuuuaucaugugggcuugccagaaagggaauauucgguguaacaucugcauauga

SEQ ID NO: 140577 - RNA, 1701 nt, Artificial Sequence
  derived and/or modified CDS sequence (opt3) from hemagglutinin__InfluenzaA__AIJ10743
augaagaccaucauugcccugagcuacauacucugccuuguguucgcucagaaacugcccggcaacgacaauuccacagcaacuuuguguuuagggcaccaugccgucccuaacggaacgaucguuaagaccauuacaaaugauagaaucgaggugacuaacgcgaccgaacugguacaaaauucuucaauuggugagaucugcgacaguccacaccagauacuagauggcgaaaacuguacacucaucgacgcucugcuuggggauccgcagugcgacggauuucagaauaaaaagugggaucuguucguggagaggagcaaagccuauuccaacuguuaccccuaugacgucccugauuacgcaucuuugcggucgcucguggccucaagcggcacccuggaauuuaauaacgagaguuucaauuggacugguguuacacaaaacgggaccuccucugcuugcauucgccgaagcaauaacuccuuuuucucacgucugaauuggcucacgcauuuaaacuuuaaguauccagcacugaacgugacuaugcccaauaacgagcaguucgacaaguuguacaucuggggaguccaccauccuggcaccgauaaagaccagauuuuucuuuaugcccagaguagcggcagaaucacagugucuacuaagaggucccaacaggcuguaauaccaaauauugggucacggccccgcaucagaaacauuccuagcaggaucaguaucuacuggaccauuguuaaaccaggagauauacugcuaaucaauucuacagguaaccucauugccccgcggggcuacuucaagauccgcuccgggaaaagcucgauaaugcgaucugacgcgcccauuggaaaguguaaguccgaaugcaucaccccuaauggcucaaucccaaacgacaaacccuuucagaaugugaacagaauuacguauggugcauguccuagguacgucaagcagaguacucugaaacuugccacagggaugcggaaugugccagagaagcaaacccguggaaucuucggcgcuauugccggcuuuauagaaaacgggugggagggaaugguggaugguugguauggcuuccgccaccagaauagcgaggggagaggacaggcagcugaccugaaauccacucaagccgcgaucgaucagauuaacggcaaguugaauaggcucaucgguaaaacaaacgaaaaguuccaccagaucgagaaggaauuuucugaggucgaagggcggauucaggaccuggagaaauacguugaggauauaaagaucgacuuauggagcuauaacgccgaacugcucguggcacuugagaaucaacauaccauugaucugacggacucagaaaugaacaaauuguucgagaagaccaaaaagcagcuacgagaaaaugcugaggauaugggcaacggaugcuuuaagaucuaccacaaaugugacaaugccugcauuggcaguauccgcaacgggacauaugaucaugacguauacagagacgaggcucugaauaacagguuccagauaaagggaguggaacucaaauccgguuacaaggauuggauccuguggauuagcuuugccaucucuugcuuccuucugugugucgcauugcucggcuuuauuaugugggccugccagaaagggaauauccgguguaacauaugcauuuga

SEQ ID NO: 140578 - RNA, 1701 nt, Artificial Sequence
  derived and/or modified CDS sequence (opt3) from hemagglutinin__InfluenzaA__AIJ10744
augaagaccaucauugcccugagcuacauacucugccuuguguucgcucagaaacugcccggcaacgacaauuccacagcaacuuuguguuuagggcaccaugccgucccuaacggaacgaucguuaagaccauuacaaaugauagaaucgaggugacuaacgcgaccgaacugguacaaaauucuucaauuggugagaucugcgacaguccacaccagauacuagauggcgaaaacuguacacucaucgacgcucugcuuggggauccgcagugcgacggauuucagaauaaaaagugggaucuguucguggagaggagcaaagccuauuccaacuguuaccccuaugacgucccugauuacgcaucuuugcggucgcucguggccucaagcggcacccuggaauuuaauaacgagaguuucaauuggacugguguuacacaaaacgggaccuccucugcuugcauucgccgaagcaauaacuccuuuuucucacgucugaauuggcucacgcauuuaaacuuuaaguauccagcacugaacgugacuaugcccaauaacgagcaguucgacaaacuuuacaucuggggaguccaccauccuggcaccgauaaagaccagaucuuuuuguaugcccagaguagcggcagaauuacagugucuacuaagaggucccaacaggcuguaauaccaaauauugggucacggccccgcaucagaaacauuccuagcaggaucaguaucuacuggaccauuguuaaaccaggagauauacugcuaaucaauucuacagguaaccucauugccccgcggggcuacuucaagauccgcuccgggaaaagcucgauaaugcgaucugacgcgcccauuggaaaguguaaguccgaaugcaucaccccuaauggcucaaucccaaacgacaaacccuuucagaaugugaacagaauuacguauggugcauguccuagguacgucaagcagcggacucugaaacuugccacagggaugcguaaugugccagagaagcaaacccgcggaaucuucggcgcuauugccggcuuuauagaaaacgggugggagggaaugguggaugguugguauggcuucagacaccagaauagugaggggaggggacaggcagcugaccugaaaagcacucaagccgcgaucgaucagauuaacggcaaguugaaucggcucaucgguaaaacaaacgaaaaguuccaccagaucgagaaggaauuuuccgaggucgaagggcgcauucaggaccuggagaaauacguugaggauaccaagauagacuuauggucuuauaacgccgaacugcucguggcacuugagaaucaacauacgaucgaucugaccgacagcgaaaugaacaaauuguucgagaagacaaagaagcagcuacgagaaaaugcugaggauaugggcaacggaugcuuuaagauuuaccacaaaugugacaaugccugcaucggcucaauuagaaacgggacuuaugaucaugacguauacagggacgaggcucugaauaaccgguuccagaucaagggaguggaacucaaaagugguuacaaggauuggauacuguggaucuccuuugccauuagcugcuuccuucugugugucgcauugcucggcuuuaucaugugggccugccagaaagggaauauucgcuguaacaucugcauauga

SEQ ID NO: 140579 - RNA, 1701 nt, Artificial Sequence; identical to SEQ ID NO: 138042
  derived and/or modified CDS sequence (opt3) from hemagglutinin__InfluenzaA__AIJ10745

SEQ ID NO: 140580 - RNA, 1701 nt, Artificial Sequence
  derived and/or modified CDS sequence (opt3) from hemagglutinin__InfluenzaA__AIJ10747
augaagaccaucauugcccugagcuacauacucugccuuguguucgcucagaaacugcccggcaacgacaauuccacagcaacuuuguguuuagggcaccaugccgucccuaacggaacgaucguuaagaccauuacaaaugauagaaucgaggugacuaacgcgaccgaacugguacaaaauucuucaauuggugagaucugcgacaguccacaccagauacuagauggcgaaaacuguacacucaucgacgcucugcuuggggauccgcagugcgacgauuuucagaauaaaaagugggaccuguucguggagaggagcaaagccuauuccaacuguuaccccuaugaugucccugacuacgcaucuuugcggucgcucguggccucaagcggaacccuggaauuuaauaacgagaauuucaacuggacuggcguuacacaaaaugguaccaguuccgcuugcauucgccgaucuaacaauagcuuuuucucccgucugaacuggcucacgcauuuaaacuuuaaguauccagcacugaaugugacuaugcccaacaaugagcaguucgauaaacuuuacaucuggggaguccaccauccugggaccgacaaagaucagaucuuuuuguaugcccagucaaguggcagaauuacagugagcacuaagaggucucaacaggcuguaauaccaaacauuggcucccggccccgcaucagaaauauuccuucaaggaucagcaucuacuggaccauuguuaaaccaggggacauacugcuaaucaacaguacaggaaaucucauugccccgcgggguuacuucaagauccgcucuggcaaauccagcauaaugcgaucggacgcgcccauugggaaguguaagucugaaugcaucaccccuaacggauccaucccaaaugauaaacccuuucagaacgugaauagaauuacguauggcgcauguccuagguacgucaagcagucaacucugaaacuugccacagguaugcggaacgugccagagaagcaaacccgugggaucuucggagcuauugccggcuuuauagaaaauggcugggaggggaugguggacggaugguaugguuuccgccaccagaacagugagggcagagggcaggcagcugaucugaaaagcacucaagccgcgaucgaccagauuaauggaaaguugaacaggcucaucggcaaaacaaacgaaaaguuccaccagaucgagaaggaauuuuccgaggucgaaggucggauucaggaucuggagaaauacguugaggacaccaagauagauuuauggucuuauaaugccgaacugcucguggcacuugagaaccaacauacgaucgaccugaccgauagcgaaaugaauaaauuguucgagaagacaaagaagcagcuacgagaaaacgcugaggacauggggaauggcugcuuuaagauuuaccacaaaugugauaacgccugcaucggaucaauucgcaauggcacuuaugaccaugacguauacagagaugaggcucugaacaauagguuccagaucaaggggguggaacucaaaaguggauacaaggacuggauacuguggaucuccuuugccauuagcugcuuccuucugugugucgcauugcucgguuuuaucaugugggccugccagaaaggcaacauucgguguaauaucugcauauga

SEQ ID NO: 140581 - RNA, 1701 nt, Artificial Sequence; identical to SEQ ID NO: 140580
  derived and/or modified CDS sequence (opt3) from hemagglutinin__InfluenzaA__AIJ10748

SEQ ID NO: 140582 - RNA, 1701 nt, Artificial Sequence
  derived and/or modified CDS sequence (opt3) from hemagglutinin__InfluenzaA__AIJ10750
augaagaccaucauugcccugagcuacauacucugccuuguguucgcucagaaacugcccggcaacgacaauuccacagcaacuuuguguuuagggcaccaugccgucccuaacggaacgaucguuaagaccauuacaaaugauagaaucgaggugacuaacgcgaccgaacugguacaaaauucuucaauuggugagaucugcgacaguccacaccagauacuagauggcgaaaacuguacacucaucgacgcucugcuuggggauccgcagugcgacggauuucagaauaaaaagugggaucuguucguggagaggagcaaagccuauuccaacuguuaccccuaugacgucccugauuacgcaucuuugcggucgcucguggccucaagcggcacccuggaauuuaauaacgagaguuucaauuggacugguguuacacaaaacgggaccuccucugcuugcauucgccgaagcaauuccucauuuuucagucgucugaacuggcucacgcauuuaaauuuuaaguauccagcacugaacgugacuaugcccaacaaugagcaguucgacaaacuuuacaucuggggaguccaccauccuggcaccgauaaagaccagaucuuuuuguaugcccagagcucuggcagaauuacaguguccacuaagaggucacaacaggcuguaauaccaaacauugggagccggccccgcaucagaaauauuccuaguaggaucucuaucuacuggaccauuguuaaaccaggagauauacugcuaaucaacuccacagguaaucucauugccccgcggggcuacuucaagauccgcagcgggaaaucgucuauaauucgauccgacgcgcccaucggaaaguguaagucagaaugcaucaccccuaacggcaguauuccaaaugacaaacccuuucagaacgugaauagaaucacguauggugcauguccuagguacgucaagcagagcacucugaaacuugccacagggaugcggaacgugccagagaagcaaacccguggaauuuucggcgcuauagccggcuuuaucgaaaaugggugggagggaaugguggaugguugguauggcuuccgccaccagaacuccgaggggagaggacaggcagcugaccugaaaucuacucaagccgcgauugaucagaucaauggcaaguugaacaggcucaucgguaaaacaaaugaaaaguuccaccagauugagaaggaauuuagcgaggucgaagggcggauacaggaccuggagaaauacguugaggauaccaagaucgacuuauggucauauaacgccgaacugcucguggcacuugagaaccaacauacgauugaucugaccgacagugaaaugaauaaauuguucgagaagacaaagaagcagcuacgagaaaacgcugaggauaugggcaauggaugcuuuaagaucuaccacaaaugugacaacgccugcauuggcuccauccgcaaugggacuuaugaucauaacguauacagagacgaggcucugaauaacagguuccagauaaagggaguggaacucaaaagcgguuacaaggacuggauccuguggauuucuuuugccaucucaugcuuccuucugugugucgcauugcucggcuuuauuaugugggccugccagaaagggaauauccgguguaacauaugcauuuga

SEQ ID NO: 140583 - RNA, 1701 nt, Artificial Sequence
  derived and/or modified CDS sequence (opt3) from hemagglutinin__InfluenzaA__AIJ10752
augaagaccaucauugcccugagcuacauacucugccuuguguucgcucagaaacugcccggcaacgacaauuccacagcaacuuuguguuuagggcaccaugccgucccuaacggaacgaucguuaagaccauuacaaaugauagaaucgaggugacuaacgcgaccgaacugguacaaaauucuucaauuggugagaucugcgacaguccacaccagauacuagauggcgaaaacuguacacucaucgacgcucugcuuggggauccgcagugcgacggauuucagaauaaaaagugggaucuguucguggagaggagcaaagccuauuccaacuguuaccccuaugacgucccugauuacgcaucuuugcggucgcucguggccucaagcggcacccuggaauuuaauaacgagaguuucaauuggacugguguuacacaaaacgggaccuccucugcuugcauucgccgaagcaauuccucauuuuucagucgucugaacuggcucacgcauuuaaauuuuaaguauccagcacugaacgugacuaugcccaacaaugagcaguucgacaaacuuuacaucuggggaguccaccauccuggcaccgauaaagaccagaucuuuuuguaugcccagagcucuggcagaauuacaguguccacuaagaggucacaacaggcuguaauaccaaacauugggagccggccccgcaucagaaauauuccuaguaggaucucuaucuacuggaccauuguuaaaccaggagauauacugcuaaucaacuccacagguaaucucauugccccgcggggcuacuucaagauccgcagcgggaaaucgucuauaaugcgauccgacgcgcccauuggaaaguguaagucagaaugcaucaccccuaacggcaguaucccaaaugacaaacccuuucagaacgugaauagaauuacguauggugcauguccuagguacgucaagcagagcacucugaaacuugccacagggaugcggaacgugccagagaagcaaacccguggaaucuucggcgcuauugccggcuuuauagaaaaugggugggagggaaugguggaugguugguauggcuuccgccaccagaacuccgaggggagaggacaggcagcugaccugaaaucuacucaagccgcgaucgaucagauuaauggcaaguugaacaggcucaucgguaaaacaaaugaaaaguuccaccagaucgagaaggaauuuagcgaggucgaagggcggauucaggaccuggagaaauacguugaggauaccaagauagacuuauggucauauaacgccgaacugcucguggcacuugagaaccaacauacgaucgaucugaccgacagugaaaugaauaaauuguucgagaagacaaagaagcagcuacgagaaaacgcugaggauaugggcaauggaugcuuuaagauuuaccacaaaugugacaacgccugcaucggcuccauucgcaaugggacuuaugaucaugacguauacagagacgaggcucugaacaauagguuccagaucaagggaguggaacucaaaagcgguuacaaggauuggauacuguggaucucuuuugccaugucaugcuuccuucugugugucgcauugcucggcuuuauuaugugggccugccagaaagggaacauccgguguaauauuugcaucuga

SEQ ID NO: 140584 - RNA, 1701 nt, Artificial Sequence
  derived and/or modified CDS sequence (opt3) from hemagglutinin__InfluenzaA__AIJ10753
augaagaccaucauugcccugagcuacauacucugccuuguguucgcucagaaacugcccggcaacgacaauuccacagcaacuuuguguuuagggcaccaugccgucccuaacggaacgaucguuaagaccauuacaaaugauagaaucgaggugacuaacgcgaccgaacugguacaaaauucuucaauuggugagaucugcgacaguccacaccagauacuagauggcgaaaacuguacacucaucgacgcucugcuuggggauccgcagugcgacggauuucagaauaaaaagugggaucuguucguggagaggagcaaagccuauuccaacuguuaccccuaugacgucccugauuacgcaucuuugcggucgcucguggccucaagcggcacccuggaauuuaauaacgagaguuucaauugggcugguguuacucaaaacgggacauccucuagcugcauucgcggauccaauaacucauuuuucagucgacugaauuggcucacccauuuaaacuuuaaguauccagcacugaacgugacgaugcccaauaacgagcaguucgacaaguuguacaucuggggcguccaccauccuggcacugauaaagaccagauuuuucuuuaugcccagagcucugggcguaucaccguguccacaaagagaucacaacaggcuguaauaccaaauauuggaagcaggccccggauccgcaacauuccuaguagaaucucuaucuacuggacuauuguuaaaccaggugauauacugcuaaucaauuccaccggcaaccucauugccccgaggggguacuucaagauccggagcggaaaaucgucuauaaugcgcuccgacgcgcccauuggcaaguguaagucagaaugcaucacaccuaaugguaguaucccaaacgacaaacccuuucagaaugugaaccgaauuaccuauggggcauguccuagauacgucaagcagagcacgcugaaacuugccacuggaaugaggaaugugccagagaagcaaacacggggcaucuucggcgcuauugccggguuuauagaaaacggaugggaggguaugauggauggcugguauggguuccgucaccaaaauuccgagggacgcggccaggcagcugaccugaaaucuacccaggccgcgaucgaucagauuaacgguaaguugaauagacucaucgggaaaacuaacgaaaaguuccaccagaucgagaaggaauuuagcgagguggaaggcaggauucaggaccuggagaaauacgucgaggauacaaagauagacuuauggucauauaacgccgaacugcucguugcacuugagaaucaacauaccaucgaucugacggacagugaaaugaacaaauuguucgagaagaccaaaaagcagcuacgggaaaaugcugaggauaugggaaacggcugcuuuaagauuuaccacaaaugugacaaugccugcaucggguccauucgaaacggaacauaugaucaugacguguaccgcgacgaggcucugaauaacagauuccagaucaaggguguagaacucaaaagcggcuacaaggauuggauacuguggaucucuuuugccauuucaugcuuccuucuguguguggcauugcucggguuuaucaugugggccugccagaaaggaaauauuagguguaacaucugcauauga

SEQ ID NO: 140585 - RNA, 1701 nt, Artificial Sequence; identical to SEQ ID NO: 138042
  derived and/or modified CDS sequence (opt3) from hemagglutinin__InfluenzaA__AIJ10754

SEQ ID NO: 140586 - RNA, 1701 nt, Artificial Sequence
  derived and/or modified CDS sequence (opt3) from hemagglutinin__InfluenzaA__AIJ10755
augaagaccaucauugcccugagcuacauacucugccuuguguucgcucagaaacugcccggcaacgacaauuccacagcaacuuuguguuuagggcaccaugccgucccuaacggaacgaucguuaagaccauuacaaaugauagaaucgaggugacuaacgcgaccgaacugguacaaaauucuucaauuggugagaucugcgacaguccacaccagauacuagauggcgaaaacuguacacucaucgacgcucugcuuggggauccgcagugcgacggauuucagaauaaaaagugggaucuguucguggagaggagcaaagccuauuccaacuguuaccccuaugacgucccugauuacgcaucuuugcggucgcucguggccucaagcggcacccuggaauuuaauaacgagaguuucaauugggcugguguuacucaaaacgggacauccucugcaugcauucgcggaagcaauuccucauuuuucagucgacugaacuggcucacccauuuaaauuuuaaguauccagcccugaacgugacgaugcccaacaaugagcaguucgacaaguuguacaucuggggcguccaccauccuggcacugauaaagaccagauuuuucuuuaugcucagagcucugggcguaucaccguguccacaaagagaucacaacaggccguaauaccaaacauuggaagcaggccccggauccgcaauauuccuaguagaaucucuaucuacuggacuauuguuaaaccaggugauauacugcuaaucaacuccaccggcaaucucauugcgccgaggggguacuucaagauccggagcggaaaaucgucuauaaugcgcuccgacgcacccauuggcaaguguaagucagaaugcaucacaccuaacgguaguaucccaaaugacaaacccuuucagaacgugaaucgaauuaccuauggggccuguccuagauacgucaagcagagcacgcugaaacuugcuacuggaaugaggaacgugccagagaagcaaacacggggcaucuucggcgccauugcaggguuuauagaaaauggaugggaggguaugguggauggcugguauggguuccgucaccagaacuccgagggacgcggccaggcugccgaccugaaaucuacccaaagcgcgaucgaucagauuaaugguaaguugaacagacucaucgggaaaacuaaugaaaaguuccaccagaucgagaaggaauuuucagaggucgaaggcaggauucaggaccuggagaaauacguugaggauacaaagauagacuuauggaguuauaacgccgaacugcucguggcacuugagaaccaacauaccaucgaucugacggacuccgaaaugaauaaauuguucgagaagaccaaaaagcagcuacgggaaaacgcugaggauaugggaaauggcugcuuuaagauuuaccacaaaugugacaacgccugcaucgggagcauucgaaauggaacauaugaucaugacguauaccgcgacgaggcucugaacaauagauuccagaucaaggguguggaacucaaaucuggcuacaaggauuggauacuguggaucucauuugccauuaguugcuuccuucugugugucgcauugcucggguuuaucaugugggccugccagaaaggaaacauuagguguaauaucugcauauga

SEQ ID NO: 140587 - RNA, 1701 nt, Artificial Sequence; identical to SEQ ID NO: 138042
  derived and/or modified CDS sequence (opt3) from hemagglutinin__InfluenzaA__AIJ10756

SEQ ID NO: 140588 - RNA, 1701 nt, Artificial Sequence
  derived and/or modified CDS sequence (opt3) from hemagglutinin__InfluenzaA__AIJ10757
augaagaccaucauugcccugagcuacauacucugccuugugaucgcucagaaacugcccggcaacgacaauuccacagcaacuuuguguuuagggcaccaugccgucccuaacggaacgauuguuaagaccaucacaaaugauagaauugaggugacuaacgcgaccgaacugguacaaaauucuucaaucggugagauaugcgacaguccacaccagauccuagauggcgaaaacuguacacucauugacgcucugcuuggggauccgcagugcgacggauuccagaauaaaaagugggaucuguuuguggagaggagcaaagccuauuccaacuguuaccccuaugacgucccugauuacgcaucuuugcggucgcucguggccucaagcggcacccuggaguucaauaacgaaaguuuuaauugggcugguguuacucaaaacgggacauccucugcaugcauccgcggaagcaauuccucauucuuuagucgacugaacuggcucacccauuuaaauuucaaguauccagcccugaacgugacgaugcccaacaaugagcaguuugacaaacuuuacauuuggggcguccaccauccuggcacugauaaggaccagaucuucuuguaugcucagagcucugggcguauaaccguguccacaaagagaucacaacaggccguaauuccaaacaucggaagcaggccccggauucgcaauaucccuaguagaaucucuauuuacuggacuauaguuaaaccaggugauauccugcuaauuaacuccaccggcaaucucaucgcgccgaggggguacuuuaagauacggagcggaaaaucgucuauuaugcgcuccgacgcacccaucggcaaguguaagucagaaugcaucacaccuaacgguaguauuccaaaugacaaacccuuccagaacgugaaucgaaucaccuauggggccuguccuagauacgucaagcagagcacgcugaaacuugcuacuggaaugaggaacgugccagagaagcaaacacggggcauuuuuggcgccauagcaggguucaucgaaaauggaugggaggguaugguggauggcugguauggguuucgucaccagaacuccgagggacgcggccaggcugccgaccugaaaucuacccaagcggccauugaucagaucaaugguaaguugaacagacucaucgggaaaacuaaugaaaaguuccaccagauugagaaggaguucagcgaagucgaaggcaggauacaggaccuggagaaauacguugaggauacaaagaucgacuuauggucauauaacgcagaacugcucguggcucuugagaaccaacauaccauugaucugacggacagugaaaugaauaaauuguuugagaagaccaaaaagcagcuacgggaaaacgccgaggauaugggaaauggcugcuucaagaucuaccacaaaugugacaacgcuugcauuggguccauccgaaauggaacauaugaucaugacguauaccgcgacgaggcccugaacaauagauuucagauaaaggguguggaacucaaaagcggcuacaaggauuggauccuguggauuucuuucgcaaucucaugcuuucuucugugugucguguugcucggguucauuaugugggccugccagaaaggaaacaucagguguaauauaugcauuuga

SEQ ID NO: 140589 - RNA, 1701 nt, Artificial Sequence
  derived and/or modified CDS sequence (opt3) from hemagglutinin__InfluenzaA__AIJ10758
augaagaccaucauugcccugagcuacauacucugccuuguguucgcucagaaacugcccggcaacgacaauuccacagcaacuuuguguuuagggcaccaugccgucccuaacggaacgaucguuaagaccauuacaaaugauagaaucgaggugacuaacgcgaccgaacugguacaaaauucuucaauuggugagaucugcgacaguccacaccagauacuagauggcgaaaacuguacacucaucgacgcucugcuuggggauccgcagugcgacggauuucagaauaaaaagugggaucuguucguggagaggagcaaagccuauuccaacuguuaccccuaugacgucccugauuacgcaucuuugcggucgcucguggccucaagcggcacccuggaauuuaauaacgagaguuucaauugggcugguguuacucaaaacgggacauccucugcaugcauucgcggaagcaauuccucauuuuucagucgacugaacuggcucacccauagcaauuuuaaguauccagccuuaaacgugacgaugcccaacaaugagcaguucgacaagcuguacaucuggggcguccaccauccuggcacugauaaagaccagauuuuucuuuaugcucagucuuccgggcguaucaccgugucaacaaagagaagccaacaggccguaauaccaaacauuggaaguaggccccggauccgcaauauuccuucuagaaucuccaucuacuggacuauuguuaaaccaggugauauauugcugaucaacagcaccggcaaucuaauugcgccgaggggguacuucaagauccggucgggaaaaucuuccauaaugcgcucagacgcacccauuggcaaguguaagagugaaugcaucacaccuaacgguagcaucccaaaugacaaacccuuucagaacgugaaucgaauuaccuauggggccuguccuagauacgucaagcaguccacgcucaaacuggcuacuggaaugaggaacgugccagagaagcaaacacggggcaucuucggcgccauugcaggguuuauagaaaauggaugggaggguaugauggauggcugguauggguuccgucaccagaacucugagggacgcggccaggcugccgaccuuaaaagcacccaagcggccaucgaucagauuaaugguaagcugaacagauugaucgggaaaacuaaugaaaaguuccaccagaucgagaaggaauuuucagagguggaaggcaggauucaggaccucgagaaauacgucgaggauacaaagauagaccuguggaguuauaacgcagaauuacugguugcucucgagaaccaacauaccaucgaucuuacggacuccgaaaugaauaaacuguucgagaagaccaaaaagcaguugcgggaaaacgccgaggauaugggaaauggcugcuuuaagauuuaccacaaaugugacaacgcuugcaucgggagcauucgaaauggaacauaugaucaugacguguaccgcgacgaggcccuaaacaauagauuccagaucaaggguguagaacugaaaucuggcuacaaggauuggauacucuggaucucauuugcaauuaguugcuuccugcuuuguguggcccuguugggguuuaucaugugggcuugccagaaaggaaacauuagguguaauaucugcauauga

SEQ ID NO: 140590 - RNA, 1701 nt, Artificial Sequence; identical to SEQ ID NO: 138042
  derived and/or modified CDS sequence (opt3) from hemagglutinin__InfluenzaA__AIJ10759

SEQ ID NO: 140591 - RNA, 1701 nt, Artificial Sequence
  derived and/or modified CDS sequence (opt3) from hemagglutinin__InfluenzaA__AIJ10760
augaagaccaucauugcccugagcuacauacucugccuugugaucgcucagaaacugcccggcaacgacaauuccacagcaacuuuguguuuagggcaccaugccgucccuaacggaacgauuguuaagaccaucacaaaugauagaauugaggugacuaacgcgaccgaacugguacaaaauucuucaaucggugagauaugcgacaguccacaccagauccuagauggcgaaaacuguacacucauugacgcucugcuuggggauccgcagugcgacggauuccagaauaaaaagugggaucuguuuguggagaggagcaaagccuauuccaacuguuaccccuaugacgucccugauuacgcaucuuugcggucgcucguggccucaagcggcacccuggaguucaauaacgaaaguuuuaauugggcugguguuacucaaaacgggacauccucugcaugcauccgcggaagcaauuccucauucuuuagucgacugaacuggcucacccauuuaaauuucaaguauccagcccugaacgugacgaugcccaacaaugagcaguuugacaaacuuuacauuuggggcguccaccauccuggcacugauaaggaccagaucuucuuguaugcucagagcucugggcguauaaccguguccacaaagagaucacaacaggccguaauuccaaacaucggaagcaggccccggauucgcaauaucccuaguagaaucucuauuuacuggacuauaguuaaaccaggugauauccugcuaauuaacuccaccggcaaucucaucgcgccgaggggguacuuuaagauacggagcggaaaaucgucuauuaugcgcuccgacgcacccaucggcaaguguaagucagaaugcaucacaccuaacgguaguauuccaaaugacaaacccuuccagaacgugaaucgaaucaccuauggggccuguccuagauacgucaagcagagcacgcugaaacuugcuacuggaaugaggaacgugccagagaagcaaacacggggcauuuuuggcgccauagcaggguucaucgaaaauggaugggaggguaugguggauggcugguauggguuucgucaccagaacuccgagggacgcggccaggcugccgaccugaaaucuacccaagcggccauugaucagaucaaugguaaguugaacagacucaucgggaaaacuaaugaaaaguuccaccagauugagaaggaguucagcgaagucgaaggcaggauacaggaccuggagaaauacguugaggauacaaagaucgacuuauggucauauaacgcagaacugcucguggcucuugagaaccaacauaccauugaucugacggacagugaaaugaauaaauuguuugagaagaccaaaaagcagcuacgggaaaacgccgaggauaugggaaauggcugcuucaagaucuaccacaaaugugacaacgcuugcauuggguccauccgaaauggaacauaugaucaugacguauaccgcgacgaggcccugaacaauagauuucagauaaaggguguggaacucaaaagcggcuacaaggauuggauccuguggauuucuuucgcaaucucaugcuuucuucugugugucgccuugcucggguucauuaugugggcuugccagaaaggaaacaucagguguaauauaugcauuuga

SEQ ID NO: 140592 - RNA, 1701 nt, Artificial Sequence
  derived and/or modified CDS sequence (opt3) from hemagglutinin__InfluenzaA__AIJ10761
augaagaccaucauugcccugagcuacauacucugccuuguguucgcucagaaacugcccggcaacgacaauuccacagcaacuuuguguuuagggcaccaugccgucccuaacggaacgaucguuaagaccauuacaaaugauagaaucgaggugacuaacgcgaccgaacugguacaaaauucuucaauuggugagaucugcgacaguccacaccagauacuagauggcgaaaacuguacacucaucgacgcucugcuuggggauccgcagugcgacggauuucagaauaaaaagugggaucuguucguggagaggagcaaagccuauuccaacuguuaccccuaugacgucccugauuacgcaucuuugcggucgcucguggccucaagcggcacccuggaauuuaauaacgagaguuucaauugggcugguguuacucaaaacgggacauccucugcaugcauucgcggaagcaauuccucauuuuucagucgacugaacuggcucacccauuuaaauuuuaaguauccagcccugaacgugacgaugcccaacaaugagcaguucgacaaguuguacaucuggggcguccaccauccuggcacugauaaagaccagauuuuucuuuaugcucagagcucugggcguaucaccguguccacaaagagaucacaacaggccguaauaccaaacauuggaagcaggccccggauccgcaauauuccuaguagaaucucuaucuacuggacuauuguuaaaccaggugauauacugcuaaucaacuccaccggcaaucucauugcgccgaggggguacuucaagauccggagcggaaaaucgucuauaaugcgcuccgacgcacccauuggcaaguguaagucagaaugcaucacaccuaacgguaguaucccaaaugacaaacccuuucagaacgugaaucgaauuaccuauggggccuguccuagauacgucaagcagagcacgcugaaacuugcuacuggaaugaggaacgugccagagaagcaaacacggggcaucuucggcgccauugcaggguuuauagaaaauggaugggaggguaugguggauggcugguauggguuccgucaccagaacuccgagggacgcggccaggcugccgaccugaaaucuacccaagcggccaucgaucagauuaaugguaaguugaacagacucaucgggaaaacuaaugaaaaguuccaccagaucgagaaggaauuuagcgaggucgaaggcaggauucaggaccuggagaaauacguugaggauacaaagauagacuuauggucauauaacgcagaacugcucguggcucuugagaaccaacauaccaucgaucugacggacagugaaaugaauaaauuguucgagaagaccaaaaagcagcuacgggaaaacgccgaggauaugggaaauggcugcuuuaagauuuaccacaaaugugacaacgcuugcaucggguccauucgaaauggaacauaugaucaugacguauaccgcaacgaggcccugaauaagagauuccagaucaaagguguggaacucaagagcggcuacaaagacuggauacuguggaucucuuuugcaauuucaugcuuccuucugugugucguguugcucggguuuaucaugugggccugccagaagggaaacauuagguguaauaucugcauauga

SEQ ID NO: 140593 - RNA, 1701 nt, Artificial Sequence; identical to SEQ ID NO: 139940
  derived and/or modified CDS sequence (opt3) from hemagglutinin__InfluenzaA__AIJ10762

SEQ ID NO: 140594 - RNA, 1701 nt, Artificial Sequence; identical to SEQ ID NO: 139940
  derived and/or modified CDS sequence (opt3) from hemagglutinin__InfluenzaA__AIJ10763

SEQ ID NO: 140595 - RNA, 1701 nt, Artificial Sequence; identical to SEQ ID NO: 139940
  derived and/or modified CDS sequence (opt3) from hemagglutinin__InfluenzaA__AIJ10764

SEQ ID NO: 140596 - RNA, 1701 nt, Artificial Sequence; identical to SEQ ID NO: 139940
  derived and/or modified CDS sequence (opt3) from hemagglutinin__InfluenzaA__AIJ10765

SEQ ID NO: 140597 - RNA, 1701 nt, Artificial Sequence; identical to SEQ ID NO: 139940
  derived and/or modified CDS sequence (opt3) from hemagglutinin__InfluenzaA__AIJ10766

SEQ ID NO: 140598 - RNA, 1701 nt, Artificial Sequence; identical to SEQ ID NO: 139940
  derived and/or modified CDS sequence (opt3) from hemagglutinin__InfluenzaA__AIJ10767

SEQ ID NO: 140599 - RNA, 1701 nt, Artificial Sequence
  derived and/or modified CDS sequence (opt3) from hemagglutinin__InfluenzaA__AIJ10768
augaagaccaucauugcccugagcuacauacucugccuuguguucgcucagaaacugcccggcaacgacaauuccacagcaacuuuguguuuagggcaccaugccgucccuaacggaacgaucguuaagaccauuacaaaugauagaaucgaggugacuaacgcgaccgaacugguacaaaauucuucaauuggugagaucugcgacaguccacaccagauacuagauggcgaaaacuguacacucaucgacgcucugcuuggggauccgcagugcgacggauuucagaauaaaaagugggaucuguucguggagaggagcaaagccuauuccaacuguuaccccuaugacgucccugauuacgcaucuuugcggucgcucguggccucaagcggcacccuggaauuuaauaacgagaguuucaauugggcugguguuacucaaaacgggacauccucugcaugcauucgcggaagcaauuccucauuuuucagucgacugaacuggcucacccauuuaaauuuuaaguauccagcccugaacgugacgaugcccaacaaugagcaguucgacaaguuguacaucuggggcguccaccauccuggcacugauaaagaccagauuuuucuuuaugcucagagcucugggcguaucaccguguccacaaagagaucacaacaggccguaauaccaaacauuggaagcaggccccggauccgcaauauuccuaguagaaucucuaucuacuggacuauuguuaaaccaggugauauacugcuaaucaacuccaccggcaaucucauugcgccgaggggguacuucaagauccggagcggaaaaucgucuauaaugcgcuccgacgcacccauuggcaaguguaagucagaaugcaucacaccuaacgguaguaucccaaaugacaaacccuuucagaacgugaaucgaauuaccuauggggccuguccuagauacgucaagcagagcacgcugaaacuugcuacuggaaugaggaacaucccagagaagcaaacacggggcauuuucggcgccauagcaggguuuaucgaaaauggaugggaggguaugguggauggcugguauggguuccgucaccagaacuccgagggacgcggccaggcugccgaccugaaaucuacccaagcggccauugaucagaucaaugguaaguugaacagacucaucgggaaaacuaaugaaaaguuccaccagauugagaaggaauuuagcgagguggaaggcaggauacaggaccuggagaaauacgucgaggauacaaagaucgacuuauggucauauaacgcagaacugcucguugcucuugagaaccaacauaccauugaucugacggacagugaaaugaauaaauuguucgagaagaccaaaaagcagcuacgggaaaacgccgaggauaugggaaauggcugcuuuaagaucuaccacaaaugugacaacgcuugcauuggguccauccgaaauggaacauaugaucaugacguguaccgcgacgaggcccugaacaauagauuccagauaaaggguguagaacucaaaagcggcuacaaggauuggauccuguggauuucuuuugcaaucucaugcuuccuucuguguguggucuugcucggguuuauuaugugggccugccagaaaggaaacaucagguguaauauaugcauuuga

SEQ ID NO: 140600 - RNA, 1701 nt, Artificial Sequence
  derived and/or modified CDS sequence (opt3) from hemagglutinin__InfluenzaA__AIJ10769
augaagaccaucauugcccugagcuacauacucugccuuguguucgcucagaaacugcccggcaacgacaauuccacagcaacuuuguguuuagggcaccaugccgucccuaacggaacgaucguuaagaccauuacaaaugauagaaucgaggugacuaacgcgaccgaacugguacaaaauucuucaauuggugagaucugcgacaguccacaccagauacuagauggcgaaaacuguacacucaucgacgcucugcuuggggauccgcagugcgacggauuucagaauaaaaagugggaucuguucguggagaggagcaaagccuauuccaacuguuaccccuaugacgucccugauuacgcaucuuugcggucgcucguggccucaagcggcacccuggaauuuaauaacgagaguuucaauugggcugguguuacucaaaacgggacauccucugcaugcauucgcggaagcaauuccucauuuuucagucgacugaacuggcucacccauuuaaauuuuaaguauccagcccugaacgugacgaugcccaacaaugagcaguucgacaaguuguacaucuggggcguccaccauccuggcacugauaaagaccagauuuuucuuuaugcucagagcucugggcguaucaccguguccacaaagagaucacaacaggccguaauaccaaacauuggaagcaggccccggauccgcaauauuccuaguagaaucucuaucuacuggacuauuguuaaaccaggugauauacugcuaaucaacuccaccggcaaucucauugcgccgaggggguacuucaagauccagagcggaaaaucgucuauaaugcgguccgacgcacccauuggcaaguguaagucagaaugcaucacaccuaacgguaguaucccaaaugacaaacccuuucagaacgugaaucgcauuaccuauggggccuguccucgauacgucaagcaaagcacgcugaaacuugcuacuggaaugagaaacgugccagagaagcagacaaggggcaucuucggcgccauugcaggguuuauagaaaauggaugggaggguaugguggauggcugguauggguuccggcaccagaacuccgagggacguggccaagcugccgaccugaaaucuacccaggcggccaucgaucagauuaaugguaaguugaaccgccucaucgggaaaacuaaugaaaaguuccaccagaucgagaaggaauuuagcgaggucgaaggcaggauucaagaccuggagaaauacguugaggauacaaagauagacuuauggucauauaacgcagaacugcucguggcucuugagaaccagcauaccaucgaucugacggacagugaaaugaauaaauuguucgagaagaccaaaaagcagcuaagagaaaacgccgaggauaugggaaauggcugcuuuaagauuuaccacaaaugugacaacgcuugcaucggguccauucggaauggaacauaugaucaugacguauaccgagacgaggcccugaacaaucgcuuccagaucaaggguguggaacucaaaagcggcuacaaggauuggauacuguggaucucuuuugcaauuucaugcuuccuucugugugucguguugcucggguuuaucaugugggccugccaaaaaggaaacauuagauguaauaucugcauauga

SEQ ID NO: 140601 - RNA, 1701 nt, Artificial Sequence; identical to SEQ ID NO: 139940
  derived and/or modified CDS sequence (opt3) from hemagglutinin__InfluenzaA__AIJ10770

SEQ ID NO: 140602 - RNA, 1701 nt, Artificial Sequence; identical to SEQ ID NO: 139940
  derived and/or modified CDS sequence (opt3) from hemagglutinin__InfluenzaA__AIJ10771

SEQ ID NO: 140603 - RNA, 1701 nt, Artificial Sequence; identical to SEQ ID NO: 139940
  derived and/or modified CDS sequence (opt3) from hemagglutinin__InfluenzaA__AIJ10772

SEQ ID NO: 140604 - RNA, 1701 nt, Artificial Sequence; identical to SEQ ID NO: 139940
  derived and/or modified CDS sequence (opt3) from hemagglutinin__InfluenzaA__AIJ10773

SEQ ID NO: 140605 - RNA, 1701 nt, Artificial Sequence
  derived and/or modified CDS sequence (opt3) from hemagglutinin__InfluenzaA__AIJ10774
augaagaccaucauugcccugagcuacauacucugccuuguguucgcucagaaacugcccggcaacgacaauuccacagcaacuuuguguuuagggcaccaugccgucccuaacggaacgaucguuaagaccauuacaaaugauagaaucgaggugacuaacgcgaccgaacugguacaaaauucuucaauuggugagaucugcaacaguccacaccagauacuagacggcgaaaauuguacacucaucgaugcucugcuuggggacccgcagugcgauggauuucagaacaaaaagugggaccuguucguggagaggagcaaagccuauuccaauuguuaccccuaugaugucccugacuacgcaucuuugcggucgcucguggccucaagcggcacccuggaauuuaacaaugagaguuucaacugggcugguguuacucaaaaugggacauccucugcaugcauucgcggaagcaacuccucauuuuucagucgacugaauuggcucacccauuuaaacuuuaaguauccagcccugaacgugacgaugcccaauaacgagcaguucgauaaguuguacaucuggggcguccaccauccuggcacugacaaagaucagauuuuucuuuaugcucagagcucugggcguaucaccguguccacaaagagaucacaacaggccguaauaccaaauauuggaagcaggccccggauccgcaacauuccuaguagaaucucuaucuacuggacuauuguuaaaccaggugacauacugcuaaucaauuccaccggcaaccucauugcgccgaggggguacuucaagauccggagcggaaaaucgucuauaaugcgcuccgaugcacccauuggcaaguguaagucagaaugcaucacaccuaaugguaguaucccaaacgacaaacccuuucagaaugugaaccgaauuaccuauggggccuguccuagauacgucaagcagagcacgcugaaacuugcuacuggaaugaggaaugugccagagaagcaaacacggggcaucuucggcgccauugcaggguuuauagaaaacggaugggaggguaugauggacggcugguauggguuccgucaccaaaauuccgagggacgcggccaggcugccgaucugaaaucuacccagagcgcgaucgaccagauuaacgguaaguugaauagacucaucgggaaaacuaacgaaaaguuccaccagaucgagaaggaauuuucagagguggaaggcaggauucaggaucuggagaaauacgucgaggacacaaagauagauuuauggaguuauaacgccgaacugcucguugcacuugagaaucaacauaccaucgaccugacggauuccgaaaugaacaaauuguucgagaagaccaaaaagcagcuacgggaaaaugcugaggacaugggaaacggcugcuuuaagauuuaccacaaaugugauaaugccugcaucgggagcauucgaaacggaacauaugaccaugauguguaccgcgacgaggcucugaauaacagauuccagaucaaggguguagaacucaaaucuggcuacaaggacuggauacuguggaucucauuugccauuaguugcuuccuucuguguguggucuugcucggguuuaucaugugggcaugccagaaaggaaauauuagguguaacaucugcauauga

SEQ ID NO: 140606 - RNA, 1701 nt, Artificial Sequence
  derived and/or modified CDS sequence (opt3) from hemagglutinin__InfluenzaA__AIJ10776
augaagaccaucauugcccugagcugcauacucugucuuguguucgcucagaaacugcccggcaacgacaauuccacagcaacuuugugcuuagggcaccaugccgucccuaacggaacgaucguuaagaccauuacaaaugauagaaucgaggugacuaacgcgaccgaacugguacaaaauucuucaauuggugagaucugugacaguccacaccagauacuagauggcgaaaacugcacacucaucgacgcucugcuuggggauccgcagugugacggauuucagaauaaaaagugggaucuguucguggagaggagcaaagccuacuccaacugcuaucccuacgacgucccugauuaugcaucuuugcggucgcucguggccucaagcggcacccuggaauuuaauaacgagaguuucaauugggcugguguuacucaaaacgggacauccucugcauguauucgcggaagcaauuccucauuuuucagucgacugaacuggcucacccauuuaaauuuuaaguacccagcccugaacgugacgaugcccaacaaugagcaguucgacaaguuguauaucuggggcguccaccauccuggcacugauaaagaccagauuuuucuuuacgcucagagcucugggcguaucaccguguccacaaagagaucacaacaggccguaauaccaaacauuggaagcaggccccggauccgcaauauuccuaguagaaucucuaucuauuggacuauuguuaaaccaggugauauacugcuaaucaacuccaccggcaaucucauugcgccgaggggguacuucaagauccggagcggaaaaucgucuauaaugcgcuccgacgcacccauuggcaagugcaagucagaauguaucacaccuaacgguaguaucccaaaugacaaacccuuucagaacgugaaucgaauuaccuacggggccugcccuagauaugucaagcagagcacgcugaaacuugcuacuggaaugaggaacgugccagagaagcaaacacggggcaucuucggcgccauugcaggguuuauagaaaauggaugggaggguaugguggauggcugguacggguuccgucaccagaacuccgagggacgcggccaggcugccgaccugaaaucuacccaagcggccaucgaucagauuaaugguaaguugaacagacucaucgggaaaacuaaugaaaaguuccaccagaucgagaaggaauuuagcgaggucgaaggcaggauucaggaccuggagaaauauguugaggauacaaagauagacuuauggucauacaacgcagaacugcucguggcucuugagaaccaacauaccaucgaucugacggacagugaaauguccaaauuguucgagaagaccaaaaagcagcuacgggaaaaugccgaggauaugggaaacggcuguuuuaagauuuaucacaaaugcgacaaugcuugcaucgggagcauucgaaacggaacauacgaucaugacguauaucgcgacgaggcccugaauaacagauuccagaucaaggguguggaacucaaaucuggcuacaaggauuggauacuguggaucucauuugcaauuaguuguuuccuucugugcgucguguugcucggguuuaucaugugggccugucagaaaggaaauauuaggugcaacaucuguauauga

SEQ ID NO: 140607 - RNA, 1701 nt, Artificial Sequence; identical to SEQ ID NO: 139940
  derived and/or modified CDS sequence (opt3) from hemagglutinin__InfluenzaA__AIJ10777

SEQ ID NO: 140608 - RNA, 1701 nt, Artificial Sequence; identical to SEQ ID NO: 139940
  derived and/or modified CDS sequence (opt3) from hemagglutinin__InfluenzaA__AIJ10778

SEQ ID NO: 140609 - RNA, 1701 nt, Artificial Sequence
  derived and/or modified CDS sequence (opt3) from hemagglutinin__InfluenzaA__AIJ10780
augaagaccaucauugcccugagcuacauacucugccuuguguucgcucagaaacugcccggcaacgacaauuccacagcaacuuuguguuuagggcaccaugccgucccuaacggaacgaucguuaagaccauuacaaaugauagaaucgaggugacuaacgcgaccgaacugguacaaaauucuucaauuggugagaucugcgacaguccacaccagauacuagauggcgaaaacuguacacucaucgacgcucugcuuggggauccgcagugcgacagcuuucagaauaaaaagugggaucuguucguggagagguccaaagccuauucuaacuguuaccccuaugacgucccugauuacgcaucguugcggucacucguggccagcaguggaacccuggaauuuaauaacgaguccuucaauugggcuggcguuacucaaaacgguacaucuagcgcaugcauucgcggguccaauucaaguuucuuuagccgacugaacuggcucacccauucuaauuuuaaguauccagccuuaaacgugacgaugcccaacaaugagcaguucgacaagcuguacaucuggggaguccaccauccuggcacugauaaagaccagauuuuucuuuaugcucaguccucaggccguaucaccgugagcacaaagagaagucaacaggccguaauaccaaacauugggucuaggccccggauccgcaauauuccuuccagaaucagcaucuacuggacuauuguuaaaccaggagauauauugcugaucaacucgaccgguaaucuaauugcgccgaggggcuacuucaagauccggucugggaaauccucaauaaugcgcagugacgcacccauuggaaaguguaagagcgaaugcaucacaccuaacggcuccaucccaaaugacaaacccuuucagaacgugaaucgaauuaccuauggugccuguccuagauacgucaagcagucuacgcucaaacuggcuacugggaugaggaacgugccagagaagcaaacacggggaaucuucggcgccauugcaggcuuuauagaaaaugggugggagggaaugauggaugguugguauggcuuccgucaccagaacagcgaggggcgcggacaggcugccgaccuuaaaucaacccaagcggccaucgaucagauuaauggcaagcugaacagauugaucgguaaaacuaaugaaaaguuccaccagaucgagaaggaauuuagugagguggaagggaggauucaggacauagagaaauacgucgaggauacaaagaucgaccucugguccuauaacgcagaacuguuaguugcucuggagaaccaacauaccauugaucucacggacagcgaaaugaauaaacuuuucgagaagaccaaaaagcagcugcgggaaaacgccgaggauaugggcaauggaugcuuuaagaucuaccacaaaugugacaacgcuugcauuggcucuauccgaaaugggacauaugaucaugacguguaccgcgacgaggccuugaacaauagauuccagauaaagggaguagaacuaaaaucagguuacaaggauuggauccuguggauuaguuuugcaaucagcugcuuccuccuguguguggcccuucugggcuuuauuaugugggcuugccagaaagggaacaucagguguaauauaugcauuuga

SEQ ID NO: 140610 - RNA, 1701 nt, Artificial Sequence; identical to SEQ ID NO: 139940
  derived and/or modified CDS sequence (opt3) from hemagglutinin__InfluenzaA__AIJ10781

SEQ ID NO: 140611 - RNA, 1701 nt, Artificial Sequence; identical to SEQ ID NO: 139940
  derived and/or modified CDS sequence (opt3) from hemagglutinin__InfluenzaA__AIJ10782

SEQ ID NO: 140612 - RNA, 1701 nt, Artificial Sequence
  derived and/or modified CDS sequence (opt3) from hemagglutinin__InfluenzaA__AIJ10783
augaagaccaucauugcccugagcuacauacucugccuuguguucgcucagaaacugcccggcaacgacaauuccacagcaacuuuguguuuagggcaccaugccgucccuaacggaacgaucguuaagaccauuacaaaugauagaaucgaggugacuaacgcgaccgaacugguacaaaauucuucaauuggugagaucugcgacaguccacaccagauacuagauggcgaaaacuguacacucaucgacgcucugcuuggggauccgcagugcgacggauuucagaauaaaaagugggaucuguucguggagaggagcaaagccuauuccaacuguuaccccuaugacgucccugauuacgcaucuuugcggucgcucguggccucaagcggcacccuggaauuuaauaacgagaguuucaauuggguuggugugacucaaaacgggacauccucugcuugcauucgcggaagcaauuccucauuuuucagucgacugaacuggcucacccauuuaaauuuuaaguauccagcacugaacgucacgaugcccaacaaugagcaguucgacaaguuguacaucuggggcgugcaccauccuggcacugauaaagaccagauuuuucuuuaugcccagagcucugggcguaucaccguauccacaaagagaucacaacaggcuguuauaccaaacauuggaagcaggccccggauccgcaauauuccuaguagaaucucuaucuacuggacuauugugaaaccaggugauauacugcuaaucaacuccaccggcaaucucauugccccgaggggguacuucaagauccggagcggaaaaucgucuauaaugcgcuccgacgcgcccauuggcaaguguaagucagaaugcaucacaccuaacgguaguaucccaaaugacaaacccuuucagaacgucaaucgaauuaccuauggggcauguccuagauacgugaagcagagcacgcugaaacuugccacuggaaugaggaacgugccagagaagcaaacacggggcaucuucggcgcuauugccggguuuauagaaaauggaugggaggguaugaaagauggcugguauggguuccgucaccagaacuccgagggacgcggccaggcagcugaccugaagucuacccaagccgcgaucgaucagauuaaugguaaauugaacagacucaucgggaagacuaaugaaaaguuccaccagaucgagaaagaauuuagcgaggucgaaggcaggauucaggaccuggagaaguacguugaggauacaaaaauagacuuauggucauauaacgccgaacugcucguggcacuugagaaccaacauaccaucgaucugacggacagugaaaugaauaaguuguucgagaaaaccaagaagcagcuacgggaaaacgcugaggauaugggaaauggcugcuuuaaaauuuaccacaagugugacaacgccugcaucggguccauucgaaauggaacauaugaucaugacguauaccgcgacgaggcucugaacaauagauuccagaucaaagguguggaacucaagagcggcuacaaagauuggauacuguggaucucuuuugccauuucaugcuuccuucugugugucgcauugcucggguuuaucaugugggccugccagaagggaaacauuagguguaauaucugcauauga

SEQ ID NO: 140613 - RNA, 1701 nt, Artificial Sequence; identical to SEQ ID NO: 140612
  derived and/or modified CDS sequence (opt3) from hemagglutinin__InfluenzaA__AIJ10784

SEQ ID NO: 140614 - RNA, 1701 nt, Artificial Sequence
  derived and/or modified CDS sequence (opt3) from hemagglutinin__InfluenzaA__AIJ10785
augaagaccaucauugcccugagcuacauacucugccuuguguucgcucagaaacugcccggcaacgacaauuccacagcaacuuuguguuuagggcaccaugccgucccuaacggaacgaucguuaagaccauuacaaaugauagaaucgaggugacuaacgcgaccgaacugguacaaaauucuucaauuggugagaucugcaacaguccacaccagauacuagacggcgaaaauuguacacucaucgaugcucugcuuggggacccgcagugcgauggauuucagaacaaaaagugggaccuguucguggagaggagcaaagccuauuccaauuguuaccccuaugaugucccugacuacgcaucuuugcggucgcucguggccucaagcggcacccuggaauuuaacaaugagaguuucaacugggcugguguuacucaaaaugggacauccucugcaugcauucgcggaagcaacuccucauuuuucagucgacugaauuggcucacccauuuaaacuuuaaguauccagcccugaacgugacgaugcccaauaacgagcaguucgauaaguuguacaucuggggcguccaccauccuggcacugacaaagaucagauuuuucuuuaugcucagagcucugggcguaucaccguguccacaaagagaucacaacaggccguaauaccaaauauuggaagcaggccccggauccgcaacauuccuaguagaaucucuaucuacuggacuauuguuaaaccaggugacauacugcuaaucaauuccaccggcaaccucauugcgccgaggggguacuucaagauccggagcggaaaaucgucuauaaugcgcuccgaugcacccauuggcaaguguaagucagaaugcaucacaccuaaugguaguaucccaaacgacaaacccuuucagaaugugaaccgaauuaccuauggggccuguccuagauacgucaagcagagcacgcugaaacuugcuacuggaaugaggaaugugccagagaagcaaacacggggcaucuucggcgccauugcaggguuuauagaaaacggaugggaggguaugauggacggcugguauggguuccgucaccaaaauuccgagggacgcggccaggcugccgaucugaaaucuacccagagcgcgaucgaccagauuaacgguaaguugaauagacucaucgggaaaacuaacgaaaaguuccaccagaucgagaaggaauuuucagagguggaaggcaggauucaggaucuggagaaauacgucgaggacacaaagauagauuuauggaguuauaacgccgaacugcucguugcacuugagaaucaacauaccaucgaccugacggauuccgaaaugaacaaauuguucgagaagaccaaaaagcagcuacgggaaaaugcugaggacaugggaaacggcugcuuuaagauuuaccacaaaugugauaaugccugcaucgggagcauucgaaacggaacauaugaccaugauguguaccgcgacgaggcucugaauaacagauuccagaucaaggguguagaacucaaaucuggcuacaaggacuggauacuguggaucucauuugccauuaguugcuuccuucuguguguggcauugcucggguuuaucaugugggccugccagaaaggaaauauuagguguaacaucugcauauga

SEQ ID NO: 140615 - RNA, 1701 nt, Artificial Sequence; identical to SEQ ID NO: 140612
  derived and/or modified CDS sequence (opt3) from hemagglutinin__InfluenzaA__AIJ10786

SEQ ID NO: 140616 - RNA, 1701 nt, Artificial Sequence
  derived and/or modified CDS sequence (opt3) from hemagglutinin__InfluenzaA__AIJ10787
augaagaccaucauugcccugagcuacauacucugccuuguguucgcucagaaacugcccggcaacgacaauuccacagcaacuuuguguuuagggcaccaugccgucccuaacggaacgaucguuaagaccauuacaaaugauagaaucgaggugacuaacgcgaccgaacugguacaaaauucuucaauuggugagaucugcgacaguccacaccagauacuagauggcgaaaacuguacacucaucgacgcucugcuuggggauccgcagugcgacggauuucagaauaaaaagugggaucuguucguggagaggagcaaagccuauuccaacuguuaccccuaugacgucccugauuacgcaucuuugcggucgcucguggccucaagcggcacccuggaauuuaauaacgagaguuucaauuggguuggugugacucaaaacgggacauccucugcuugcauucgcggaagcaauuccucauuuuucagucgacugaacuggcucacccauuuaaauuuuaaguauccagcacugaacgucacgaugcccaacaaugagcaguucgacaaguuguacaucuggggcgugcaccauccuggcacugauaaagaccagauuuuucuuuaugcccagagcucugggcguaucaccguauccacaaagagaucacaacaggcuguuauaccaaacauuggaagcaggccccggauccgcaauauuccuaguagaaucucuaucuacuggacuauugugaaaccaggugauauacugcuaaucaacuccaccggcaaucucauugccccgaggggguacuucaagauccggagcggaaaaucgucuauaaugcgcuccgacgcgcccauuggcaaguguaagucagaaugcaucacaccuaacgguaguaucccaaaugacaaacccuuucagaacgucaaucgaauuaccuauggggcauguccuagauacgugaagcagagcacgcugaaacuugccacuggaaugaggaacgugccagagaagcaaacacggggcaucuucggcgcuauugccggguuuauagaaaauggaugggaggguaugaaagauggcugguauggguuccgucaccagaacuccgagggacgcggccaggcagcugaccugaagucuacccaagccgcgaucgaucagauuaaugguaaauugaacagacucaucgggaagacuaaugaaaaguuccaccagaucgagaaagaauuuagcgaggucgaaggcaggauucaggaccuggagaaguacguugaggauacaaaaauagacuuauggucauauaacgccgaacugcucguggcacuugagaaccaacauaccaucgaucugacggacagugaaaugaauaaguuguucgagaaaaccaagaagcagcuacgggaaaacgcugaggauaugggaaauggcugcuuuaaaauuuaccacaagugugacaacgccugcaucggguccauucgaaauggaacauaugaucaugacguauaccgcgacgaggcucugaacaauagauucaggaucaaagguguggaacucaagagcggcuacaaagauuggauacuguggaucucuuuugccauuucaugcuuccuucugugugucgcauugcucggguuuaucaugugggccugccagaagggaaacauucgguguaauaucugcauauga

SEQ ID NO: 140617 - RNA, 1701 nt, Artificial Sequence; identical to SEQ ID NO: 140614
  derived and/or modified CDS sequence (opt3) from hemagglutinin__InfluenzaA__AIJ10788

SEQ ID NO: 140618 - RNA, 1701 nt, Artificial Sequence; identical to SEQ ID NO: 140614
  derived and/or modified CDS sequence (opt3) from hemagglutinin__InfluenzaA__AIJ10789

SEQ ID NO: 140619 - RNA, 1701 nt, Artificial Sequence; identical to SEQ ID NO: 140612
  derived and/or modified CDS sequence (opt3) from hemagglutinin__InfluenzaA__AIJ10790

SEQ ID NO: 140620 - RNA, 1701 nt, Artificial Sequence; identical to SEQ ID NO: 139940
  derived and/or modified CDS sequence (opt3) from hemagglutinin__InfluenzaA__AIJ10791

SEQ ID NO: 140621 - RNA, 1701 nt, Artificial Sequence
  derived and/or modified CDS sequence (opt3) from hemagglutinin__InfluenzaA__AIJ10792
augaagaccaucauugcccugagcuacauacucugccuuguguucgcucagaaacugcccggcgacgauaacuccacagcaacuuuguguuuagggcaccaugccgucccuaauggaacgaucguuaagaccauuacaaacgacagaaucgaggugacuaaugcgaccgaacugguacaaaacucuucaauuggugagaucugcgauaguccacaccagauacuagacggcgaaaauuguacacucaucgaugcucugcuuggggacccgcagugcgauggauuucagaacaaaaagugggaccuguucguggagaggagcaaagccuauuccaauuguuaccccuaugaugucccugacuacgcaucuuugcggucgcucguggccucaagcggcacccuggaauuuaacaaugagaguuucaacugggcugguguuacucaaaaugggacauccucugcaugcauucgcggaagcaacuccucauuuuucagucgacugaauuggcucacccauuuaaacuuuaaguauccagcccugaaugugacgaugcccaacaacgagcaguucgauaaguuguacaucuggggcguccaccauccuggcacugacaaagaucagauuuuucuuuaugcucagagcucugggcguaucaccguguccacaaagagaucacaacaggccguaauaccaaauauuggaagcaggccccggauccgcaacauuccuaguagaaucucuaucuacuggacuauuguuaaaccaggugacauacugcuaaucaauuccaccggcaaccucauugcgccgaggggguacuucaagauccggagcggaaaaucgucuauaaugcgcuccgacgcacccauuggcaaguguaagucagaaugcaucacaccuaaugguaguaucccaaacgauaaacccuuucagaaugugaaccgaauuaccuauggggccuguccuagauacgucaagcagagcacgcugaaacuugcuacuggaaugaggaaugugccagagaagcaaacacggggcaucuucggcgccauugcaggguuuauagaaaacggaugggaggguaugguggacggcugguauggguuccgucaccaaaauuccgagggacgcggccaggcugccgaucugaaaucuacccaggcggccaucgaccagauuaacgguaaguugaauagacucaucgggaaaacuaacgaaaaguuccaccagaucgagaaggaauuuagcgaggucgaaggcaggauucaggaucuggagaaauacguugaggacacaaagauagauuuauggucauauaaugcagaacugcucguggcucuugagaaccaacauaccaucgaccugacggauagugaaaugaacaaauuguucgagaagaccaaaaagcagcuacgggaaaaugccgaggacaugggaaacggcugcuuuaagauuuaccacaaaugugauaaugcuugcaucggguccauucgaaacggaacauaugaccaugacguauaccgcgaugaggcccugaauaacagauuccagaucaaggguguggaacucaaaagcggcuacaaggacuggauacuguggaucucuuuugcaauuucaugcuuccuucugugugucguguugcucggguuuaucaugugggccugccagaaaggaaauauuagguguaacaucugcauauga

SEQ ID NO: 140622 - RNA, 1701 nt, Artificial Sequence; identical to SEQ ID NO: 137931
  derived and/or modified CDS sequence (opt3) from hemagglutinin__InfluenzaA__AIJ29347

SEQ ID NO: 140623 - RNA, 1701 nt, Artificial Sequence
  derived and/or modified CDS sequence (opt3) from hemagglutinin__InfluenzaA__AIJ29349
augaagaccaucauugcccugagcuacauacucugccuuguguucgcucagaaauuucccggcaacgacaauuccacagcaacucuguguuuggggcaccaugccgucccuaacggaacgaucguuaagaccauuacaaaugauagaaucgaggugacuaacgcgaccgaauuaguacaaaauucuucaauuggugagaucugcgacaguccacaccagauacuggauggcgaaaacuguacacuaaucgacgcucuccugggggauccgcagugcgacggauuccagaauaaaaagugggaucuuuuuguggagaggagcaaagccuauuccaacuguuaccccuaugacgucccugauuacgcaucucugcggucguugguggccucaagcggcacccucgaguucaauaacgaaaguuuuaauuggacugguguuacacaaaacgggaccuccucugcuugcauucgccgaagcaauuccucauucuuuagucgucugaacuggcugacgcaucucaauuucaaguauccagcauuaaacgugacuaugcccaacaaugagcaguuugacaagcuguacaucuggggaguccaccauccuggcaccgauaaagaccagauuuuccuuuaugcccagagcucuggcagaaucacaguguccacuaagaggucacaacaggcuguaauaccaaacauugggagccggccccgcaucagaaauauuccuaguaggaucucuaucuacuggaccauuguuaaaccaggagauauauugcugaucaacuccacagguaaucuaauugccccgcggggcuacuuuaagauccgcagcgggaaaucgucuauaaugcgauccgacgcgcccauuggaaaguguaagucagaaugcaucaccccuaacggcaguaucccaaaugacaaacccuuccagaacgugaauagaauuacguauggugcauguccuagguacgucaagcagagcacucucaaacuggccacagggaugcggaacgugccagagaagcaaacccguggaaucuuuggcgcuauugccggcuucauagaaaaugggugggagggaaugguggaugguugguauggcuuccgccaccagaacuccgaggggagaggacaggcagcugaccuuaaaucuacucaagccgcgaucgaucagauuaauggcaagcugaacagguugaucgguaaaacaaaugaaaaguuucaccagaucgagaaggaguucagcgaagucgaagggcggauucaggaccucgagaaauacguugaggauaccaagauagaccuguggucauauaacgccgaauuacugguggcacucgagaaccaacauacgaucgaucuuaccgacagugaaaugaauaaacuguuugagaagacuaaaaagcaguugcgagaaaacgcugaggauaugggcaauggaugcuucaagauuuaccacaaaugugacaacgccugcaucggcuccauucgcaaugggacauaugaucaugacguauacagagacgaggcucuaaacaauagguuucagaucaagggaguggaacugaaaagcgguuacaaggauuggauacucuggaucucuuucgccauuucaugcuuucugcuuugugucgcacuguugggcuucaucaugugggccugccagaaagggaacauucgguguaauaucugcauauga

SEQ ID NO: 140624 - RNA, 1701 nt, Artificial Sequence
  derived and/or modified CDS sequence (opt3) from hemagglutinin__InfluenzaA__AIJ29351
augaagaccaucauugcccugagcuacauacucugccuuguguucgcucagaaacugcccggcaacgacaauuccacagcaacuuuguguuuagggcaccaugccgucccuaacggaacgaucguuaagaccauuacaaaugauagaaucgaggugacuaacgcgaccgaacugguacaaaauucuucaauuggugagaucugcgacaguccacaccagauacuagauggcgaaaacuguacacucaucgacgcucugcuuggggauccgcagugcgacggauuucagaauaaaaagugggaucuguucguggagaggagcaaagccuauuccaacuguuaccccuaugacgucccugauuacgcaucuuugcggucgcucguggccucaagcggcacccuggaauuuaauaacgagaguuucaauuggacugguguuacacaaaacgggaccuccucugcuugcauucgccgaagcaauuccucauuuuucagucgucugaacuggcucacgcauuuaaauuuuaaguauccagcacugaacgugacuaugcccaacaaugagcaguucgacaaacuuuacaucuggggaguccaccauccuggcaccgauaaagaccagaucuuuuuguaugcccagagcucuggcagaauuacaguguccacuaagaggucacaacaggcuguaauaccaaacauugggagccggccccgcaucagaaauauuccuaguaggaucucuaucuacuggaccauuguuaaaccaggagauauacugcuaaucaacuccacagguaaucucauugccccgcggggcuacuucaagauccgcagcgggaaaucgucuauaaugcgauccgacgcgcccauuggaaaguguaagucagaaugcaucaccccuaacggcaguaucccaaaugacaaacccuuucagaacgugaauagaauuacguauggugcauguccuagguacgucaagcagagcacucugaaacuugccacagggaugcggaacgugccagagaagcaaacccguggaaucuucggcgcuauugccggcuuuauagaaaaugggugggagggaaugguggaugguugguauggcuuccgccaccagaacuccgaggggagaggacaggcagcugaccugaaaucuacucaagccgcgaucgaucagauuaauggcaaguugaacaggcucaucgguaaaacaaaugaaaaguuccaccagaucgagaaggaauuuagcgaggucgaagggcggauucaggaccuggagaaauacguugaggauaccaagauagacuuauggucauauaacgccgaacugcucguggcacuugagaaccaacauacgaucgaucugaccgacagugaaaugaauaaauuguucgagaagacaaagaagcagcuacgagaaaacgcugaggauaugggcaauggaugcuuuaagauuuaccacaaaugugacaacgccugcaucggcuccauucgcaaugggacuuaugaucaugacguauacagagacgaggcucugaacaauagguuccagaucaagggaguggaacucaaaagcgguuacaaggauuggauacuguggaucucuuuugccauuucaugccuucuguugugugucgcacuccugggcuucaucaugugggccugccagaaagggaacauucgguguaauaucugcauauga

SEQ ID NO: 140625 - RNA, 1701 nt, Artificial Sequence; identical to SEQ ID NO: 137528
  derived and/or modified CDS sequence (opt3) from hemagglutinin__InfluenzaA__AIJ29353

SEQ ID NO: 140626 - RNA, 1701 nt, Artificial Sequence
  derived and/or modified CDS sequence (opt3) from hemagglutinin__InfluenzaA__AIJ29355
augaagaccaucauugcccugagcuacauacucugccuuguguucgcucagaaacugcccggcaacgacaauuccacagcaacuuuguguuuagggcaccaugccgucccuaacggaacgaucguuaagaccauuacaaaugaucaaaucgaggugacuaacgcgaccgaacugguacagucuucaaguacaggugagauuugcgacagcccacaccagauccuagauggcgaaaauuguacccucauagacgcucugcuuggggauccgcagugcgacggauuucaaaacaaaaagugggaucuguucguggagagauccaaagccuauucuaauuguuaccccuaugacgucccugauuacgcaucguugaggucacucguggccagcaguggcacucuggaauuuaacaaugaguccuucaacuggacagguguuacccagaaugggacgucuagcgcuugcauccggcgcuccaacucaaguuucuuuagccgacugaauuggcucacucauuuaaacuuuaaguauccagcacugaaugugaccaugcccaacaacgagcaguucgacaaacuuuacauuuggggaguccaccauccuggcacagauaaggaccagaucuuuuuguaugcccaaucuuccggccguauuacugugucaaccaagagaagccagcaggcuguaaucccaaauauagggaguaggucucggauucgcaacauccccuccagaauuagcaucuacuggacaaucguuaaaccuggagauauucugcuaauaaauucgaccgguaaccucaucgccccaaggggcuacuucaagauucggucugggaaauccucaaucaugcgcagugacgcgccgauaggaaaguguaauagcgaaugcauuacgcccaacggcuccaucccuaaugacaagccauuucagaacgugaaucgaaucacuuauggugcaugucccagauacgucaaacaaucuacacugaaacuugccaccgggaugaggaacgugccugagaagcagacucggggaauuuucggcgcuaucgccggcuuuauugaaaaugggugggagggaaugguggaugguugguauggcuuccgucaccagaacagcgaggggcgcggacaagcagcugaccugaagucaacacaggccgcgauagaucagaucaauggcaaauugaacagacucauugguaagaccaaugaaaaauuccaccagaucgagaaggaauuuagugaggucgaagggaggauccaagaccuggagaaguacguugaggauacgaaaauugacuuaugguccuauaacgccgaacugcucguggcacuugagaaccagcauaccauagaucugacagacagcgaaaugaauaaguuguucgagaaaacuaagaaacagcuacgggaaaacgcugaggauaugggcaauggaugcuuuaagaucuaccacaagugugacaacgccugcauuggcucuauccgaaaugggaccuauaaccaugauguauaccgcgacgaggcucugaauaacagauuccagauuaaaggaguggaacucaagucagguuacaaagacuggauccuguggauaaguuuugccaucagcugcuuccuucugugugucgcauugcucggcuuuauuaugugggccugccaaaaggggaauaucagguguaacauuugcaucuga

SEQ ID NO: 140627 - RNA, 1701 nt, Artificial Sequence; identical to SEQ ID NO: 137122
  derived and/or modified CDS sequence (opt3) from hemagglutinin__InfluenzaA__AIJ29357

SEQ ID NO: 140628 - RNA, 1701 nt, Artificial Sequence
  derived and/or modified CDS sequence (opt3) from hemagglutinin__InfluenzaA__AIJ29359
augaagaccaucauugcccugagcuacauacucugccuuguguucgcucagaaacugcccggcaacgacaauuccacagcaacuuuguguuuagggcaccaugccgucccuaacggaacgaucguuaagaccauuacaaaugauagaaucgaggugacuaacgcgaccgaacugguacaaaauucuucaauuggugagaucugcgacaguccacaccagauacuagauggcgaaaacuguacacucaucgacgcucugcuuggggauccgcagugcgacggauuucagaauaaaaagugggaucuguucguggagaggagcaaagccuauuccaacuguuaccccuaugacgucccugauuacgcaucuuugcggucgcucguggccucaagcggcacccuggaauuuaauaacgagaguuucaauuggacugguguuacacaaaacgggaccuccucugcuugcauucgccgaagcaauaacuccuuuuucucacgucugaauuggcucacgcauuuaaacuuuaaguauccagcacugaacgugacuaugcccaauaacgagcaguucgacaaacuuuacaucuggggaguccaccauccuggcaccgauaaagaccagaucuuuuuguaugcccagaguagcggcagaauuacagugucuacuaagaggucccaacaggcuguaauaccaaauauugggucacggccccgcaucagaaacauuccuagcaggaucaguaucuacuggaccauuguuaaaccaggagauauacugcuaaucaauucuacagguaaccucauugccccgcggggcuacuucaagauccgcuccgggaaaagcucgauaaugcgaucugacgcgcccauuggaaaguguaaguccgaaugcaucaccccuaauggcucaaucccaaacgacaaacccuuucagaaugugaacagaauuacguauggugcauguccuagguacgucaagcagaguacucugaaacuugccacagggaugcggaaugugccagagaagcaaacccguggaaucuucggcgcuauugccggcuuuauagaaaacgggugggagggaaugguggaugguugguauggcuuccgccaccagaauagcgaggggagaggacaggcagcugaccugaaauccacucaagccgcgaucgaucagauuaacggcaaguugaauaggcucaucgguaaaacaaacgaaaaguuccaccagaucgagaaggaauuuucugaggucgaagggcggauucaggaccuggagaaauacguugaggauaccaagauagacuuauggagcuauaacgccgaacugcucguggcacuugagaaucaacauacgaucgaucugaccgacucagaaaugaacaaauuguucgagaagacaaagaagcagcuacgagaaaaugcugaggauaugggcaacggaugcuuuaagauuuaccacaaaugugacaaugccugcaucggcaguauucgcaacgggacuuaugaucaugacguauacagagacgaggcuaucaauaacagguuccagauaaagggaguggaacugaaauccgguuacaaggauuggauccucuggauuagcuuugccaucucuugcuuccugcuuugugucgcacuguugggcuuuauuaugugggccugccagaaagggaauauccgguguaacauaugcauuuga

SEQ ID NO: 140629 - RNA, 1701 nt, Artificial Sequence
  derived and/or modified CDS sequence (opt3) from hemagglutinin__InfluenzaA__AIJ29361
augaagaccaucauugcccugagcuacauacucugccuuguguucgcucagaaacugcccggcaacgacaauuccacagcaacuuuguguuuagggcaccaugccgucccuaacggaacgaucguuaagaccauuacaaaugauagaaucgaggugacuaacgcgaccgaacugguacaaaauucuucaauuggugagaucugcgacaguccacaccagauacuagauggcgaaaacuguacacucaucgacgcucugcuuggggauccgcagugcgacggauuucagaauaaaaagugggaucuguucguggagaggagcaaagccuauuccaacuguuaccccuaugacgucccugauuacgugucuuugcggucgcucguugcaucaagcggcacccuggaauuuaauaacgagaguuucaauuggacuggugugacacaaaacgggaccuccucugccugcauucgccgaagcaauaacuccuuuuucucacgucugaauuggcucacgcauuuaaacuuuaaguauccagcucugaacgucacuaugcccaauaacgagcaguucgacaaacuuuacaucuggggagugcaccauccuggcaccgauaaagaccagaucuuuuuguaugcacagaguagcggcagaauuacaguaucuacuaagaggucccaacaggccguuauaccaaauauugggucacggccccgcaucagaaacauuccuagcaggaucaguaucuacuggaccauugugaaaccaggagauauacugcuaaucaauucuacagguaaccucauugcuccgcggggcuacuucaagauccgcuccgggaaaagcucgauaaugcgaucugacgcccccauuggaaaguguaaguccgaaugcaucaccccuaauggcucaaucccaaacgacaaacccuuucagaaugucaacagaauuacguauggugcguguccuagguacgugaagcagaguacucugaaacuugcaacagggaugcggaaugugccagagaagcaaacccguggaaucuucggcgccauugcuggcuuuauagaaaacgggugggagggaauggucgaugguugguauggcuuccgccaccagaauagcgaggggagaggacaggccgcagaccugaaauccacucaagcugccaucgaucagauuaacggcaaguugaauaggcucaucgguaaaacaaacgaaaaguuccaccagaucgagaaggaauuuucugagguugaagggcggauucaggaccuggagaaauacguggaggauaccaagauagacuuauggagcuauaacgcggaacugcucguagcccuugagaaucaacauacgaucgaucugaccgacucagaaaugaacaaauuguucgagaagacaaagaagcagcuacgagaaaaugcagaggauaugggcaacggaugcuuuaagauuuaccacaaaugugacaaugcuugcaucggcaguauucgcaacgggacuuaugaucaugacguguacagagacgaggcccugaauaacagguuccagaucaagggagucgaacucaaauccgguuacaaggauuggauacuguggaucagcuuugcuauuucuugcuuccuucuguguguggccuugcucggcuuuaucaugugggcaugccagaaagggaauauucgguguaacaucugcauauga

SEQ ID NO: 140630 - RNA, 1701 nt, Artificial Sequence; identical to SEQ ID NO: 138088
  derived and/or modified CDS sequence (opt3) from hemagglutinin__InfluenzaA__AIL93623

SEQ ID NO: 140631 - RNA, 1701 nt, Artificial Sequence
  derived and/or modified CDS sequence (opt3) from hemagglutinin__InfluenzaA__AIL93634
augaaggccauccuggugguccuccuuuacaccuucgcuacagcaaacgccgacacucugugcauuggcuaucacgcgaauaacagcacggauaccguugacacaguguuggagaagaauguaacugugacccauuccgucaacuuacuggaagauaagcacaaugggaaacuauguaagcucagaggaguggcuccccugcaucuugguaaaugcaacauagccggcuggauccuggggaauccugagugugaaucuuugucaacagcaaguagcugguccuacauuguugagaccucuucgucagacaacggaacuugcuauccaggcgauuuuaucaauuacgaagaacucagggagcagcugagcaguguguccucuuucgaacgguuugagauuuucccgaagacaagcuccuggcccaaccacgacucaaauaagggugucaccgccgcuuguccucaugcaggggccaaaaguuuuuauaagaaccugaucuggcucgugaaaaagggaaauagcuacccaaaauuaucucaauccuauauaaacgauaagggcaaggaaguacugguucuuuggggcauccaccaccccucaacgacugcugaccagcagagcuuguaccagaaugccgaugcguacguguucgucgggaccagucgcuauucuaaaaaguuuaaaccugagauugcaauccgaccaaaggugcgugaccaagagggaagaaugaacuacuauuggacacugguggaacccggugauaaaauuacuuucgaggccaccggcaaccuagucguuccuagguacgcuuuuacaauggaacggaaugccggguccggaaucauaauuagcgacaccccagugcaugauugcaacacgacuugucagacaccggagggcgcaaucaauaccucgcuccccuuccagaacauucacccuaucacuaucgguaagugcccaaaauauguaaagucuacaaagcugcgccuugcuaccgggcugagaaaugugcccuccauucagucaaggggauuguuuggcgccauagcgggcuucaucgaagggggauggacggguauggucgacggcugguacggguaucaucaccaaaacgagcagggaaguggcuacgccgcagaccucaaaagcacccagaaugcuauugauaagaucacaaacaaaguuaauuccgugauagagaagaugaacacucaguuuaccgccguggguaaagaguucaaucaccuggagaagcggauugaaaacuuaaauaagaaagucgacgauggguuccuggacaucuggacauacaacgcugagcuccuugugcuguuggaaaaugagcgcacucuagauuaucaugacucuaacguaaagaaccuguacgagaaaguucgaaaucaacucaagaacaaugccaaagaaaucggcaacggauguuuugaguucuaucacaagugcaauaacaccuguauggaaagcgugaagaauggcacauacgauuauccuaaauacucagaggaagcaaagcugaacagagagaaaauugacggggucaaacuugagaguaccaggaucuaucagauucuggccauauacuccacuguggcuagcucuuugguccucgugguuucacugggagcgaucaguuuuuggaugugcagcaaugguuccuuacagugccggauuuguaucuga

SEQ ID NO: 140632 - RNA, 1701 nt, Artificial Sequence
  derived and/or modified CDS sequence (opt3) from hemagglutinin__InfluenzaA__AIL93645
augaagaccaucauugcccugagcuacauacucugccuuguguucgcucagaaacugcccggcaacgacaauuccacagcaacuuuguguuuagggcaccaugccgucccuaacggaacgaucguuaagaccauuacaaaugauagaaucgaggugacuaacgcgaccgaacugguacaaaauucuucaauuggugagaucugcgacaguccacaccagauacuagauggcgaaaacuguacacucaucgacgcucugcuuggggauccgcagugcgacggauuucagaauaaaaagugggaucuguucguggagaggagcaaagccuauuccaacuguuaccccuaugacgucccugauuacgcaucuuugcggucgcucguggccucaagcggcacccuggaauuuaauaacgagaguuucaauugggcugguguuacucaaaacgggacauccucugcaugcauucgcggaagcaauuccucauuuuucagucgacugaacuggcucacccauuuaaauuuucguuauccagcccugaacgugacgaugcccaacaaugagcaguucgacaaguuguacaucuggggcguccaccauccuggcacugauaaggaccagauuuuucuuuaugcucagagcucugggagaaucaccguguccacaaaaaggucacaacaggccguaauaccaaacauuggaagccggccccgcaucagaaauauuccuaguaggaucucuaucuacuggacuauuguuaagccaggugauauacugcuaaucaacuccaccggcaaucucauugcgccgcggggguacuucaaaauccgcagcggaaagucgucuauaaugcgauccgacgcacccauuggcaaauguaagucagaaugcaucacaccuaacgguaguaucccaaaugacaagcccuuucagaacgugaauagaauuaccuauggggccuguccuagguacgucaaacagagcacgcugaaacuugcuacuggaaugcggaacgugccagagaagcaaacacguggcaucuucggcgccauugcaggguuuauagaaaauggaugggaggguaugguggauggcugguauggguuccgccaccagaacuccgagggaagaggccaggcugccgaccugaagucuacccaagcggccaucgaucagauuaaugguaaauugaacaggcucaucgggaagacuaaugaaaaauuccaccagaucgagaaggaauuuagcgaggucgaaggccggauucaggaccuggagaaguacguugaggauacaaaaauagacuuauggucauauaacgcagaacugcucguggcucuugagaaccaacauaccaucgaucugacggacagugaaaugaauaaguuguucgagaaaaccaagaaacagcuacgagaaaacgccgaggauaugggaaauggcugcuuuaagauuuaccacaagugugacaacgcuugcaucggguccauucgcaauggaacauaugaucaugacguauacagagacgaggcccugaacaauagguuccagaucaaagguguggaacucaagagcggcuacaaagauuggauacuguggaucucuuuugcaauuucaugcuuccuucugugugucgccuugcucggguuuaucaugugggcuugccagaagggaaacauucgguguaauaucugcauauga

SEQ ID NO: 140633 - RNA, 1701 nt, Artificial Sequence; identical to SEQ ID NO: 138042
  derived and/or modified CDS sequence (opt3) from hemagglutinin__InfluenzaA__AIL93657

SEQ ID NO: 140634 - RNA, 1701 nt, Artificial Sequence; identical to SEQ ID NO: 138042
  derived and/or modified CDS sequence (opt3) from hemagglutinin__InfluenzaA__AIL93669

SEQ ID NO: 140635 - RNA, 1701 nt, Artificial Sequence
  derived and/or modified CDS sequence (opt3) from hemagglutinin__InfluenzaA__AIL93681
augaaggccauccuggugguccuccuuuacaccuucgcuacagcaaacgccgacacucugugcauuggcuaucacgcgaauaacagcacggauaccguugacacaguguuggagaagaauguaacugugacccauuccgucaacuuacuggaagauaagcacaaugggaaacuauguaagcucagaggaguggcuccccugcaucuugguaaaugcaacauagccggcuggauccuggggaauccugagugugaaucuuugucaacagcaaguagcugguccuacauuguugagaccucuucgucagacaacggaacuugcuauccaggcgauuuuaucaauuacgaagaacucagggagcagcugagcaguguguccucuuucgaacgguuugagauuuucccgaagacaagcuccuggcccaaccacgacucaaauaagggugucaccgccgcuuguccucaugcaggggccaaaaguuuuuauaagaaccugaucuggcucgugaaaaagggaaauagcuacccaaaauuaucucaauccuauauaaacgauaagggcaaggaaguacugguucuuuggggcauccaccaccccucaacgacugcugaccagcagagcuuguaccagaaugccgaugcguacguguucgucgggaccagucgcuauucuaaaaaguuuaaaccugagauugcaauccgaccaaaggugcgugaccaagagggaagaaugaacuacuauuggacacugguggaacccggugauaaaauuacuuucgaggccaccggcaaccuagucguuccuagguacgcuuuuacaauggaacgguccgccgggagcggaaucauaauuucggacaccccagugcaugauugcaauacgacuugucagacaccggagggcgcaaucaacaccucucuccccuuccagaauauucacccuaucacuaucgguaagugcccaaaauauguaaaguccacaaagcugcgccuugcuaccgggcugagaaacgugcccucaauucagaguaggggauuguuuggcgccauagcgggcuucaucgaagggggauggacggguauggucgacggcugguacggguaucaucaccaaaaugagcagggaagcggcuacgccgcagaccucaaauccacccagaacgcuauugauaagaucacaaauaaagugaacucuguuauagagaagaugaauacucaguuuaccgccguggguaaagaguucaaccaccuggagaagcggauugaaaauuuaaacaagaaagucgacgauggguuccuggacaucuggacauacaaugcugagcuccuugugcuguuggaaaacgagcgcacucuagauuaucaugacagcaauguaaagaaccuguacgagaaaguucgaaaccaacucaagaauaacgccaaagaaaucggcaauggauguuuugaguucuaucacaagugcgauaacaccuguauggaaucagugaagaauggcacauacgacuauccuaaauacagugaggaagcaaagcugaacagagagaaaauugauggggucaaacuugaguccaccaggaucuaucagauucuggccauauacagcacuguggcuucuucauugguccucgugguuagucugggagcgaucagcuuuuggaugugcuccaaugguucuuuacagugccggauuuguaucuga

SEQ ID NO: 140636 - RNA, 1701 nt, Artificial Sequence; identical to SEQ ID NO: 140632
  derived and/or modified CDS sequence (opt3) from hemagglutinin__InfluenzaA__AIL93692

SEQ ID NO: 140637 - RNA, 1701 nt, Artificial Sequence; identical to SEQ ID NO: 140632
  derived and/or modified CDS sequence (opt3) from hemagglutinin__InfluenzaA__AIL93716

SEQ ID NO: 140638 - RNA, 1701 nt, Artificial Sequence; identical to SEQ ID NO: 138042
  derived and/or modified CDS sequence (opt3) from hemagglutinin__InfluenzaA__AIL93728

SEQ ID NO: 140639 - RNA, 1701 nt, Artificial Sequence; identical to SEQ ID NO: 138042
  derived and/or modified CDS sequence (opt3) from hemagglutinin__InfluenzaA__AIL93740

SEQ ID NO: 140640 - RNA, 1701 nt, Artificial Sequence
  derived and/or modified CDS sequence (opt3) from hemagglutinin__InfluenzaA__AIL93752
augaagaccaucauugcccugagcuacauacucugccuuguguucgcucagaaacugcccggcaacgacaauuccacagcaacuuuguguuuagggcaccaugccgucccuaacggaacgaucguuaagaccauuacaaaugauagaaucgaggugacuaacgcgaccgaacugguacaaaauucuucaauuggugagaucugcgacaggccacaccagauacuagauggcgaaaacuguacacucaucgacgcucugcuuggggauccgcagugcgacggauuucagaauaaaaagugggaucuguucguggagcggaguaaagccuauagcaacuguuaccccuaugacgucccugauuacgcauccuugcgcucucucguggccucgucaggcacccuggaauuuaauaacgagagcuucaauugggcugguguuacucaaaacgggacaaguuccgcaugcauucgaggaucuaauagcuccuuuuucucacgucugaacuggcucacccauuuaaauuuuaaguauccagcccugaacgugacgaugcccaacaaugagcaguucgacaaguuguacaucuggggcguccaccauccuggcacugauaaagaccagauuuuucuuuaugcucagaguagcgggagaaucaccgugucuacaaagaaaucccaacaggccguaauaccaaacauuggaucaaggccccggauccgcaauauuccuagcagaaucaguaucuacuggacuauuguuaagccaggugauauacugcuaaucaacucuaccggcaaucucauugcgccgaggggguacuucaaaauccgguccggaaagagcucgauaaugcgcucugacgcacccauuggcaaguguaaauccgaaugcaucacaccuaacgguucaaucccaaaugacaagcccuuucagaacgugaaucgaauuaccuauggggccuguccuagauacgucaaacagaguacgcugaaacuugcuacuggaaugaggaacgugccagagaagcaaacacggggcaucuucggcgccauugcaggguuuauagaaaauggaugggaggguaugguggauggcugguauggguuccgucaccagaacagcgagggacgcggccaggcugccgaccugaaguccacccaagcggccaucgaucagauuaaugguaaauugaacagacucaucgggaagacuaaugaaaaguuccaccagaucgagaaagaauuuucugaggucgaaggcaggauucaggaccuggagaaguacguugaggauacaaaaauagacuuauggagcuauaacgcagaacugcucguggcucuugagaaccaacauaccaucgaucugacggacucagaaaugaauaaguuguucgagaaaaccaagaagcagcuacgggaaaacgccgaggauaugggaaauggcugcuuuaaaauuuaccacaagugugacaacgcuugcaucgggaguauucgaaauggaacauaugaucaugacguauaccgcgacgaggcccugaacaauagauuccagaucaaagguguggaacucaaguccggcuacaaagauuggauacuguggaucagcuuugcaauuucuugcuuccuucugugugucgccuugcucggguuuaucaugugggcuugccagaagggaaacauuagguguaauaucugcauauga

SEQ ID NO: 140641 - RNA, 1701 nt, Artificial Sequence
  derived and/or modified CDS sequence (opt3) from hemagglutinin__InfluenzaA__AIL93764
augaagaccaucauugcccugagcuacauacucugccuuguguucacacagaaacugcccggcaacgacaauuccacugcuacguuguguuuagggcaccaugcagucccuaacggaaccaucguuaagacaauuacuaaugauagaaucgaggugaccaacgccacagaacugguacaaaauucuucaauuggugagaucugcgacaguccacaccagauacuagauggcgaaaacuguacccucaucgacgcgcugcuuggggauccgcagugcgacggauuucagaauaaaaagugggaucuguucguggagaggagcaaggcuuauuccaacuguuaccccuaugacgucccugauuacgccucuuugcggucgcucguggcaucaagcggcacucuggaauuuaauaacgagaguuucaauugggccgguguuacacaaaacgggaccuccucugcuugcauucgcggaagcaauuccucauuuuucagucgacugaacuggcucacgcauuuaaauuuuaaguauccagcacugaacgugacuaugcccaacaaugagcaguucgacaaacuuuacaucuggggcguccaccauccuggcaccgauaaagaccagaucuuuuuguaugcccagagcucugggcguauuacaguguccacuaagagaucacaacaggcuguaauaccaaacauuggaagcaggccccggauccgcaauauuccuaguagaaucucuaucuacuggaccauuguuaaaccaggugauauacugcuaaucaacuccacaggcaaucucauugccccgaggggguacuucaagauccggagcggaaaaucgucuauaaugcgcuccgacgcgcccauuggcaaguguaagucagaaugcaucaccccuaacgguaguaucccaaaugacaaacccuuucagaacgugaaucgaauuacguauggggcauguccuagauacgucaagcagagcacucugaaacuugccacaggaaugaggaacgugccagagaagcaaacccggggcaucuucggcgcuauugccggguuuauagaaaauggaugggaggguaugguggauggcugguauggguuccgucaccagaacuccgagggacgcggccaggcagcugaccugaaaucuacucaagccgcgaucgaucagauuaaugguaaguugaacagacucaucgggaaaacaaaugaaaaguuccaccagaucgagaaggaauuuagcgaggucgaaggcaggauucaggaccuggagaaauacguugaggauaccaagauagacuuauggucauauaacgccgaacugcucguggcacuugagaaccaacauacgaucgaucugaccgacagugaaaugaauaaauuguucgagaagacuaaaaagcagcuacgggaaaacgcugaggauaugggaaauggcugcuuuaagauuuaccacaaaugugacaacgccugcaucggguccauucgaaaugagacauaugaucaugacguauaccgcgacgaagcucugaacaauagauuccagaucaagggaguggagcucaaaagcgguuacaaggauuggauacuguggaucucuuuugccauuucaugcuuccuucugugugucgcauugcucggcuuuaucaugugggccugccagaaagggaacauuagguguaauaucugcauauga

SEQ ID NO: 140642 - RNA, 1701 nt, Artificial Sequence; identical to SEQ ID NO: 138042
  derived and/or modified CDS sequence (opt3) from hemagglutinin__InfluenzaA__AIL93776

SEQ ID NO: 140643 - RNA, 1701 nt, Artificial Sequence; identical to SEQ ID NO: 138042
  derived and/or modified CDS sequence (opt3) from hemagglutinin__InfluenzaA__AIL93788

SEQ ID NO: 140644 - RNA, 1701 nt, Artificial Sequence; identical to SEQ ID NO: 138042
  derived and/or modified CDS sequence (opt3) from hemagglutinin__InfluenzaA__AIL93812

SEQ ID NO: 140645 - RNA, 1701 nt, Artificial Sequence; identical to SEQ ID NO: 138042
  derived and/or modified CDS sequence (opt3) from hemagglutinin__InfluenzaA__AIL93824

SEQ ID NO: 140646 - RNA, 1701 nt, Artificial Sequence; identical to SEQ ID NO: 140635
  derived and/or modified CDS sequence (opt3) from hemagglutinin__InfluenzaA__AIL93836

SEQ ID NO: 140647 - RNA, 1701 nt, Artificial Sequence
  derived and/or modified CDS sequence (opt3) from hemagglutinin__InfluenzaA__AIL93847
augaaggccauccuggugguccuccuuuacaccuucgcuacagcaaacgccgacacucugugcauuggcuaucacgcgaauaacagcacggauaccguugacacaguguuggagaagaauguaacugugacccauuccgucaacuuacuggaagauaagcacaaugggaaacuauguaagcucagaggaguggcuccccugcaucuugguaaaugcaacauagccggcuggauccuggggaauccugagugugaaucuuugucaacagcaaguagcugguccuacauuguugagaccucuucgucagacaacggaacuugcuauccaggcgauuuuaucaauuacgaagaacucagggagcagcugagcaguguguccucuuucgaacgguuugagauuuucccgaagacaagcuccuggcccaaccacgacucaaauaagggugucaccgccgcuuguccucaugcaggggccaaaaguuuuuauaagaaccugaucuggcucgugaaaaagggaaauagcuacccaaaauuaucucaauccuauauaaacgauaagggcaaggaaguacugguucuuuggggcauccaccaccccucaacgacugcugaccagcagagcuuguaccagaaugccgaugcguacguguucgucgggaccagucgcuauucuaaaaaguuuaaaccugagauugcaauccgaccaaaggugcgugaccaagagggaagaaugaacuacuauuggacacugguggaacccggugauaaaauuacuuucgaggccaccggcaaccuagucguuccuagguacgcuuuuacaauggaacgguccgccgggagcggaaucauaauuucggacaccccagugcaugauugcaauacgacuugucagacaccggagggcgcaaucaacaccucucuccccuuccagaauauucacccuaucacuaucgguaagugcccaaaauauguaaaguccacaaagcugcgccuugcuaccgggcugagaaacgugcccucaauucagaguaggggauuguuuggcgccauagcgggcuucaucgaagggggauggacggguauggucgacggcugguacggguaucaucaccaaaaugagcagggaagcggcuacgccgcagaccucaaauccacccagaacgcuauugauaagaucacaaauaaagugaacucuguuauagagaagaugaauacucaguuuaccgccguggguaaagaguucaaccaccuggagaagcggauugaaaauuuaaacaagaaagucgacgauggguuccuggacaucuggacauacaaugcugagcuccuugugcuguuggaaaacgagcgcacucuagauuaucaugacagcaauguaaagaaccuguacgagaaaguucgaaaccaacucaagaauaacgccaaagaaaucggcaauggauguuuugaguucuaucacaagugcgauaacaccuguauggaaucagugaagaauggcacauacgacuauccuaaauacagugaggaagcaaagcugaacagagagaaaauugauggggucaaacuugaguccaccaggaucuaucagauucuggccauauacagcacuguggcuucuucauugguccucgugguuagucugggagcgaucugcuuuuggaugugcagcaaugguuccuuacagugucggauuugcaucuga

SEQ ID NO: 140648 - RNA, 1701 nt, Artificial Sequence; identical to SEQ ID NO: 140632
  derived and/or modified CDS sequence (opt3) from hemagglutinin__InfluenzaA__AIL93858

SEQ ID NO: 140649 - RNA, 1701 nt, Artificial Sequence; identical to SEQ ID NO: 138042
  derived and/or modified CDS sequence (opt3) from hemagglutinin__InfluenzaA__AIL93870

SEQ ID NO: 140650 - RNA, 1701 nt, Artificial Sequence
  derived and/or modified CDS sequence (opt3) from hemagglutinin__InfluenzaA__AIL93882
augaagaccaucauugcccugagcuacauacucugccuuguguucgcucagaaacccccuggcaacgacaauuccacagcaacucuguguuuggggcaccaugccgucccaaacggaacgaucguuaagaccauuacaaaugauagaaucgaggugacuaacgcgaccgaauuaguacaaaauucuucaauuggugagaucugcgacaguccgcaccagauacuggauggcgaaaacuguacacuaaucgacgcucuccugggggauccccagugcgacggauuucagaauaaaaagugggaucuuuucguggagaggagcaaagccuauuccaacuguuacccuuaugacgucccagauuacgcaucucugcggucguugguggccucaagcggcacccucgaauuuaauaacgagaguuucaauugggcugguguuacucaaaacgggacauccucugcaugcauucgcggaagcaauuccucauuuuucagucgacugaacuggcugacccaucucaauuuuaaguaucccgccuuaaacgugacgaugccuaacaaugagcaguucgacaagcuguacaucuggggcguccaccauccaggcacugauaaagaccagauuuuucuuuaugcucagagcucugggcguaucaccguguccacaaagagaucacaacaggccguaauacccaacauuggaagcaggccucggauccgcaauauuccaaguagaaucucuaucuacuggacuauuguuaaaccgggugauauauugcugaucaacuccaccggcaaucuaauugcgcccaggggguacuucaagauccggagcggaaaaucgucuauaaugcgcuccgacgcaccuauuggcaaguguaagucagaaugcaucacaccaaacgguaguauccccaaugacaaaccuuuucagaacgugaaucgaauuaccuauggggccuguccaagauacgucaagcagagcacgcucaaacuggcuacuggaaugaggaacgugcccgagaagcaaacacggggcaucuucggcgccauugcaggguuuauagaaaauggaugggaggguaugguggauggcugguauggguuccgucaccagaacuccgagggacgcggccaggcugccgaccuuaaaucuacccaagcggccaucgaucagauuaaugguaagcugaacagauugaucgggaaaacuaaugaaaaguuccaccagaucgagaaggaauuuagcgaggucgaaggcaggauucaggaccucgagaaauacguugaggauacaaagauagaccuguggucauauaacgcagaauuacugguggcucucgagaaccaacauaccaucgaucuuacggacagugaaaugaauaaacuguucgagaagaccaaaaagcaguugcgggaaaacgccgaggauaugggaaauggcugcuuuaagauuuaccacaaaugugacaacgcuugcaucggguccauucgaaauggaacauaugaucaugacguauaccgcgacgaggcccuaaacaauagauuccagaucaaggguguggaacugaaaagcggcuacaaggauuggauacucuggaucucuuuugcaauuucaugcuuccugcuuugugucgcccuguugggguuuaucaugugggcuugccagaaaggaaacauuagguguaauaucugcauauga

SEQ ID NO: 140651 - RNA, 1701 nt, Artificial Sequence; identical to SEQ ID NO: 138042
  derived and/or modified CDS sequence (opt3) from hemagglutinin__InfluenzaA__AIL93894

SEQ ID NO: 140652 - RNA, 1701 nt, Artificial Sequence
  derived and/or modified CDS sequence (opt3) from hemagglutinin__InfluenzaA__AIL93906
augaaggccauccuggugguccuccuuuacaccuucgcuacagcaaacgccgacacucugugcauuggcuaucacgcgaauaacagcacggauaccguugacacaguguuggagaagaauguaacugugacccauuccauaaacuuacuggaagauaagcacaaugggaaacuauguaagcucagaggagucgcuccccugcaucuugguaaaugcaacaucgccggcuggauucuggggaauccugagugugaaucuuugucaacagcaaguagcugguccuacaucguggagaccucuucgucagacaacggaacuugcuauccaggcgauuuuauuaauuacgaagaacucagggagcagcugagcaguguuuccucuuucgaacgguuugagauguucccgaagacaagcuccuggcccaaccacgacucaaauaagggugugaccgccgcuuguccucaugcaggggccaaaaguuuuuauaagaaccugaucuggcucgucaaaaagggaaauagcuacccaaaauuaucuaaguccuauauaaacgauaagggcaaagaagugcugguacuuuggggcauccaccaccccucaacgacugcugaccaacagagcuuguaccagaaugccgaugcguacguuuucguggggaccaguaaguauucuaaaaaguuuaaaccugagauugcaauccgcccaaagguccgagaccaggagggacguaugaacuacuauuggacacugauugaacccggugauaaaaucacuuucgaggccaccggcaaccuaguggugccuagauacgcuuuugccauggaaaggaaugcaggguccggaauaauuaucagcgacacaccaguccaugauugcaacaccacgugucaaacuccggagggcgcuauuaauacaucgcuccccuuccagaacauccacccuaucaccauugguaagugcccaaaguauguuaaaucuacuaagcugcggcuugccacagggcugcgcaaugugcccuccauacagucaagaggauuguuuggcgcgaucgccggcuucauugaagggggauggaccgguaugguagacggcugguacggguaucaucaccagaacgagcaaggaaguggcuacgcagcugaccucaaaagcacgcagaaugccaucgauaagauaaccaacaaagucaauuccgugauugagaagaugaacacacaguuuacugcuguggguaaggaguucaaucaccuggagaaaaggaucgaaaacuuaaauaagaaaguugacgauggguuccuggacaucuggaccuacaacgccgagcuccuugugcuguuggaaaaugagcggacacuagauuaucaugacucuaacgucaagaaccuguacgagaaagugcgcaaucagcucaagaacaaugcaaaggaaauuggcaacggauguuuugaguucuaucacaaaugcgauaauacuuguauggaaagcguaaagaacggcaccuacgacuauccuaaauacucagaggaagccaagcugaaucgagagaaaaucgaugggguuaaacuugagaguacaagaauuuaucaaauacuggcuaucuacuccaccguggcgagcucuuugguccucguggucucacugggagcaauuaguuuuuggaugugcagcaacgguuccuuacagugcaggaucuguaucuga

SEQ ID NO: 140653 - RNA, 1701 nt, Artificial Sequence
  derived and/or modified CDS sequence (opt3) from hemagglutinin__InfluenzaA__AIL93917
augaagaccaucauugcccugagcuacauacucugccuuguguucgcucagaaacugcccggcaacgacaauuccacagcaacuuuguguuuagggcaccaugccgucccuaacggaacgaucguuaagaccauuacaaaugauagaaucgaggugacuaacgcgaccgaacugguacaaaauucuucaauuggugagaucugcgacaggccacaccagauacuagauggcgaaaacuguacacucaucgacgcucugcuuggggauccgcagugcgacggauuucagaauaaaaagugggaucuguucguggagcggaguaaagccuauagcaacuguuaccccuaugacgucccugauuacgcauccuugcgcucucucguggccucgucaggcacccuggaauuuaauaacgagagcuucaauugggcugguguuacucaaaacgggacaaguuccgcaugcauucgaggaucuaauagcuccuuuuucucacgucugaacuggcucacccauuuaaauuuuaaguauccagcccugaacgugacgaugcccaacaaugagcaguucgacaaguuguacaucuggggcguccaccauccuggcacugauaaagaccagauuuuucuuuaugcucagaguagcgggagaaucaccgugucuacaaagaggucccaacaggccguaauaccaaacauuggaucacggccccgcaucagaaauauuccuagcaggaucaguaucuacuggacuauuguuaaaccaggugauauacugcuaaucaacucuaccggcaaucucauugcgccgcggggguacuucaagauccgcuccggaaaaagcucgauaaugcgaucugacgcacccauuggcaaguguaaguccgaaugcaucacaccuaacgguucaaucccaaaugacaaacccuuucagaacgugaauagaauuaccuauggggccuguccuagguacgucaagcagaguacgcugaaacuugcuacuggaaugcggaacgugccagagaagcaaacacguggcaucuucggcgccauugcaggguuuauagaaaauggaugggaggguaugguggauggcugguauggguuccgccaccagaacagcgagggaagaggccaggcugccgaccugaaauccacccaagcggccaucgaucagauuaaugguaaguugaacaggcucaucgggaaaacuaaugaaaaguuccaccagaucgagaaggaauuuucugaggucgaaggccggauucaggaccuggagaaauacguugaggauacaaagauagacuuauggagcuauaacgcagaacugcucguggcucuugagaaccaacauaccaucgaucugacggacucagaaaugaauaaauuguucgagaagaccaaaaagcagaugcgagaaaacgccgaggauaugggaaauggcugcuuuaagauuuaccacaaaugugacaacgcuugcaucgggaguauucgcaauggaacauaugaucaugacguauacagagacgaggcccuaaacaauagguuccagaucaaggguguggaacugaaauccggcuacaaggauuggauacucuggaucagcuuugcaauuucuugcuuccugcuuugugucgcccuguugggguuuaucaugugggcuugccagaaaggaaacauucgguguaauaucugcauauga

SEQ ID NO: 140654 - RNA, 1701 nt, Artificial Sequence; identical to SEQ ID NO: 138088
  derived and/or modified CDS sequence (opt3) from hemagglutinin__InfluenzaA__AIL93929

SEQ ID NO: 140655 - RNA, 1701 nt, Artificial Sequence
  derived and/or modified CDS sequence (opt3) from hemagglutinin__InfluenzaA__AIL93940
augaaggccauccuggugguccuccuuuacaccuucgcuacagcaaacgccgacacucugugcauuggcuaucacgcgaauaacagcacggauaccguugacacaguguuggagaaaaauguaacugugacccauuccgucaacuuacuggaagauaagcacaaugggaaacuauguaagcucagaggagugucuccccugcaucuugguaaaugcaacauagcuggcuggauccuggggaauccugagugugaaucauugaguacagccagcuccuggucuuacauuguugagaccucgucaagcgacaacggaacuugcuauccaggcgauuuuaucaauuacgaagaacucagggagcagcugaguuccgugucuagcuucgaacgguuugagauuuucccgaagacauccucauggcccaaccacgacaguaauaagggugucaccgcagccuguccucaugcuggggcaaagagcuuuuauaagaaccugaucuggcucgugaaaaagggaaauucuuacccaaaauuaucccaaucauauauaaacgauaagggcaaggaaguacugguucuuuggggcauccaccaccccagcacgacugccgaccagcagaguuuguaccagaaugcugaugccuacguguucgucgggaccucucgcuauuccaaaaaguuuaaaccugagauugcgauccgaccaaaggugcgugaccaagagggaagaaugaacuacuauuggacacugguggaacccggugauaaaauuacuuucgaggcaaccggcaaccuagucguuccuagguacgccuuuacaauggaacggaaugcugggagcggaaucauaauuucggacaccccagugcaugauugcaacacgacuugucagacaccggagggcgccaucaauaccucucuccccuuccagaacauucacccuaucacuaucgguaagugcccaaaauauguaaaguccacaaagcugcgccuugcaaccgggcugagaaaugugcccucaauucagaguaggggauuguuuggcgcuauagccggcuucaucgaagggggauggacggguauggucgacggcugguacggguaucaucaccaaaacgagcagggaagcggcuacgcggccgaccucaaauccacccagaaugcaauugauaagaucacaaacaaaguuaauucugugauagagaagaugaacacucaguuuaccgcuguggguaaagaguucaaucaccuggagaagcggauugaaaacuuaaauaagaaagucgacgauggguuccuggacaucuggacauacaacgccgagcuccuugugcuguuggaaaaugagcgcacucuagauuaucaugacagcaacguaaagaaccuguacgagaaaguucgaaaucaacucaagaacaaugcuaaagaaaucggcaacggauguuuugaguucuaucacaagugcgauaauaccuguauggaaucagugaagaacggcacauacgacuauccuaaauacagugaggaagccaagcugaauagagagaaaauugauggggucaaacuugaguccaccaggaucuaucagauucuggcaauauacagcacuguggccucuucauugguccucgugguuagucugggagcuaucagcuuuuggaugugcuccaacgguucuuuacagugccggauuuguaucuga

SEQ ID NO: 140656 - RNA, 1701 nt, Artificial Sequence; identical to SEQ ID NO: 138042
  derived and/or modified CDS sequence (opt3) from hemagglutinin__InfluenzaA__AIL93951

SEQ ID NO: 140657 - RNA, 1701 nt, Artificial Sequence; identical to SEQ ID NO: 138042
  derived and/or modified CDS sequence (opt3) from hemagglutinin__InfluenzaA__AIL93963

SEQ ID NO: 140658 - RNA, 1701 nt, Artificial Sequence; identical to SEQ ID NO: 137906
  derived and/or modified CDS sequence (opt3) from hemagglutinin__InfluenzaA__AIL93975

SEQ ID NO: 140659 - RNA, 1701 nt, Artificial Sequence; identical to SEQ ID NO: 140635
  derived and/or modified CDS sequence (opt3) from hemagglutinin__InfluenzaA__AIL93987

SEQ ID NO: 140660 - RNA, 1701 nt, Artificial Sequence; identical to SEQ ID NO: 138042
  derived and/or modified CDS sequence (opt3) from hemagglutinin__InfluenzaA__AIL93998

SEQ ID NO: 140661 - RNA, 1701 nt, Artificial Sequence; identical to SEQ ID NO: 140632
  derived and/or modified CDS sequence (opt3) from hemagglutinin__InfluenzaA__AIL94010

SEQ ID NO: 140662 - RNA, 1701 nt, Artificial Sequence; identical to SEQ ID NO: 140632
  derived and/or modified CDS sequence (opt3) from hemagglutinin__InfluenzaA__AIL94022

SEQ ID NO: 140663 - RNA, 1701 nt, Artificial Sequence
  derived and/or modified CDS sequence (opt3) from hemagglutinin__InfluenzaA__AIL94046
augaagaccaucauugcccugagcuacauacucugccuuguguucgcucagaaacugcccggcaacgacaauuccacagcaacuuuguguuuagggcaccaugccgucccuaacggaacgaucguuaagaccauuacaaaugauagaaucgaggugacuaacgcgaccgaacugguacaaaauucuucaauuggugagaucugcgacaggccacaccagauacuagauggcgaaaacuguacacucaucgacgcucugcuuggggauccgcagugcgacggauuucagaauaaaaagugggaucuguucguggagcggaguaaagccuauagcaacuguuaccccuaugacgucccugauuacgcauccuugcgcucucucguggccucgucaggcacccuggaauuuaauaacgagagcuucaauugggcugguguuacucaaaacgggacaaguuccgcaugcauucgaggaucuaauagcuccuuuuucucacgucugaacuggcucacccauuuaaauuuuaaguauccagcccugaacgugacgaugcccaacaaugagcaguucgacaaguuguacaucuggggcguccaccauccuggcacugauaaagaccagauuuuucuuuaugcucagaguagcgggagaaucaccgugucuacaaagaggucccaacaggccguaauaccaaacauuggaucacggccccgcaucagaaauauuccuagcaggaucaguaucuacuggacuauuguuaaaccaggugauauacugcuaaucaacucuaccggcaaucucauugcgccgcggggguacuucaagauccgcuccggaaaaagcucgauaaugcgaucugacgcacccauuggcaaguguaaguccgaaugcaucacaccuaacgguucaaucccaaaugacaaacccuuucagaacgugaauagaauuaccuauggggccuguccuagguacgucaagcagaguacgcugaaacuugcuacuggaaugcggaacgugccagagaagcaaacacguggcaucuucggcgccauugcaggguuuauagaaaauggaugggaggguaugguggauggcugguauggguuccgccaccagaacagcgagggaagaggccaggcugccgaccugaaauccacccaagcggccaucgaucagauuaaugguaaguugaacaggcucaucgggaaaacuaaugaaaaguuccaccagaucgagaaggaauuuucugaggucgaaggccggauucaggaccuggagaaauacguugaggauacaaagauagacuuauggagcuauaacgcagaacugcucguggcucuugagaaccaacauaccaucgaucugacggacucagaaaugaauaaauuguucgagaagaccaaaaagcagcuacgagaaaacgccgaggauaugggaaauggcugcuuuaagauuuaccacaaaugugacaacgcuugcaucgggaguauucgcaauggaacauaugaucaugacguauacagagacgaggcccugaacaauagguuccagaucaaggguguggaacucaaauccggcuacaaggauuggauacuguggaucagcuuugcaauuucuugcuuccuucugugugucgccuugcucggguuuaucaugugggcuugccagaaaggaaacauucgguguaauaucugcauauga

SEQ ID NO: 140664 - RNA, 1701 nt, Artificial Sequence
  derived and/or modified CDS sequence (opt3) from hemagglutinin__InfluenzaA__AIL94058
augaaggccauccuggugguccuccuuuacaccuucgcucccgcaaacgccgacacacugugcauuggcuaucacgcgaauaacagcacugauacgguugacaccguguuggagaagaauguaacagugacucauuccgucaacuuacuggaagauaagcacaaugggaaacuauguaagcucagaggaguggcuccucugcaucuugguaaaugcaacauagccggcuggauccuggggaauccagagugugaaucuuugucaaccgcaaguagcugguccuacauuguugagacaucuucgucagacaacggaaccugcuauccgggcgauuuuaucaauuacgaagaacucagggagcagcugagcaguguguccucuuucgaacgguuugagauuuuccccaagacuagcuccuggccuaaccacgacucaaauaagggugucacagccgcuuguccacaugcaggggccaaaaguuuuuauaagaaccugaucuggcucgugaaaaagggaaauagcuaccccaaauuaucucaauccuauauaaacgauaagggcaaggaaguacugguucuuuggggcauccaccacccuucaaccacggcugaccagcagagcuuguaccagaaugccgaugcguacguguucgucgggaccagucgcuauucuaaaaaguuuaaaccagagauugcaauccgacccaaggugcgugaccaagagggaagaaugaacuacuauuggacucugguggaaccuggugauaaaauuacauucgaggccacuggcaaccuagucguuccaagguacgcuuuuaccaucgaacgguccgccgggagcggaauaauuaucucggacacaccggugcaugauugcaauaccacgugucagacucccgagggcgcaauuaacacaucucucccuuuccagaauauccacccaaucaccauugguaagugccccaaauauguaaaguccacuaagcugcgccuugcuacagggcugagaaacgugccuucaauacagaguaggggauuguuuggcgccaucgcgggcuucauugaagggggauggaccgguauggucgacggcugguacggguaucaucaccaaaaugagcagggaagcggcuacgccgcagaccucaaauccacgcagaacgcuaucgauaagauaaccaauaaagugaacucuguuauugagaagaugaauacacaguuuacugccguggguaaagaguucaaccaccuggagaagcggaucgaaaauuuaaacaagaaagucgacgauggguuccuggacaucuggaccuacaaugcugagcuccuugugcuguuggaaaacgagcgcacacuagauuaucaugacagcaauguaaagaaccuguacgagaaaguucgaaaccaacucaagaauaacgccaaagaaauuggcaauggauguuuugaguucuaucacaagugcgauaacacuuguauggaaucagugaagaauggcaccuacgacuauccaaaauacagugaggaagcaaagcugaacagagagaaaaucgauggggucaaacuugaguccacaaggauuuaucagauacuggccaucuacagcaccguggcuucuucauugguccucgugguuagucugggagcgauuagcuuuuggaugugcuccaaugguucuuuacagugccggaucuguaucuga

SEQ ID NO: 140665 - RNA, 1701 nt, Artificial Sequence; identical to SEQ ID NO: 140635
  derived and/or modified CDS sequence (opt3) from hemagglutinin__InfluenzaA__AIL94069

SEQ ID NO: 140666 - RNA, 1701 nt, Artificial Sequence; identical to SEQ ID NO: 138088
  derived and/or modified CDS sequence (opt3) from hemagglutinin__InfluenzaA__AIL94080

SEQ ID NO: 140667 - RNA, 1701 nt, Artificial Sequence; identical to SEQ ID NO: 140632
  derived and/or modified CDS sequence (opt3) from hemagglutinin__InfluenzaA__AIL94235

SEQ ID NO: 140668 - RNA, 1701 nt, Artificial Sequence; identical to SEQ ID NO: 138088
  derived and/or modified CDS sequence (opt3) from hemagglutinin__InfluenzaA__AIL94247

SEQ ID NO: 140669 - RNA, 1701 nt, Artificial Sequence
  derived and/or modified CDS sequence (opt3) from hemagglutinin__InfluenzaA__AIL94258
augaagaccaucauugcccugagcuacauacucugccuuguguucacacagaaacugcccggcaacgacaauuccacugcuacguuguguuuagggcaccaugcagucccuaacggaaccaucguuaagacaauuacuaaugauagaaucgaggugaccaacgccacagaacugguacaaaauucuucaauuggugagaucugcgacaguccacaccagauacuagauggcgaaaacuguacccucaucgacgcgcugcuuggggauccgcagugcgacggauuucagaauaaaaagugggaucuguucguggagaggagcaaggcuuauuccaacuguuaccccuaugacgucccugauuacgccucuuugcggucgcucguggcaucaagcggcacucuggaauuuaauaacgagaguuucaauugggccgguguuacacaaaacgggaccuccucugcuugcauucgcggaagcaauuccucauuuuucagucgacugaacuggcucacgcauuuaaauuuuaaguauccagcacugaacgugacuaugcccaacaaugagcaguucgacaaacuuuacaucuggggcguccaccauccuggcaccgauaaagaccagaucuuuuuguaugcccagagcucugggcguauuacaguguccacuaagagaucacaacaggcuguaauaccaaacauuggaagcaggccccggauccgcaauauuccuaguagaaucucuaucuacuggaccauuguuaaaccaggugauauacugcuaaucaacuccacaggcaaucucauugccccgaggggguacuucaagauccggagcggaaaaucgucuauaaugcgcuccgacgcgcccauuggcaaguguaagucagaaugcaucaccccuaacgguaguaucccaaaugacaaacccuuucagaacgugaaucgaauuacguauggggcauguccuagauacgucaagcagagcacucugaaacuugccacaggaaugaggaacgugccagagaagcaaacccggggcaucuucggcgcuauugccggguuuauagaaaauggaugggaggguaugguggauggcugguauggguuccgucaccagaacuccgagggacgcggccaggcagcugaccugaaaucuacucaagccgcgaucgaucagauuaaugguaaguugaacagacucaucgggaaaacaaaugaaaaguuccaccagaucgagaaggaauuuagcgaggucgaaggcaggauucaggaccuggagaaauacguugaggauaccaagauagacuuauggucauauaacgccgaacugcucguggcacuugagaaccaacauacgaucgaucugaccgacagugaaaugaauaaauuguucgagaagacuaaaaagcagcuacgggaaaacgcugaggauaugggaaauggcugcuuuaagauuuaccacaaaugugacaacgccugcaucggguccauucgaaauggaacauaugaucaugacguauaccgcgacgaggcucugaacaauagauuccagaucaaggguguggaacucaaaagcggcuacaaggauuggauacuguggaucucuuuugccauuucaugcuuccuucugugugucgcauugcucggguuuaucaugugggccugccagaaaggaaacauuagguguaauaucugcauauga

SEQ ID NO: 140670 - RNA, 1701 nt, Artificial Sequence
  derived and/or modified CDS sequence (opt3) from hemagglutinin__InfluenzaA__AIL94270
augaagaccaucauugcccugagcuacauacucugccuuguguucgcucagaaacugcccggcaacgacaauuccacagcaacuuuguguuuagggcaccaugccgucccuaacggaacgaucguuaagaccauuacaaaugauagaaucgaggugacuaacgcgaccgaacugguacaaaauucuucaauuggugagaucugcgacaguccacaccagauacuagauggcgaaaacuguacacucaucgacgcucugcuuggggauccgcagugcgacggauuucagaauaaaaagugggaucuguucguggagaggagcaaagccuauuccaacuguuaccccuaugacgucccugauuacgcaucuuugcggucgcucguggccucaagcggcacccuggaauuuaauaacgagaguuucaauugggcugguguuacucaaaacgggacauccucugcaugcauucgcggaagcaauuccucauuuuucagucgacugaacuggcucacccauuuaaauuuuaaguauccagcccugaacgugacgaugcccaacaaugagcaguucgacaaguuguacaucuggggcguccaccauccuggcacugauaaagaccagauuuuucuuuaugcucagagcucugggcguaucaccguguccacaaagagaucacaacaggccguaauaccaaacauuggaagcaggccccggauccgcaauauuccuaguagaaucucuaucuacuggacuauuguuaaaccaggugauauacugcuaaucaacuccaccggcaaucucauugcgccgaggggguacuucaagauccggagcggaaaaucgucuauaaugcgcuccgacgcacccauuggcaaguguaacucagaaugcaucacaccuaaugguaguaucccaaacgacaagcccuuucagaaugugaaccgaauuaccuauggggccuguccuagauacgucaaacagagcacgcugaaacuugcuacuggaaugaggaaugugccagagaagcaaacacggggcaucuucggcgccauugcaggguuuauagaaaacggaugggaggguaugguggauggcugguauggguuccgucaccaaaauuccgagggacgcggccaggcugccgaccugaagucuacccaggcggccaucgaucagauuaacgguaaauugaauagacucaucgggaagacuaacgaaaaauuccaccagaucgagaaggaauuuagcgaggucgaaggcaggauucaggaccuggagaaguacguugaggauacaaaaauagacuuauggucauauaacgcagaacugcucguggcucuugagaaucaacauaccaucgaucugacggacagugaaaugaacaaguuguucgagaaaaccaagaaacagcuacgggaaaaugccgaggauaugggaaacggcugcuuuaagauuuaccacaagugugacaaugcuugcaucggguccauucgaaacggaacauaugaucaugacguauaccgcgacgaggcccugaauaacagauuccagaucaaagguguggaacucaagagcggcuacaaagauuggauacuguggaucucuuuugcaauuucaugcuuccuucugugugucgccuugcucggguuuaucaugugggcuugccagaagggaaauauuagguguaacaucugcauauga

SEQ ID NO: 140671 - RNA, 1701 nt, Artificial Sequence; identical to SEQ ID NO: 138042
  derived and/or modified CDS sequence (opt3) from hemagglutinin__InfluenzaA__AIL94282

SEQ ID NO: 140672 - RNA, 1701 nt, Artificial Sequence; identical to SEQ ID NO: 138042
  derived and/or modified CDS sequence (opt3) from hemagglutinin__InfluenzaA__AIL94294

SEQ ID NO: 140673 - RNA, 1701 nt, Artificial Sequence
  derived and/or modified CDS sequence (opt3) from hemagglutinin__InfluenzaA__AIL94306
augaagaccaucacagcccugagcuacauucucugccuugcuuucgcacagaaacccccuggcaacgacaauuccacugccacgcuguguuuggggcaccaugcggugccaaacggaaccauagucaagacaaucacuaaugauagaauugagguuaccaacgcuacagaauuagugcaaaauucuucaaucggugagauuugcgacaguccgcaccagauccuggauggcgaaaacuguacccuaauagacgcccuccugggggauccccagugcgacggauuucagaauaaaaagugggaucuuuucguagagaggagcaaagcauauuccaacuguuacccuuaugacgugccagauuacgccucucugcggucguuggucgcuucaagcggcacucucgaauuuaauaacgagaguuucaauugggccggugugacacaaaacgggaccuccucugcaugcauccgcggaagcaauuccucauuuuucagucgacugaacuggcugacgcaucucaauuuuaaguaucccgcuuuaaacguuacuaugccuaacaaugagcaguucgacaagcuguacauuuggggcgugcaccauccaggcaccgauaaagaccagaucuuucuuuaugcccagagcucugggcguauuacagucuccacuaagagaucacaacaggcggugauccccaacauaggaagcaggccucggauucgcaauaucccaaguagaauuucuaucuacuggaccaucguaaaaccgggugauauuuugcugauaaacuccacaggcaaucuaaucgcacccaggggguacuucaagauucggagcggaaaaucgucuaucaugcgcuccgacgccccuauaggcaaguguaagucagaaugcauuaccccaaacgguaguauccccaaugacaaaccuuuucagaacguuaaucgaaucacguauggggcuuguccaagauacgugaagcagagcacucucaaacuggccacaggaaugaggaacguccccgagaagcaaacccggggcauuuucggcgcaaucgcuggguuuauugaaaauggaugggaggguaugguggauggcugguauggguuccgucaccagaacuccgagggacgcggccaggccgcggaccuuaaaucuacucaagccgcaauagaucagaucaaugguaagcugaacagauugauugggaaaacaaaugaaaaguuccaccagaucgagaaggaauuuagcgagguggaaggcaggauccaggaccucgagaaauacgucgaggauaccaagauugaccuguggucauauaacgcugaauuacugguugcccucgagaaccaacauacgauagaucuuaccgacagugaaaugaauaaacuguucgagaagacuaaaaagcaguugcgggaaaacgcugaggauaugggaaauggcugcuuuaagaucuaccacaaaugugacaacgccugcauuggguccauccgaaauggaacauaugaucaugacguguaccgcgacgaggcacuaaacaauagauuccagauuaaggguguagaacugaaaagcggcuacaaggauuggauccucuggauaucuuuugccaucucaugcuuccugcuuuguguggcucuguugggguuuauuaugugggcgugccagaaaggaaacaucagguguaauauuugcaucuga

SEQ ID NO: 140674 - RNA, 1701 nt, Artificial Sequence
  derived and/or modified CDS sequence (opt3) from hemagglutinin__InfluenzaA__AIL94318
augaagaccaucauugcccugagcuacauacucugccuuguguucgcucagaaacugcccggcaacgacaauuccacagcaacuuuguguuuagggcaccaugccgucccuaacggaacgaucguuaagaccauuacaaaugauagaaucgaggugacuaacgcgaccgaacugguacaaaauucuucaauuggugagaucugcgacaguccacaccagauacuagauggcgaaaacuguacacucaucgacgcucugcuuggggauccgcagugcgacggauuucagaauaaaaagugggaucuguucguggagaggagcaaagccuauuccaacuguuaccccuaugacgucccugauuacgcaucuuugcggucgcucguggccucaagcggcacccuggaauuuaauaacgagaguuucaauuggacugguguuacacaaaacgggaccuccucugcuugcauucgccgaagcaauuccucauuuuucagucgucugaacuggcucacgcauuuaaauuuuaaguauccagcacugaacgugacuaugcccaacaaugagcaguucgacaaacuuuacaucuggggaguccaccauccuggcaccgauaaagaccagaucuuuuuguaugcccagagcucuggcagaauuacaguguccacuaagaggucacaacaggcuguaauaccaaacauugggagccggccccgcaucagaaauauuccuaguaggaucucuaucuacuggaccauuguuaaaccaggagauauacugcuaaucaacuccacagguaaucucauugccccgcggggcuacuucaagauccgcagcgggaaaucgucuauaaugcgauccgacgcgcccauuggaaaguguaagucagaaugcaucaccccuaacggcaguaucccaaaugacaaacccuuucagaacgugaauagaauuacguauggugcauguccuagguacgucaagcagagcacucugaaacuugccacagggaugcggaacgugccagagaagcaaacccguggaaucuucggcgcuauugccggcuuuauagaaaaugggugggagggaaugguggaugguugguauggcuuccgccaccugaacuccgaggggagaggacaggcagcugacuugaaaucuacucaggccgcgaucgaucaaauuaauggcaagcucaacaggcugaucgguaaaacaaaugaaaaguuccaccagaucgagaaggaauuuagcgaggucgaagggcggauucaggacuuagagaaauacguugaggauaccaagauagaccuguggucauauaacgccgaacuccuuguggcacuggagaaccagcauacgaucgauuugaccgacagugaaaugaauaaacuauucgagaagacaaagaagcaacugcgagaaaacgcugaggauaugggcaauggaugcuuuaagauuuaccacaaaugugacaacgccugcaucggcuccauucgcaaugggacuuaugaucauaacguauacagagacgaggcucucaauaacagguuccagaucaagggaguggaacugaaaagcgguuacaaggacuggauacuuuggaucucuuuugccauuucaugcuuccuguugugugucgcacuccugggcuuuaucaugugggccugccagaaagggaauauucgguguaacaucugcauauga

SEQ ID NO: 140675 - RNA, 1701 nt, Artificial Sequence; identical to SEQ ID NO: 137906
  derived and/or modified CDS sequence (opt3) from hemagglutinin__InfluenzaA__AIL94330

SEQ ID NO: 140676 - RNA, 1701 nt, Artificial Sequence; identical to SEQ ID NO: 138088
  derived and/or modified CDS sequence (opt3) from hemagglutinin__InfluenzaA__AIL94354

SEQ ID NO: 140677 - RNA, 1701 nt, Artificial Sequence; identical to SEQ ID NO: 138042
  derived and/or modified CDS sequence (opt3) from hemagglutinin__InfluenzaA__AIL94365

SEQ ID NO: 140678 - RNA, 1701 nt, Artificial Sequence
  derived and/or modified CDS sequence (opt3) from hemagglutinin__InfluenzaA__AIL94377
augaagaccaucauugcccugagcuacauacucugccuuguguucgcucagaaacugcccggcaacgacaauuccacagcaacuuuguguuuagggcaccaugccgucccuaacggaacgaucguuaagaccauuacaaaugauagaaucgaggugacuaacgcgaccgaacugguacaaaauucuucaauuggugagaucugcgacaguccacaccagauacuagauggcgaaaacuguacacucaucgacgcucugcuuggggauccgcauugcgacggauuucagaauaaaaagugggaucuguucguggagaggagcaaagccuauuccaacuguuaccccuaugacgucccugauuacgcaucuuugcggucgcucguggccucaagcggcacccuggaauuuaauaacgagaguuucaauugggcugguguuacucagaacgggacauccucugcaugcauucgcggaagcaauuccucauuuuucagucgacugaacuggcucacccacuuaaauuuuaaguauccagcccugaacgugacgaugcccaacaaugagcaauucgacaaguuguacaucuggggcguccaucacccuggcacugauaaagaccagauuuuucuuuaugcucagagcucugggcguaucaccguguccacaaagagaucacagcaagccguaauaccaaacauuggaagcaggccccggauccgcaauauuccuaguagaaucucuaucuacuggacuauuguuaaaccaggugauauacugcuaaucaacuccaccggcaaucucauugcgccgaggggguacuucaagauccggagcggaaaaucgucuauaaugcgcuccgacgcacccauuggcaaguguaagucagaaugcaucacaccuaacgguaguaucccaaaugacaaacccuuucagaacgugaaucgaauuaccuauggggccuguccuagauacgucaagcagagcacgcugaaacuugcuacuggaaugaggaacgugccagagaagcagacacggggcaucuucggcgccauugcaggguuuauagaaaauggaugggaggguaugguggauggcugguauggguuccgucaccaaaacuccgagggacgcggccaggcugccgaccugaaaucuacccaggcggccaucgaucaaauuaaugguaaguugaacagacucaucgggaaaacuaaugaaaaguuccaucagaucgagaaggaauuuagcgaggucgaaggcaggauucaggaccuggagaaauacguugaggauacaaagauagacuuauggucauauaacgcagaacugcucguggcucuugagaaccagcacaccaucgaucugacggacagugaaaugaauaaauuguucgagaagaccaaaaagcaacuacgggaaaacgccgaggauaugggaaauggcugcuuuaagauuuaccauaaaugugacaacgcuugcaucggguccauucgaaauggaacauaugaucacgacguauaccgcgacgaggcccugaacaauagauuccagaucaaggguguggaacucaaaagcggcuacaaggauuggauacuguggaucucuuuugcaauuucaugcuuccuucugugugucgccuugcucggguuuaucaugugggcuugccagaaaggaaacauuagguguaauaucugcauauga

SEQ ID NO: 140679 - RNA, 1701 nt, Artificial Sequence
  derived and/or modified CDS sequence (opt3) from hemagglutinin__InfluenzaA__AIL94389
augaaggccauccuggugguccuccuuuacaccuucgcuacagcaaacgccgacacucugugcauuggcuaucacgcgaauaacagcacggauaccguugacacaguguuggagaagaauguaacugugacccauuccgucaacuuacuggaagauaagcacaaugggaaacuauguaagcucagaggaguggcuccccugcaucuugguaaaugcaacauagccggcuggauccuggggaauccugagugugaaucuuugucaacagcaaguagcugguccuacauuguugagaccucuucgucagacaacggaacuugcuauccaggcgauuuuaucaauuacgaagaacucagggagcagcugagcaguguguccucuuucgaacgguuugagauuuucccgaagacaagcuccuggcccaaccacgacucaaauaagggugucaccgccgcuuguccucaugcaggggccaaaaguuuuuauaagaaccugaucuggcucgugaaaaagggaaauagcuacccaaaauuaucucaauccuauauaaacgauaagggcaaggaaguacugguucuuuggggcauccaccaccccucaacgacugcugaccagcagagcuuguaccagaaugccgaugcguacguguucgucgggaccagucgcuauucuaaaaaguuuaaaccugagauugcaauccgaccaaaggugcgugaccaagagggaagaaugaacuacuauuggacacugguggaacccggugauaaaauuacuuucgaggccaccggcaaccuagucguuccuagguacgcuuuuacaauggaacggaaugccggguccggaaucauaauuagcgacaccccagugcaugauugcaacacgacuugucagacaccggagggcgcaaucaauaccucgcuccccuuccagaacauucacccuaucacuaucgguaagugcccaaaauauguaaagucuacaaagcugcgccuugcuaccgggcugagaaaugugcccuccauucagucaaggggauuguuuggcgccauagcgggcuucaucgaagggggauggacggguauggucgacggcugguacggguaucaucaccaaaacgagcagggaaguggcuacgccgcagaccucaaaagcacccagaaugcuauugauaagaucacaaacaaaguuaauuccgugauagagaagaugaacacucaguuuaccgccguggguaaagaguucaaucaccuggagaagcggauugaaaacuuaaauaagaaagucgacgauggguuccuggacaucuggacauacaacgcugagcuccuuauccuguuggaaaaugagcgcacucuagauuaucaugacucuaacgugaagaaccuguacgagaaaguacgaaaucaacucaagaacaaugccaaagaaauuggcaacggauguuuugaguucuaucacaagugcgauaauaccuguauggaaagcguuaagaacggcacauacgacuauccuaaauacucagaggaagcaaagcugaauagagagaaaaucgauggggugaaacuugagaguaccaggauuuaucagauacuggccaucuacuccacugucgcuagcucuuuggugcucgucgugucacugggagcgauuaguuuuuggaugugcagcaacgguuccuuacagugccggaucuguaucuga

SEQ ID NO: 140680 - RNA, 1701 nt, Artificial Sequence; identical to SEQ ID NO: 138042
  derived and/or modified CDS sequence (opt3) from hemagglutinin__InfluenzaA__AIL94411

SEQ ID NO: 140681 - RNA, 1701 nt, Artificial Sequence; identical to SEQ ID NO: 138042
  derived and/or modified CDS sequence (opt3) from hemagglutinin__InfluenzaA__AIL94423

SEQ ID NO: 140682 - RNA, 1701 nt, Artificial Sequence; identical to SEQ ID NO: 140635
  derived and/or modified CDS sequence (opt3) from hemagglutinin__InfluenzaA__AIL94435

SEQ ID NO: 140683 - RNA, 1701 nt, Artificial Sequence; identical to SEQ ID NO: 138042
  derived and/or modified CDS sequence (opt3) from hemagglutinin__InfluenzaA__AIL94446

SEQ ID NO: 140684 - RNA, 1701 nt, Artificial Sequence; identical to SEQ ID NO: 138042
  derived and/or modified CDS sequence (opt3) from hemagglutinin__InfluenzaA__AIL94458

SEQ ID NO: 140685 - RNA, 1701 nt, Artificial Sequence
  derived and/or modified CDS sequence (opt3) from hemagglutinin__InfluenzaA__AIL94470
augaaggccauccuggugguccuccuuuacaccuucgcuacagcaaacgccgacacucugugcauuggcuaucacgcgaauaacagcacggauaccguugacacaguguuggagaagaauguaacugugacccauuccgucaacuuacuggaagauaagcacaaugggaaacuauguaagcucagaggaguggcuccccugcaucuugguaaaugcaacauagccggcuggauccuggggaauccugagugugaaucuuugucaacagcaaguagcugguccuacauuguugagaccucuucgucagacaacggaacuugcuauccaggcgauuuuaucaauuacgaagaacucagggagcagcugagcaguguguccucuuucgaacgguuugagauuuucccgaagacaagcuccuggcccaaccacgacucaaauaagggugucaccgccgcuuguccucaugcaggggccaaaaguuuuuauaagaaccugaucuggcucgugaaaaagggaaauagcuacccaaaauuaucucaauccuauauaaacgauaagggcaaggaaguacugguucuuuggggcauccaccaccccucaacgacugcugaccagcagagcuuguaccagaaugccgaugcguacguguucgucgggaccagucgcuauucuaaaaaguuuaaaccugagauugcaauccgaccaaaggugcgugaccaagagggaagaaugaacuacuauuggacacugguggaacccggugauaaaauuacuuucgaggccaccggcaaccuagucguuccuagguacgcuuuuacaauggaacggaaugccggguccggaaucauaauuagcgacaccccagcacaugauugcaacacgacuugucagacaccggagggcgcuaucaauaccucgcuccccuuccagaacauucacccuaucacuaucgguaagugcccaaaauaugugaagucuacaaagcugcgccuugccaccgggcugagaaauguacccuccauucagucaaggggauuguuuggcgcgauagccggcuucaucgaagggggauggacggguaugguggacggcugguacggguaucaucaccaaaacgagcagggaaguggcuacgcagcugaccucaaaagcacccagaaugccauugauaagaucacaaacaaagucaauuccgugauagagaagaugaacacucaguuuaccgcuguugguaaagaguucaaucaccuggagaagcggauugaaaacuuaaauaagaaaguggacgauggguuccuggacaucuggacauacaacgccgagcuccuuguccuguuggaaaaugagcgcacucuagauuaucaugacucuaacgugaagaaccuguacgagaaaguacgaaaucaacucaagaacaaugcaaaagaaaucggcaacggauguuuugaguucuaucacaagugcgauaauaccuguauggaaagcguuaagaacggcacauacgacuauccuaaauacucagaggaagccaagcugaauagagagaaaauugauggggugaaacuugagaguaccaggaucuaucagauucuggcuauauacuccacugucgcgagcucuuuggugcucgucgugucacugggagcaaucaguuuuuggaugugcagcaacgguuccuuacagugccggauuuguaucuga

SEQ ID NO: 140686 - RNA, 1701 nt, Artificial Sequence
  derived and/or modified CDS sequence (opt3) from hemagglutinin__InfluenzaA__AIL94481
augaagaccaucauugcccugagcuacauacucugccuuguguucgcucagaaacugcccggcaacgacaauuccacagcaacuuuguguuuagggcaccaugccgucccuaacggaacgaucguuaagaccauuacaaaugauagaaucgaggugacuaacgcgaccgaacugguacaaaauucuucaauuggugagaucugcgacaguccacaccagauacuagauggcgaaaacuguacacucaucgacgcucugcuuggggauccgcagugcgacggauuucagaauaaaaagugggaucuguucguggagaggagcaaagccuauuccaacuguuaccccuaugacgucccugauuacgcaucuuugcggucgcucguggccucaagcggcacccuggaauuuaauaacgagaguuucaauugggcugguguuacucaaaacgggacauccucugcaugcauucgcggaagcaauuccucauuuuucagucgacugaacuggcucacccauuuaaauuuuaaguauccagcccugaacgugacgaugcccaacaaugagcaguucgacaaguuguacaucuggggcguccaccauccuggcacugauaaagaccagauuuuucuuuaugcucagagcucugggcguaucaccguguccacaaagagaucacaacaggccguaauaccaaacauuggaagcaggccccggauccgcaauauuccuaguagaaucucuaucuacuggacuauuguuaaaccaggugauauacugcuaaucaacuccaccggcaaucucauugcgccgaggggguacuucaagauccggagcggaaaaucgucuauaaugcgcuccgacgcacccauuggcaaguguaagucagaaugcaucacaccuaacgguaguaucccaaaugacaaacccuuucagaacgugaaucgaauuaccuauggggccuguccuagauacgucaagcagagcacgcugaaacuugcuacuggaaugaggaacgugccagagaagcaaacacggggcaucuucggcgccauugcaggguuuauagaaaauggaugggaggguaugguggauggcugguauggguuccgucaccagaacuccgagggacgcggccaggcugccgaccugaaaucuacccaagcggccaucgaucagauuaaugguaaguugaacagacucaucgggaaaacuaaugaaaaguuccaccagaucgagaaggaauuuagcgaggucgaaggcaggauucaggaccuggagaaauacguugaggauacaaagauagacuuauggucauauaacgcagaacugcucguggcucuugagaaccaacauaccaucgaucugacggacagugaaaugaauaaauuguucgagaagaccaaaaagcagcuacgggaaaacgccgaggauaugggaaauggcugcuuuaagauuuaccacaaaugugacaacgcuugcaucggguccauucgaaauggaacauaugaucaugacguauaccgcgacgaggcccugaacaauagauuccagaucaaggguguggaacucaaaagcggcuacaaggauuggauaaucuggauuucuuuugcaaucucaugcuuccugcuuugugucgcccuguugggguuuauuaugugggcuugccagaaaggaaacaucagguguaauauaugcauuuga

SEQ ID NO: 140687 - RNA, 1701 nt, Artificial Sequence
  derived and/or modified CDS sequence (opt3) from hemagglutinin__InfluenzaA__AIL94493
augaaggccauccuggugguccuccuuuacaccuucgcuacagcaaacgccgacacucugugcauuggcuaucacgcgaauaacagcacggauaccguugacacaguguuggagaaaaauguaacugugacccauuccgucaacuuacuggaagauaagcacaaugggaaacuauguaagcucagaggaguggcuccccugcaucuugguaaaugcaacauagccggcuggauccuggggaauccugagugugaaucuuugucaacagcaaguagcugguccuacauuguugagaccucuucgucagacaacggaacuugcuauccaggcgauuuuaucaauuacgaagaacucagggagcagcugagcaguguguccucuuucgaacgguuugagauuuucccgaagacaagcuccuggcccaaccacgacucaaauaagggugucaccgccgcuuguccucaugcaggggccaaaaguuuuuauaagaaccugaucuggcucgugaaaaagggaaauagcuacccaaaauuaucucaauccuauauaaacgauaagggcaaggaaguacugguucuuuggggcauccaccaccccucaacgacugcugaccagcagagcuuguaccagaaugccgaugcguacguguucgucgggaccagucgcuauucuaaaaaguuuaaaccugagauugcaauccgaccaaaggugcgugaccaagagggaagaaugaacuacuauuggacacugguggaacccggugauaaaauuacuuucgaggccaccggcaaccuagucguuccuagguacgcuuuuacaauggaaaagaaugccggguccggaaucauaauuagcgacaccccagugcaugauugcaacacgacuugucagacaccggagggcgcaaucaauaccucguuccccuuucagaacauucacccuaucacuaucgguaaaugcccaaaguauguaaagucuacaaaacuccggcuggcuaccgggcuucgcaaugugcccuccauucagucaagaggacuguucggcgccauagcgggcuuuaucgaagggggauggacggguauggucgacggcugguacggguaucaucaccaaaacgagcagggaaguggcuacgccgcagaccucaagagcacccagaaugcuauugauaaaaucacaaacaagguaaauuccguuauagagaaaaugaacacucaguucaccgccguggguaaggaguucaaucacuuggagaagaggauugaaaaccugaauaaaaaggucgacgauggguuuuuagacaucuggacauacaacgcugagcugcucgugcuucuggaaaaugagcggacuuuggauuaucaugacucuaacgugaaaaaccuauacgagaagguucgcaaucaacugaaaaacaaugccaaggaaaucggcaacggauguuucgaguuuuaucacaagugcgauaauaccuguauggaaagcgugaaaaacggcacauacgacuauccuaaguacucagaggaagcaaaacucaaucgagagaagauugauggggucaaacuggagaguaccagaaucuaucagauucuugccauauacuccacuguggcuagcucucuggucuuggugguuucacucggagcgaucaguuucuggaugugcagcaacgguucccugcagugcaggauuuguaucuga

SEQ ID NO: 140688 - RNA, 1701 nt, Artificial Sequence; identical to SEQ ID NO: 140635
  derived and/or modified CDS sequence (opt3) from hemagglutinin__InfluenzaA__AIL94504

SEQ ID NO: 140689 - RNA, 1701 nt, Artificial Sequence; identical to SEQ ID NO: 138042
  derived and/or modified CDS sequence (opt3) from hemagglutinin__InfluenzaA__AIL94515

SEQ ID NO: 140690 - RNA, 1701 nt, Artificial Sequence; identical to SEQ ID NO: 138042
  derived and/or modified CDS sequence (opt3) from hemagglutinin__InfluenzaA__AIL94527

SEQ ID NO: 140691 - RNA, 1701 nt, Artificial Sequence
  derived and/or modified CDS sequence (opt3) from hemagglutinin__InfluenzaA__AIL94539
augaaggccauccuggugguccuccuuuacaccuucgcuacagcaaacgccgacacucugugcauuggcuaucacgcgaauaacagcacggauaccguugacacaguguuggagaagaauguaacugugacccauuccgucaacuuacuggaagauaagcacaaugggaaacuauguaagcucagaggaguggcuccccugcaucuugguaaaugcaacauagccggcuggauccuggggaauccugagugugaaucuuugucaacagcaaguagcugguccuacauuguugagaccucuucgucagacaacggaacuugcuauccaggcgauuuuaucaauuacgaagaacucagggagcagcugagcaguguguccucuuucgaacgguuugagauuuucccgaagacaagcuccuggcccaaccacgacucaaauaagggugucaccgccgcuuguccucaugcaggggccaaaaguuuuuauaagaaccugaucuggcucgugaaaaagggaaauagcuacccaaaauuaucucaauccuauauaaacgauaagggcaaggaaguacugguucuuuggggcauccaccaccccucaacgacugcugaccagcagagcuuguaccagaaugccgaugcguacguguucgucgggaccagucgcuauucuaaaaaguuuaaaccugagauugcaauccgaccaaaggugcgugaccaagagggaagaaugaacuacuauuggacacugguggaacccggugauaaaauuacuuucgaggccaccggcaaccuagucguuccuagguacgcuuuuacaauggaacggaaugccggguccggaaucauaauuagcgacaccccagcacaugauugcaacacgacuugucagacaccggagggcgcuaucaauaccucgcuccccuuccagaacauucacccuaucacuaucgguaagugcccaaaauaugugaagucuacaaagcugcgccuugccaccgggcugagaaauguacccuccauucagucaaggggauuguuuggcgcgauagccggcuucaucgaagggggauggacggguaugguggacggcugguacggguaucaucaccaaaacgagcagggaaguggcuacgcagcugaccucaaaagcacccagaaugccauugauaagaucacaaacaaagucaauuccgugauagagaagaugaacacucaguuuaccgcuguugguaaagaguucaaucaccuggagaagcggauugaaaacuuaaauaagaaaguggacgauggguuccuggacaucuggacauacaacgccgagcuccuuguccuguuggaaaaugagcgcacucuagauuaucaugacucuaacgugaagaaccuguacgagaaaguacgaaaucaacucaagaacaaugcaaaagaaguuggcaacggauguuuugaguucuaucacaagugcgauaauaccuguauggaaagcgugaagaacggcacauacgacuauccuaaauacucagaggaagccaagcugaauagagagaaaaucgauggggucaaacuugagaguaccaggauuuaucagauccuggcuauuuacuccacuguggcgagcucuuugguccucgugguuucacugggagcaauaaguuuuuggaugugcagcaacgguuccuuacagugccggaucuguauuuga

SEQ ID NO: 140692 - RNA, 1701 nt, Artificial Sequence; identical to SEQ ID NO: 140635
  derived and/or modified CDS sequence (opt3) from hemagglutinin__InfluenzaA__AIL94550

SEQ ID NO: 140693 - RNA, 1701 nt, Artificial Sequence
  derived and/or modified CDS sequence (opt3) from hemagglutinin__InfluenzaA__AIL94561
augaagaccaucauugcccugagcuacauacucugccuuguguucgcucagaaacugcccggcaacgacaauuccacagcaacuuuguguuuagggcaccaugccgucccuaacggaacgaucguuaagaccauuacaaaugauagaaucgaggugacuaacgcgaccgaacugguacaaaauucuucaauuggugagaucugcgacaguccacaccagauacuagauggcgaaaacuguacacucaucgacgcucugcuuggggauccgcagugcgacggauuucagaauaaaaagugggaucuguucguggagaggagcaaagccuauuccaacuguuaccccuaugacgucccugauuacgcaucuuugcggucgcucguggccucaagcggcacccuggaauuuaauaacgagaguuucaauugggcugguguuacucaaaacgggacauccucugcaugcauucgcggaagcaauuccucauuuuucagucgacugaacuggcucacccauuuaaauuuuaaguauccagcccugaacgugacgaugcccaacaaugagcaguucgacaaguuguacaucuggggcguccaccauccuggcacugauaaagaccagauuuuucuuuaugcucagagcucugggcguaucaccguguccacaaagagaucacaacaggccguaauaccaaacauuggaagcaggccccggauccgcaauauuccuaguagaaucucuaucuacuggacuauuguuaaaccaggugauauacugcuaaucaacuccaccggcaaucucauugcgccgaggggguacuucaagauccggagcggaaaaucgucuauaaugcgcuccgacgcacccauuggcaaguguaagucagaaugcaucacaccuaacgguaguaucccaaaugacaaacccuuucagaacgugaaucgaauuaccuauggggccuguccuagauacgucaagcagagcacgcugaaacuugcuacuggaaugaggaacgugccagagaagcaaacacggggcaucuucggcgccauugcaggguuuauagaaaauggaugggaggguaugguggauggcugguauggguuccgucaccagaacuccgagggacgcggccaggcugccgaccugaaaucuacccaagcggccaucgaucagauuaaugguaaguugaacagacucaucgggaaaacuaaugaaaaguuccaccagaucgagaaggaauuuagcgaggucgaaggcaggauucaggaccuggagaaauacguugaggauacaaagauagacuuauggucauauaacgcagaacugcucguggcucuugagaaccaacauaccaucgaucugacggacagugaaaugaauaaauuguucgagaagaccaaaaagcagcuacgggaaaacgccgaggauaugggaaauggcugcuuuaagauuuaccacaaaugugacaacgcuugcaucggguccauucgaaauggaacauaugaucaugacguauaccgcgacgaggcccugaacaauagauuccagaucaaggguguggaacucaaaagcggcuacaaggauuggauacuguggaucucuuuugcaauuucaugcuuccuucugugugucgccuugcucggguuuaucaugugggcuugccagaggggaaacauucgguguaauaucugcauauga

SEQ ID NO: 140694 - RNA, 1701 nt, Artificial Sequence
  derived and/or modified CDS sequence (opt3) from hemagglutinin__InfluenzaA__AIL94573
augaaggccauccuggugguccuccuuuacaccuucgcuacagcaaacgccgacacucugugcauuggcuaucacgcgaauaacagcacggauaccguugacacaguguuggagaagaauguaauagugacucauuccgucaacuuacuggaagauaagcacaaugggaaacuauguaagcucagaggaguggcuccccugcaucuugguaaaugcaacaucgccggcuggauucuggggaauccugagugugaaucuuugucaaccgcaaguagcugguccuacaucguugagacaucuucgucagacaacggaaccugcuauccaggcgauuuuauuaauuacgaagaacucagggagcagcugagcaguguguccucuuucgaacgguuugagaucuucccgaagacuagcuccuggcccaaccacgacucaaauaagggugucacagccgcuuguccucaugcaggggccaaaaguuuuuauaagaaccugauauggcucgugaaaaagggaaauagcuacccaaaauuaucucaauccuauaucaacgauaagggcaaggaaguacugguucuuuggggcauucaccaccccucaaccacggcugaccagcagagcuuguaccagaaugccgaugcguacguguucgucgggacuucccgcuauucuaaaaaguuuaaaccugagaucgcaauucgaccaaaggugcgugaccaagagggaagaaugaacuacuauuggacccugguggaacccggugauaaaaucacauucgaggccacuggcaaccuagucguuccuagguacgcuuuuaccauggaacggaaugccggguccggaauaauuaucagcgacacaccagugcaugauugcaacaccacgugucagacuccggagggcgcaauuaauacaucgcuccccuuccagaacauccacccuaucaccauugguaagugcccaaaauauguaaagucuacuaagcugcgccuugcuacagggcugagaaaugugcccuccauacagucaaggggauuguuuggcgccaucgcgggcuucauugaagggggauggaccgguauggucgacggcugguacggguaucaucaccaaaacgagcagggaaguggcuacgccgcagaccucaaaagcacgcagaaugcuaucgauaagauaaccaacaaagugaauaguguuauugagaagaugaacacacaguuuacugccguggguaaagaguucaaucaccuggagaagcggaucgaaaacuuaaauaagaaagucgacgauggguuccuggacaucuggaccuacaacgcugagcuccuugugcuguuggaaaaugagcgcacacuagauuaucaugacucuaacguaaagaaccuguacgagaaaguucgaaaucaacucaagaacaaugccaaagaaauuggcaacggauguuuugaguucuaucacaagugcgauaauacuuguauggaaagcgugaagaacggcaccuacgacuauccuaaauacucagaggaagcaaagcugaauagagagaaaaucgauggggucaaacuugagaguacaaggguguaucagauucuggccauauacuccaccgucgcuagcucuuuggugcucguugugucacugggagcgaucaguuuuuggaugugcagcaacgguuccuuacagugccggauuuguaucuga

SEQ ID NO: 140695 - RNA, 1701 nt, Artificial Sequence
  derived and/or modified CDS sequence (opt3) from hemagglutinin__InfluenzaA__AIL94584
augaaggccauccuggugguccuccuuuacaccuucgcuacagcaaacgccgacacucugugcauuggcuaucacgcgaauaacagcacggauaccguugacacaguguuggagaaaaauauaacuguaacccauuccgugaacuuacuggaagauaagcacaaugggaaacuauguaagcucagaggagucgcuccccugcaucuugguaaaugcaacaucgccggcuggauucuggggaauccugagugugaaucuuugucaacagcaaguagcugguccuacaucguggagaccucuucgucagacaacggaacuugcuauccaggcgauuuuauuaauuacgaagaacucagggagcagcugagcaguguuuccucuuucgaacgguuugagaucuucccgaagacaagcuccuggcccaaccacgacucaaauaagggugugaccgccgcuuguccucaugcaggggccaaaaguuuuuauaagaaccugauauggcucgucaaaaagggaaauagcuacccaaaauuaucucaauccuauaucaacgauaagggcaaggaagugcugguacuuuggggcauucaccaccccucaacgacugcugaccagcagagcuuguaccagaaugccgaugcguacguuuucguggggaccagucgcuauucuaaaaaguuuaaaccugagaucgcaauucgaccaaagguccgugaccaagagggaagaaugaacuacuauuggacacugguggaacccggugauaaaaucacuuucgaggccaccggcaaccuaguggucccuagguacgcuuuuacaauggaacggaaugccggguccggaauaauuaucagcgacaccccaguucaugauugcaacacgacuugucagacaccggagggcgcaauuaauaccucgcuccccuuccagaacauccacccuaucacuauuggucgcugcccaaaguaugugaaaucuacaaagcugagacuugcuaccgggcugaggaauguacccuccauacagucacggggauuguuuggcgccaucgcgggcuucauugaagggggauggacggguaugguggacggcugguacggguaucaucaccaaaacgagcagggaaguggcuacgccgcagaccucaagagcacccagaaugcuaucgauaaaauaacaaacaaggucaauuccgugauugagaaaaugaacacucaguuuaccgccguugguaaggaguucaaucaccuggagaaacgcaucgaaaacuuaaauaagaagguggacgauggguuccuggacaucuggacauacaacgcugagcuccuuguccuguuggaaaaugagcgaacucuagauuaucaugacucuaacgugaaaaaccuguacgagaagguaagaaaucaacucaaaaacaaugccaaggaaauuggcaacggauguuuugaguucuaucacaaaugcgauaauaccuguauggaaagcguuaagaacggcacauacgacuauccuaaguacucagaggaagcaaaacugaauagggagaagaucgauggggugaaacuugagaguacccggauuuaucagauacuggccaucuacuccacugucgcuagcucuuuggugcucgucgugucacugggagcgauuaguuuuuggaugugcagcaacgguuccuuacagugccguaucuguaucuga

SEQ ID NO: 140696 - RNA, 1701 nt, Artificial Sequence; identical to SEQ ID NO: 140103
  derived and/or modified CDS sequence (opt3) from hemagglutinin__InfluenzaA__AIL94595

SEQ ID NO: 140697 - RNA, 1701 nt, Artificial Sequence; identical to SEQ ID NO: 138042
  derived and/or modified CDS sequence (opt3) from hemagglutinin__InfluenzaA__AIL94606

SEQ ID NO: 140698 - RNA, 1701 nt, Artificial Sequence; identical to SEQ ID NO: 138088
  derived and/or modified CDS sequence (opt3) from hemagglutinin__InfluenzaA__AIL94618

SEQ ID NO: 140699 - RNA, 1701 nt, Artificial Sequence; identical to SEQ ID NO: 140635
  derived and/or modified CDS sequence (opt3) from hemagglutinin__InfluenzaA__AIL94629

SEQ ID NO: 140700 - RNA, 1701 nt, Artificial Sequence; identical to SEQ ID NO: 138042
  derived and/or modified CDS sequence (opt3) from hemagglutinin__InfluenzaA__AIL94640

SEQ ID NO: 140701 - RNA, 1701 nt, Artificial Sequence
  derived and/or modified CDS sequence (opt3) from hemagglutinin__InfluenzaA__AIL94652
augaaggccauccuggugguccuccuuuacaccuucgcuacagcaaacgccgacacucugugcauuggcuaucacgcgaauaacagcacggauaccguugacacaguguuggagaagaauguaacugugacccauuccauaaacuuacuggaagauaagcacaaugggaaacuauguaagcucagaggagucgcuccccugcaucuugguaaaugcaacaucgccggcuggauucuggggaauccugagugugaaucuuugucaacagcaaguagcugguccuacaucguggagaccucuucgucagacaacggaacuugcuauccaggcgauuuuauuaauuacgaagaacucagggagcagcugagcaguguuuccucuuucgaacgguuugagauguucccgaagacaagcuccuggcccaaccacgacucaaauaagggugugaccgccgcuuguccucaugcaggggccaaaaguuuuuauaagaaccugaucuggcucgucaaaaagggaaauagcuacccaaaauuaucuaaguccuauauaaacgauaagggcaaagaagugcugguacuuuggggcauccaccaccccucaacgacugcugaccaacagagcuuguaccagaaugccgaugcguacguuuucguggggaccaguaaguauucuaaaaaguuuaaaccugagauugcaauccgcccaaagguccgagaccaggagggacguaugaacuacuauuggacacugauugaacccggugauaaaaucacuuucgaggccaccggcaaccuaguggugccuagauacgcuuuugccauggaaaggaaugcaggguccggaauaauuaucagcgacacaccaguccaugauugcaacaccacgugucaaacuccggagggcgcuauuaauacaucgcuccccuuccagaacauccacccuaucaccauugguaagugcccaaaguauguuaaaucuacuaagcugcggcuugccacagggcugcgcaaugugcccuccauacagucaagaggauuguuuggcgcgaucgccggcuucauugaagggggauggaccgguaugguagacggcugguacggguaucaucaccagaacgagcaaggaaguggcuacgcagcugaccucaaaagcacgcagaaugccaucgauaagauaaccaacaaagucaauuccgugauugagaagaugaacacacaguuuacugcuguggguaaggaguucaaucaccuggagaaaaggaucgaaaacuuaaauaagaaaguugacgauggguuccuggacaucuggaccuacaacgccgagcuccuugugcuguuggaaaaugagcggacacuagauuaucaugacucuaacgucaagaaccuguacgagaaagugcgcaaucagcucaagaacaaugcaaaggaaauuggcaacggauguuuugaguucuaucacaaaugcgauaauacuuguauggaaagcguaaagaacggcaccuacgacuauccuaaauacucagaggaagccaagcuggaucgagagaaaaucgacgggguuaaacuugagaguacaagaauuuaucaaauacuggcuaucuacuccaccguggcgagcucuuugguccucguggucucacugggagcaauuaguuuuuggaugugcagcaaugguuccuuacagugcaggaucuguaucuga

SEQ ID NO: 140702 - RNA, 1701 nt, Artificial Sequence; identical to SEQ ID NO: 138088
  derived and/or modified CDS sequence (opt3) from hemagglutinin__InfluenzaA__AIL94663

SEQ ID NO: 140703 - RNA, 1701 nt, Artificial Sequence; identical to SEQ ID NO: 138088
  derived and/or modified CDS sequence (opt3) from hemagglutinin__InfluenzaA__AIL94674

SEQ ID NO: 140704 - RNA, 1701 nt, Artificial Sequence; identical to SEQ ID NO: 138042
  derived and/or modified CDS sequence (opt3) from hemagglutinin__InfluenzaA__AIL94697

SEQ ID NO: 140705 - RNA, 1701 nt, Artificial Sequence; identical to SEQ ID NO: 138088
  derived and/or modified CDS sequence (opt3) from hemagglutinin__InfluenzaA__AIL94709

SEQ ID NO: 140706 - RNA, 1701 nt, Artificial Sequence; identical to SEQ ID NO: 138088
  derived and/or modified CDS sequence (opt3) from hemagglutinin__InfluenzaA__AIL94720

SEQ ID NO: 140707 - RNA, 1701 nt, Artificial Sequence; identical to SEQ ID NO: 138042
  derived and/or modified CDS sequence (opt3) from hemagglutinin__InfluenzaA__AIL94731

SEQ ID NO: 140708 - RNA, 1701 nt, Artificial Sequence; identical to SEQ ID NO: 140635
  derived and/or modified CDS sequence (opt3) from hemagglutinin__InfluenzaA__AIL94743

SEQ ID NO: 140709 - RNA, 1701 nt, Artificial Sequence
  derived and/or modified CDS sequence (opt3) from hemagglutinin__InfluenzaA__AIL94754
augaaggccauccuggugguccuccuuuacaccuucgcuacagcaaacgccgacacucugugcauuggcuaucacgcgaauaacagcacggauaccguugacacaguguuggagaagaauguaacugugacccauuccgucaacuuacuggaagauaagcacaaugggaaacuauguaagcucagaggaguggcuccccugcaucuugguaaaugcaacauagccggcuggauccuggggaauccugagugugaaucuuugucaacagcaaguagcugguccuacauuguugagaccucuucgucagacaacggaacuugcuauccaggcgauuuuaucaauuacgaagaacucagggagcagcugagcaguguguccucuuucgaacgguuugagauuuucccgaagacaagcuccuggcccaaccacgacucaaauaagggugucaccgccgcuuguccucaugcaggggccaaaaguuuuuauaagaaccugaucuggcucgugaaaaagggaaauagcuacccaaaauuaucucaauccuauauaaacgauaagggcaaggaaguacugguucuuuggggcauccaccaccccucaacgacugcugaccagcagagcuuguaccagaaugccgaugcguacguguucgucgggaccagucgcuauucuaaaaaguuuaaaccugagauugcaauccgaccaaaggugcgugaccaagagggaagaaugaacuacuauuggacacugguggaacccggugauaaaauuacuuucgaggccaccggcaaccuagucguuccuagguacgcuuuuacaauggaacggaaugccggguccggaaucauaauuagcgacaccccagugcaugauugcaacacgacuugucagacaccggagggcgcaaucaauaccucgcuccccuuccagaacauucacccuaucacuaucgguaagugcccaaaauauguaaagucuacaaagcugcgccuugcuaccgggcugagaaaugugcccuccauucagucaaggggauuguuuggcgccauagcgggcuucaucgaagggggauggacggguauggucgacggcugguacggguaucaucaccaaaacgagcagggaaguggcuacgccgcagaccucaaaagcacccagaaugcuauugauaagaucacaaacaaaguuaauuccgugauagagaagaugaacacucaguuuaccgccguggguaaagaguucaaucaccuggagaagcggauugaaaacuuaaauaagaaagucgacgauggguuccuggacaucuggacauacaacgcugagcuccuuauccuguuggaaaaugagcgcacucuagauuaucaugacucuaacgugaagaaccuguacgagaaaguacgaaaucaacucaagaacaaugccaaagaaauuggcaacggauguuuugaguucuaucacaagugcgauaauaccuguauggaaagcgcaaagaacggcacauacgacuauccuaaauacucagaggaagccaagcugaauagagagaaaaucgaugggguuaaacuugagaguaccaggauuuaucagauacuggcuaucuacuccacuguggcgagcucuuugguccucguggucucacugggagcaauuaguuuuuggaugugcagcaacgguuccuuacagugccggaucuguaucuga

SEQ ID NO: 140710 - RNA, 1701 nt, Artificial Sequence; identical to SEQ ID NO: 140663
  derived and/or modified CDS sequence (opt3) from hemagglutinin__InfluenzaA__AIL94765

SEQ ID NO: 140711 - RNA, 1701 nt, Artificial Sequence; identical to SEQ ID NO: 138042
  derived and/or modified CDS sequence (opt3) from hemagglutinin__InfluenzaA__AIL94777

SEQ ID NO: 140712 - RNA, 1701 nt, Artificial Sequence; identical to SEQ ID NO: 139950
  derived and/or modified CDS sequence (opt3) from hemagglutinin__InfluenzaA__AIL94789

SEQ ID NO: 140713 - RNA, 1701 nt, Artificial Sequence; identical to SEQ ID NO: 138088
  derived and/or modified CDS sequence (opt3) from hemagglutinin__InfluenzaA__AIL94800

SEQ ID NO: 140714 - RNA, 1701 nt, Artificial Sequence
  derived and/or modified CDS sequence (opt3) from hemagglutinin__InfluenzaA__AIL94811
augaagaccaucauugcccugagcuacauacucugccuuguguucgcucagaaacugcccggcaacgacaauuccacagcaacuuuguguuuagggcaccaugccgucccuaacggaacgaucguuaagaccauuacaaaugauagaaucgaggugacuaacgcgaccgaacugguacaaaauucuucaauuggugagaucugcgacaguccacaccagauacuagauggcgaaaacuguacacucaucgacgcucugcuuggggauccgcagugcgacggauuucagaauaaaaagugggaucuguucguggagaggagcaaagccuauuccaacuguuaccccuaugacgucccugauuacgcaucuuugcggucgcucguggccucaagcggcacccuggaauuuaauaacgagaguuucaauuggacugguguuacacaaaacgggaccuccucugcuugcauucgccgaagcaauuccucauuuuucagucgucugaacuggcucacgcauuuaaauuuuaaguauccagcacugaacgugacuaugcccaacaaugagcaguucgacaaacuuuacaucuggggaguccaccauccuggcaccgauaaagaccagaucuuuuuguaugcccagagcucuggcagaauuacaguguccacuaagaggucacaacaggcuguaauaccaaacauugggagccggccccgcaucagaaauauuccuaguaggaucucuaucuacuggaccauuguuaaaccaggagauauacugcuaaucaacuccacagguaaucucauugccccgcggggcuacuucaagauccgcagcgggaaaucgucuauaaugcgauccgacgcgcccauuggaaaguguaagucagaaugcaucaccccuaacggcaguaucccaaaugacaaacccuuucagaacgugaauagaauuacguauggugcauguccuagguacgucaagcagaacacucugaaacuugccacagggaugcggaaugugccagagaagcaaacccguggaaucuucggcgcuauugccggcuuuauagaaaacgggugggagggaaugguggaugguugguauggcuuccgccaccagaauagcgaggggagaggacaggcagcugaccugaaauccacucaagccgcgaucgaucagauuaacggcaaguugaauaggcucaucgguaaaacaaacgaaaaguuccaccagaucgagaaggaauuuucugaggucgaagggcggauucaggaccuggagaaauacguugaggauaccaagauagacuuauggagcuauaacgccgaacugcucguggcacuugagaaucaacauacgaucgaucugaccgacucagaaaugaacaaauuguucgagaagacaaagaagcagcuacgagaaaaugcugaggauaugggcaacggaugcuuuaagauuuaccacaaaugugacaaugccugcaucggcaguauucgcaacgggacuuaugaucauaauguauacagagacgaggcucugaacaauagguuccagaucaagggaguggaacucaaauccgguuacaaggacuggauacuguggaucagcuuugccauuucuugcuuccuucugugugucgcauugcucggcuuuaucaugugggccugccagaaagggaacauucgguguaauaucugcauauga

SEQ ID NO: 140715 - RNA, 1701 nt, Artificial Sequence; identical to SEQ ID NO: 137906
  derived and/or modified CDS sequence (opt3) from hemagglutinin__InfluenzaA__AIL94823

SEQ ID NO: 140716 - RNA, 1701 nt, Artificial Sequence
  derived and/or modified CDS sequence (opt3) from hemagglutinin__InfluenzaA__AIL94835
augaagaccaucauugcccugagcuacauacucugccuuguguucgcucagaaacugcccggcaacgacaauuccacagcaacuuuguguuuagggcaccaugccgucccuaacggaacgaucguuaagaccauuacaaaugauagaaucgaggugacuaacgcgaccgaacugguacaaaauuauucuauuggugagaucugcgacucaccacaccagauacuagauggcgaaaacuguacacucaucgacgcucugcuuggggauccgcagugcgacggauuucagaauaaaaagugggaucuguucguggagaggaguaaagccuacagcaacuguuaucccuacgacgucccugauuaugcauccuugcggucucucguggccucgucaggcacccuggaauuuaauaacgagagcuucaauugggcugguguuacucaaaacgggacaaguuccgcaugcauucgcggaucuaauagcuccuuuuucucacgacugaacuggcucacccauuuaaauuuuaaguacccagcccugaacgugacgaugcccaacaaugagcaguucgacaaguuguauaucuggggcguccaccauccuggcacugauaaagaccagauuuuucuuuacgcucagaguagcgggcguaucaccgugucuacaaagagaucccaacaggccguaauaccaaacauuggaucaaggccccggauccgcaauauuccuagcagaaucaguaucuacuggacuauuguuaaaccaggugauauacugcuaaucaacucuaccggcaaucucauugcgccgaggggguauuucaagauccgguccggaaaaagcucgauaaugcgcucugacgcacccauuggcaaguguaaguccgaaugcaucacaccuaacgguucaaucccaaaugacaaacccuuucagaacgugaaucgaauuaccuacggggccuguccuagauaugucaagcagaguacgcugaaacuugcuacuggaaugaggaacgugccagagaagcaaacacggggcaucuucggcgccauugcaggguuuauagaaaauggaugggaggguaugguggauggcugguacggguuccgucaccagaacagcgagggacgcggccaggcugccgaccugaaauccacccaagcggccaucgaucagauuaaugguaaguugaacagacucaucgggaaaacuaaugaaaaguuccaccagaucgagaaggaauuuucugaggucgaaggcaggauucaggaccuggagaaauauguugaggauacaaagauagacuuauggagcuacaacgcagaacugcucguggcucuugagaaccaacauaccaucgaucugacggacucagaaaugaauaaauuguucgagaagaccaaaaagcagcuacgggaaaacgccgaggauaugggaaauggcugcuuuaagauuuaucacaaaugugacaacgcuugcaucgggaguauucgaaauggaacauacgaucaugacguauaccgcgacgaggcccugaacaauagauuccagaucaaggguguggaacucaaauccggcuauaaggauuggauacuguggaucagcuuugcaauuucuugcuuccuucugugugucgccuugcucggguuuaucaugugggcuugccagaaaggaaacauuagguguaauaucugcauauga

SEQ ID NO: 140717 - RNA, 1701 nt, Artificial Sequence
  derived and/or modified CDS sequence (opt3) from hemagglutinin__InfluenzaA__AIL94847
augaagaccaucauugcccugagcuacauacucugccuuguguucgcucagaaacugcccggcaacgacaauuccacagcaacuuuguguuuagggcaccaugccgucccuaacggaacgaucguuaagaccauuacaaaugaucaaaucgaggugacuaacgcgaccgaacugguacagucuucaaguacaggugagauuugcgacagcccacaccagauccuagauggcgaaaauuguacccucauagacgcucugcuuggggauccgcagugcgacggauuucaaaacaaaaagugggaucuguucguggagagauccaaagccuauucuaauuguuaccccuaugacgucccugauuacgcaucguugaggucacucguggccagcaguggcacucuggaauuuaacaaugaguccuucaacuggacagguguuacccagaaugggacgucuagcgcuugcauccggcgcuccaacaauucauuuuucagucgacugaacuggcucacucauuuaaaguuuaaguauccagcacugaaugugaccaugcccaacgacgagaaauucgauaaacuuuacauuuggggaguccaccauccuggcacagacaacgaucagaucuuuuuguaugcccaggcuagcggccguauuacugugucuaccaagagaucccaacagacaguaaucccaaauauagggucaaggccccggguucgcaacauuccuagcagaaucaguauuuacuggaccaucgugaagccaggagacauccugcuaauuaauucuacggguaaccucauagccccgaggggcuacuucaaaauccgguccggaaagagcucgauuaugcgcucugacgcgcccaucgggaaguguaauuccgaaugcauaacuccuaacggcucaauuccaaaugauaaacccuuucagaacgucaaucgaaucacauauggugcauguccuagauacgugaagcagaacacccugaaacuugccacugggaugaggaaugugccagagaagcaaacacggggaaucuucggcgcuauugccggcuuuaucgaaaacgggugggagggaauggucgacgguugguauggcuuccgucaccagaauagugaggggauuggacaggcagcugaucugaaaagcacccaagccgcgauagaccagaucaacggcaaguugaaucgccucauugguaaaacgaacgaaaaguuccaccagaucgagaaggaauuuuccgagguugaagggagaauccaggaucuggagaaauacguggaggacaccaagauugauuuauggucuuauaacgccgaacugcucguagcacuugagaaucaacauacaauagaccugacugauagcgaaaugaacaaauuguucgagaagaccaaaaagcagcuaagggaaaaugcugaggacaugggcaacggaugcuuuaagaucuaccacaaaugugauaaugccugcauuggcucaauccggaacgggacauaugaccaugacguguaccgagaugaggcucugaauaaccgcuuccagauuaagggagucgaacucaaaagugguuacaaggacuggauccuguggauauccuuugccaucagcugcuuccuucuguguguggcauugcucggcuuuauuaugugggccugccagaaagggaauaucagauguaacauuugcaucuga

SEQ ID NO: 140718 - RNA, 1701 nt, Artificial Sequence; identical to SEQ ID NO: 133581
  derived and/or modified CDS sequence (opt3) from hemagglutinin__InfluenzaA__AIL94859

SEQ ID NO: 140719 - RNA, 1701 nt, Artificial Sequence
  derived and/or modified CDS sequence (opt3) from hemagglutinin__InfluenzaA__AIL94871
augaagaccaucauugcccugagcuacauacucugccuuguguucgcucagaaacugcccggcaacgacaauuccacagcaacuuuguguuuagggcaccaugccgucccuaacggaacgaucguuaagaccauuacaaaugaucaaaucgaggugacuaacgcgaccgaacugguacagucuucaaguacaggugagauuugcgacagcccacaccagauccuagauggcgaaaauuguacccucauagacgcucugcuuggggauccgcagugcgacggauuucaaaacaaaaagugggaucuguucguggagagauccaaagccuauucuaauuguuaccccuaugacgucccugauuacgcaucguugaggucacucguggccagcaguggcacucuggaauuuaacaaugaguccuucaacuggacagguguuacccagaaugggacgucuagcgcuugcauccggcgcuccaacaauucauuuuucagucgacugaacuggcucacucauuuaaauuuuaaguauccagcacugaacgugaccaugcccaacaaugagcaguucgacaaacuuuacauuuggggaguccaccauccuggcacagauaaggaccagaucuuuuuguaugcccaagcuagcggccguauuacugugucuaccaagagaucccagcaggccguaaucccaaacauagggucaaggccccggguucgcaauauuccuagcagaaucaguauuuacuggacaaucgugaaaccaggagauauccugcuaauuaacucuaccgguaaucucauagcgccgaggggcuacuucaagauccgguccgggaaaagcucgauuaugcgcucugacgcacccaucggaaaguguaacuccgaaugcauaacgccuaauggcucaauuccaaacgacaagcccuuucagaaugucaaccgaaucacuuauggugccuguccuagauacgugaaacaaaguacacugaaacuugcuaccgggaugaggaaugugccagagaagcagacucggggaaucuucggcgccauugcaggcuuuaucgaaaacgggugggagggaauggucgaugguugguauggcuuccgucaccagaauagcgaggggcgcggacaagcugccgaccugaaguccacacaggcggccauugaucagauaaacggcaaauugaauagacucaucgguaagaccaacgaaaaauuccaccagauugagaaggaauuuucugagguugaagggaggauccaagaccuggagaaguacguggaggauacgaaaaucgacuuauggagcuauaacgcagaacugcucguagcucuugagaaucagcauaccauugaucugacagacucagaaaugaacaaguuguucgagaaaacuaagaaacagcuacgggaaaaugccgaggauaugggcaacggaugcuuuaccauauaccacaagugugacaaugcuugcaucggcaguauucgaaacgggacauaugaucauaauguguaccgcgacgaggcccugaacaauagauuccagaucaagggaauugaacucaaauccgguuacaaggacuggauccuguggaucagcuuugcaauaucuugcuuccuucugugugucgccuugcucggcuuuauuaugugggcuugccaaaaagggaacaucagguguaauauuugcaucuga

SEQ ID NO: 140720 - RNA, 1701 nt, Artificial Sequence; identical to SEQ ID NO: 140128
  derived and/or modified CDS sequence (opt3) from hemagglutinin__InfluenzaA__AIL94883

SEQ ID NO: 140721 - RNA, 1701 nt, Artificial Sequence; identical to SEQ ID NO: 140113
  derived and/or modified CDS sequence (opt3) from hemagglutinin__InfluenzaA__AIL94894

SEQ ID NO: 140722 - RNA, 1701 nt, Artificial Sequence; identical to SEQ ID NO: 137906
  derived and/or modified CDS sequence (opt3) from hemagglutinin__InfluenzaA__AIL94906

SEQ ID NO: 140723 - RNA, 1701 nt, Artificial Sequence; identical to SEQ ID NO: 138042
  derived and/or modified CDS sequence (opt3) from hemagglutinin__InfluenzaA__AIL94918

SEQ ID NO: 140724 - RNA, 1701 nt, Artificial Sequence; identical to SEQ ID NO: 138042
  derived and/or modified CDS sequence (opt3) from hemagglutinin__InfluenzaA__AIL94930

SEQ ID NO: 140725 - RNA, 1701 nt, Artificial Sequence; identical to SEQ ID NO: 138042
  derived and/or modified CDS sequence (opt3) from hemagglutinin__InfluenzaA__AIL94942

SEQ ID NO: 140726 - RNA, 1701 nt, Artificial Sequence; identical to SEQ ID NO: 138088
  derived and/or modified CDS sequence (opt3) from hemagglutinin__InfluenzaA__AIL94954

SEQ ID NO: 140727 - RNA, 1701 nt, Artificial Sequence; identical to SEQ ID NO: 137906
  derived and/or modified CDS sequence (opt3) from hemagglutinin__InfluenzaA__AIL94965

SEQ ID NO: 140728 - RNA, 1701 nt, Artificial Sequence
  derived and/or modified CDS sequence (opt3) from hemagglutinin__InfluenzaA__AIM55837
augaaggccauccuggugguccuccuuuacaccuucgcuacagcaacugccgacacgcugugcauuggcuaucacgcgaacaauagcaccgauacaguugacacuguguuggagaagaacguaaccgugacacauuccgucaauuuacuggaagauaagcacaacgggaaacuauguaagcucagaggaguggcuccccugcaucuugguaaaugcaauauagccggcuggauccuggggaacccugagugugaaucuuugucaaccgcaaguagcugguccuacauuguugagacuucuucgucagacaauggaacaugcuauccaggcgauuuuaucaacuacgaagaacucagggagcagcugagcaguguguccucuuucgaacgguuugagauuuucccgaagaccagcuccuggcccaaucacgacucaaacaagggugucacggccgcuuguccucaugcaggggccaaaaguuuuuauaagaaucugaucuggcucgugaaaaagggaaacagcuacccaaaauuaucucaauccuauauaaaugauaagggcaaggaaguacugguucuuuggggcauccaccaccccucaacuaccgcugaccagcagagcuuguaccagaacgccgaugcguacguguucgucgggacaagucgcuauucuaaaaaguuuaaaccugagauugcaauccgaccaaaggugcgugaccaagagggaagaaugaauuacuauuggacucugguggaacccggugauaaaauuaccuucgaggccacaggcaaccuagucguuccuagguacgcuuuuaccauggaacggaacgccggguccggaaucauaauuagcgacacgccagugcaugauugcaauacuacaugucagaccccggagggcgcaaucaacacuucgcuccccuuccagaauauucacccuaucacaaucgguaagugcccaaaauauguaaagucuaccaagcugucccuugcuacggggcugcgcaacgugcccucaauucagaguagaggauuguuuggcgccauagcgggcuucaucgaagggggauggaccgguauggucgacggcugguacggguaucaucaccaaaaugagcagggaagcggcuacgccgcagaccucaaauccacacagaacgcuauugauaagaucacuaauaaagugaacucuguuauagagaagaugaauacccaguuuacagccguggguaaagaguucaaccaccuggagaagaggauugaaaauuuaaacaagaaagucgacgauggguuccuggacaucuggacuuacaaugcugagcuccuugugcuguuggaaaacgagcggacccuagauuaucaugacagcaauguaaagaaccuguacgagaaaguucgcaaccaacucaagaauaacgccaaagaaaucggcaauggauguuuugaguucuaucacaagugcgauaacacauguauggaaucagugaagaauggcaccuacgacuauccuaaauacagugaggaagcaaagcugaaccgagagaaaauugauggggucaaacuugaguccacuagaaucuaucagauucuggccauauacagcacgguggcuucuucauugguccucgugguuagucugggagcgaucagcuuuuggaugugcuccaaugguucuuuacagugcaggauuuguaucuga

SEQ ID NO: 140729 - RNA, 1701 nt, Artificial Sequence
  derived and/or modified CDS sequence (opt3) from hemagglutinin__InfluenzaA__AIM55848
augaaggccauccuggugguccuccuuuacaccuucgcuacagcaaacgccgacacucugugcauuggcuaucacgcgaauaacagcacggauaccguugacacaguguuggagaagaauguaacugugacccauuccgucaacuuacuggaagauaagcacaaugggaaacuauguaagcucagaggaguggcuccccugcaucuugguaaaugcaacauagccggcuggauccuggggaauccugagugugaaucuuugucaacagcaaguagcugguccuacauuguugagaccucuucgucagacaacggaacuugcuauccaggcgauuuuaucaauuacgaagaacucagggagcagcugagcaguguguccucuuucgaacgguuugagauuuucccgaagacaagcuccuggcccaaccacgacucaaauaagggugucaccgccgcuuguccucaugcaggggccaaaaguuuuuauaagaaccugaucuggcucgugaaaaagggaaauagcuacccaaaauuaucucaauccuauauaaacgauaagggcaaggaaguacugguucuuuggggcauccaccaccccucaacgacugcugaccagcagagcuuguaccagaaugccgaugcguacguguucgucgggaccagucgcuauucuaaaaaguuuaaaccugagauugcaauccgaccaaaggugcgugaccaagagggaagaaugaacuacuauuggacacugguggaacccggugauaaaauuacuuucgaggccaccggcaaccuagucguuccuagguacgcuuuuacaauggaacggaaugccggguccggaaucauaauuagcgacaccccagugcaugauugcaacacgacuugucagacaccggagggcgcaaucaauaccucgcuccccuuccagaacauucacccuaucacuaucgguaagugcccaaaauauguaaagucuacaaagcugcgccuugcuaccgggcugagaaauauucccuccauacagucaaggggauuguuuggcgccaucgcgggcuucauugaagggggauggacggguaugguggacggcugguacggguaucaucaccaaaacgagcagggaaguggcuacgccgcagaccucaaaagcacccagaaugcuaucgauaagauaacaaacaaagucaauuccgugauugagaagaugaacacucaguuuaccgccguugguaaagaguucaaucaccuggagaagcggaucgaaaacuuaaauaagaaaguggacgauggguuccuggacaucuggacauacaacacugagcuccuuguccuguuggaaaaugagcgcacccuagauuaucaugacucuaacgugaagaaccuguacgagaaaguacgaaaucaacucaagaacaaugcuaaagaaauuggcaacggauguuuugaguucuaucacaagugcgauaauacauguauggaaagcguuaagaacggcaccuacgacuauccuaaauacucagaggaagccaagcugaauagagagaaaaucgauggggugaaacuugagaguacuaggauuuaucagauacuggcaaucuacuccacggucgccagcucuuuggugcucgucgugucacugggagcuauuaguuuuuggaugugcagcaacgguuccuuacagugccggaucuguaucuga

SEQ ID NO: 140730 - RNA, 1701 nt, Artificial Sequence; identical to SEQ ID NO: 138088
  derived and/or modified CDS sequence (opt3) from hemagglutinin__InfluenzaA__AIM55859

SEQ ID NO: 140731 - RNA, 1701 nt, Artificial Sequence; identical to SEQ ID NO: 138088
  derived and/or modified CDS sequence (opt3) from hemagglutinin__InfluenzaA__AIM55870

SEQ ID NO: 140732 - RNA, 1701 nt, Artificial Sequence; identical to SEQ ID NO: 138088
  derived and/or modified CDS sequence (opt3) from hemagglutinin__InfluenzaA__AIM55881

SEQ ID NO: 140733 - RNA, 1701 nt, Artificial Sequence; identical to SEQ ID NO: 139950
  derived and/or modified CDS sequence (opt3) from hemagglutinin__InfluenzaA__AIM55893

SEQ ID NO: 140734 - RNA, 1701 nt, Artificial Sequence; identical to SEQ ID NO: 139069
  derived and/or modified CDS sequence (opt3) from hemagglutinin__InfluenzaA__AIM55904

SEQ ID NO: 140735 - RNA, 1701 nt, Artificial Sequence; identical to SEQ ID NO: 138088
  derived and/or modified CDS sequence (opt3) from hemagglutinin__InfluenzaA__AIM55915

SEQ ID NO: 140736 - RNA, 1710 nt, Artificial Sequence
  derived and/or modified CDS sequence (opt3) from hemagglutinin__InfluenzaA__AIM55926
augaaggccauccuggugguccuccuuuacaccuucgcuacaacuaacgcagacacgcugugcauuggcuaucacgccaauaacagcaccgauacaguugacacuguguuggagaaaaauguaaccgugacacauuccgucaacuuacuggaagauaagcacaaugggaaacuauguaagcucagaggaguggcgccccugcaucuugguaaaugcaacauagcuggcuggauccuggggaauccugagugugaaucuuugucaaccgccaguagcugguccuacauuguugagacuucuucgucagacaacggaacaugcuauccaggcgauuuuaucaauuacgaagaacucagggagcagcugagcaguguguccucuuucgaacgguuugagauuuucccgaagaccagcuccuggcccaaccacgacucaaauaagggugucacggcagccuguccucaugcuggggcaaaaaguuuuuauaagaaccugaucuggcucgugaaaaagggaaauagcuacccaaaauuaucucaauccuauauaaacgauaagggcaaggaaguacugguucuuuggggcauccaccaccccucaacuaccgccgaccagcagagcuuguaccagaaugcugaugccuacguguucgucgggacaagucgcuauucuaaaaaguuuaaaccugagauugcgauccgaccaaaggugcgugaccaagagggaagaaugaacuacuauuggacucugguggaacccggugauaaaauuaccuucgaggcaacaggcaaccuagucguuccuagguacgccuuuaccauggaacggaaugcuggguccggaaucauaauuagcgacacgccagugcaugauugcaacacuacaugucagaccccggagggcgccaucaauacuucgcucacaucucugcccuuccagaacauucacccuaucaccaucgguaagugcccaaaauauguaaaguccacgaaacuucgccuggcaaccggguugagaaaugugcccucaauucagaguaggggacucuuuggcgcuauagccggcuucaucgaagggggauggacagguauggucgacggcugguacggguaucaucaccaaaacgagcagggaagcggcuacgcggccgaccugaaguccacucagaaugcaauugauaagaucaccaacaaaguuaauucugugauagagaagaugaacacacaguuuacugcuguggguaaagaguucaaucacuuagagaagcggauugaaaaccugaauaagaaagucgacgauggguuccucgacaucuggaccuacaacgccgagcuucugguguugcuagaaaaugagcgcacacuggauuaucaugacagcaacguaaagaaccucuacgagaaaguucgaaaucaacugaagaacaaugcuaaagaaaucggcaacggauguuuugaguucuaucacaagugcgauaauaccuguauggaaucagugaagaacggcacuuacgacuauccuaaauacagugaggaagccaaacuuaauagagagaagauugauggggucaagcuggaguccacgaggaucuaucagauuuuggcaauauacagcacaguggccucuucacucguccuggugguuaguuuaggagcuaucagcuuuuggaugugcuccaacgguucucugcagugccggauuuguaucuga

SEQ ID NO: 140737 - RNA, 1701 nt, Artificial Sequence; identical to SEQ ID NO: 138088
  derived and/or modified CDS sequence (opt3) from hemagglutinin__InfluenzaA__AIM55937

SEQ ID NO: 140738 - RNA, 1701 nt, Artificial Sequence; identical to SEQ ID NO: 139069
  derived and/or modified CDS sequence (opt3) from hemagglutinin__InfluenzaA__AIM55948

SEQ ID NO: 140739 - RNA, 1701 nt, Artificial Sequence; identical to SEQ ID NO: 139051
  derived and/or modified CDS sequence (opt3) from hemagglutinin__InfluenzaA__AIM55962

SEQ ID NO: 140740 - RNA, 1701 nt, Artificial Sequence; identical to SEQ ID NO: 139069
  derived and/or modified CDS sequence (opt3) from hemagglutinin__InfluenzaA__AIM55984

SEQ ID NO: 140741 - RNA, 1701 nt, Artificial Sequence; identical to SEQ ID NO: 139950
  derived and/or modified CDS sequence (opt3) from hemagglutinin__InfluenzaA__AIM55995

SEQ ID NO: 140742 - RNA, 1701 nt, Artificial Sequence
  derived and/or modified CDS sequence (opt3) from hemagglutinin__InfluenzaA__AIM56017
augaaggccauccuggugguccuccuuuacaccuucgcuacaacuaacgcagacacgcugugcauuggcuaucacgccaauaacagcaccgauacaguugacacuguguuggagaagaauguaaccgugacacauuccgucaacuuacuggaagauaagcacaaugggaaacuauguaagcucagaggaguggcgccccugcaucuugguaaaugcaacauagcuggcuggauccuggggaauccugagugugaaucuuugucaaccgccaguagcugguccuacauuguugagacuucuucgucagacaacggaacaugcuauccaggcgauuuuaucaauuacgaagaacucagggagcagcugagcaguguguccucuuucgaacgguuugagauuuucccgaagaccagcuccuggcccaaccacgacucaaauaagggugucacggcagccuguccucaugcuggggcaaaaaguuuuuauaagaaccugaucuggcucgugaaaaagggacacagcuacccaaaauuaucucaauccuauauaaaugauaagggcaaggaaguacugguucuuuggggcauccaccaucccucaacuaccgccgaccagcagagcuuguaccagaacgcugaugccuacguguucgucgggacaagucgcuauucuaaaaaguuuaaaccugagauugcgauccgaccaaaggugcgugaccaagagggaagaaugaauuacuauuggacucugguggaacccggugauaaaauuaccuucgaggcaacaggcaaccuagucguuccuagguacgccuuuaccauggaacggaacgcuggguccggaaucauaauuagcgacacgccagugcacgauugcaauacuacaugucagaccccggagggcgccaucaacacuucgcuccccuuccagaauauucauccuaucacaaucgguaagugcccaaaauauguaaagucuaccaagcugcgccuugcaacggggcugagaaacgugcccuccauucagucaaggggauuguuuggcgcuauagccggcuucaucgaagggggauggaccgguauggucgacggcugguacggguaucaccaccaaaaugagcagggaaguggcuacgcggccgaccucaaaagcacacagaacgcaauugauaagaucacuaauaaagugaacuccguuauagagaagaugaauacccaguuuacagcuguggguaaagaguucaaccaucuggagaagcggauugaaaauuuaaacaagaaagucgacgauggguuccuggacaucuggacuuacaaugccgagcuccuugugcuguuggaaaacgagcgcacccuagauuaucacgacucuaauguaaagaaccuguacgagaaaguucgaaaccaacucaagaauaacgcuaaagaaaucggcaauggauguuuugaguucuaucauaagugcgauaacacauguauggaaagcgugaagaauggcaccuacgacuauccuaaauacucagaggaagccaagcugaacagagagaaaauugauggggucaaacuugagaguacuaggaucuaucagauucuggcaauauacuccacgguggccagcucuuugguccucgugguuucacugggagcuaucaguuuuuggaugugcagcaaugguuccuuacagugccggauuuguaucuga

SEQ ID NO: 140743 - RNA, 1701 nt, Artificial Sequence; identical to SEQ ID NO: 140742
  derived and/or modified CDS sequence (opt3) from hemagglutinin__InfluenzaA__AIM56028

SEQ ID NO: 140744 - RNA, 1701 nt, Artificial Sequence
  derived and/or modified CDS sequence (opt3) from hemagglutinin__InfluenzaA__AIM56039
augaaggccauccuggugguccuccuuuaccccuucgcuaccgcaaacgccgacacacugugcauuggcuaucacgcgaauaacagcacugauacgguugacaccguguuggagaagaauguaacagugacucauuccgucaacuuacuggaagauaagcacaaugggaaacuauguaagcucagaggaguggcuccucugcaucuugguaaaugcaacauagccggcuggauccuggggaauccagagugugaaucuuugucaaccgcaaguagcugguccuacauuguugaggccucuucgucagacaacggaacaugcuauccgggcgauuuuaucaauuacgaagaacucagggagcagcugagcaguguguccucuuucgaacgguuugagauuuuccccaagaccagcuccuggccuaaccacgacucaaauaagggugucacugcugcauguccacaugccggggcuaaaaguuuuuauaagaaccugaucuggcucgugaaaaagggaaauagcuaccccaaauuaucucaauccuauauaaacgauaagggcaaggaaguacugguucuuuggggcauccaccacccuucaacaaccgccgaccagcagagcuuguaccagaaugcggaugcauacguguucgucgggacgagucgcuauucuaaaaaguuuaaaccagagauugccauccgacccaaggugcgugaccaagagggaagaaugaacuacuauuggacucugguggaaccuggugauaaaauuaccuucgaggcuacaggcaaccuagucguuccaagguacgccuuuacuauggaacggaaugcaggguccggaaucauaauuagcgacaccccggugcaugauugcaacacaaccugucagacgcccgagggcgcuaucaauacuucgcucccuuuccagaacauucacccaaucacaaucgguaagugccccaaauauguaaagucuaccaagcugcgccuugccacugggcugagaaaugugccuuccauucagucaaggggauuguuuggcgcgauagccggcuucaucgaagggggauggacagguauggucgacggcugguacggguaucaucaccaaaacgagcagggaaguggcuacgcagcugaccucaaaagcacccagaaugccauugauaagaucacgaacaaaguuaauuccgugauagagaagaugaacacccaguuuacagcuguggguaaagaguucaaucaccuggagaagcggauugaaaacuuaaauaagaaagucgacgauggguuccuggacaucuggacuuacaacgccgagcuccuugugcuguuggaaaaugagcgcacccuagauuaucaugacucuaacguaaagaaccuguacgagaaaguucgaaaucaacucaagaacaaugcaaaagaaaucggcaacggauguuuugaguucuaucacaagugcgauaauacauguauggaaagcgugaagaacggcacuuacgacuauccaaaauacucagaggaagccaagcugaauagagagaaaauugauggggucaaacuugagaguaccaggaucuaucagauucuggcuauauacuccacaguggcgagcucuuugguccucgugguuucacugggagcaaucaguuuuuggaugugcagcaacgguuccuuacagugccggauuuguaucuga

SEQ ID NO: 140745 - RNA, 1701 nt, Artificial Sequence
  derived and/or modified CDS sequence (opt3) from hemagglutinin__InfluenzaA__AIM56050
augaaggccauccuggugguccuccuuuacaccuucgcuacaacuaacgcagacacgcugugcauuggcuaucacgccaauaacagcaccgauacaguugacacuguguuggagaagaauguaaccgugacacauuccgucaacuuacuggaagauaagcacaaugggaaacuauguaagcucagaggaguggcgccccugcaucuugguaaaugcaacauagcuggcuggauccuggggaauccugagugugaaucuuugucaaccgccaguagcugguccuacauuguugagacuucuucgucagacaacggaacaugcuauccaggcgauuuuaucaauuacgaagaacucagggagcagcugagcaguguguccucuuucgaacgguuugagauuuucccgaagaccagcuccuggcccaaccacgacucaaauaagggugucacggcagccuguccucaugcuggggcaaaaaguuuuuauaagaaccugaucuggcucgugaaaaagggaaauagcuacccaaaauuaucucaauccuauauaaacgauaagggcaaggaaguacugguucuuuggggcauccaccaccccucaacuaccgccgaccagcagagcuuguaccagaaugcugaugccuacguguucgucgggacaagucgcuauucuaaaaaguuuaaaccugagauugcgauccgaccaaaggugcgugaccaagagggaagaaugaacuacuauuggacucugguggaacccggugauaaaauuaccuucgaggcaacaggcaaccuagucguuccuagguacgccuuuaccauggaacggaaugcuggguccggaaucauaauuagcgacacgccagugcaugauugcaacacuacaugucagaccccggagggcgccaucaauacuucgcuccccuuccagaacauucacccuaucacaaucgguaagugcccaaaauauguaaagucuaccaagcugcgccuugcaacggggcugagaaaugugcccuccauucagucaaggggauuguuuggcgcuauagccggcuucaucgaagggggauggaccgguauggucgacggcugguacggguaucaucaccaaaacgagcagggaaguggcuacgcggccgaccucaaaagcacacagaaugcaauugauaagaucacuaacaaaguuaauuccgugauagagaagaugaacacccaguuuacagcuguggguaaagaguucaaucaccuggagaagcggauugaaaacuuaaauaagaaagucgacgauggguuccuggacaucuggacuuacaacgccgagcuccuugugcuguuggaaaaugagcgcacccuagauuaucaugacucuaacguaaagaaccuguacgagaaaguucgaaaucaacucaagaacaaugcuaaagaaaucggcaacggauguuuugaguucuaucacaagugcgauaauacauguauggaaagcgugaagaacggcaccuacgacuauccuaaauacucagaggaagccaagcugaauagagggaaaauugauggagucaaacuugagaguacuaggaucuaucagauucuggcaauauacuccacgguggccagcucuuugguccucgugguuucacugggugcuaucaguuuuuggaugugcagcaacggcuccuuacagugccggauuuguaucuga

SEQ ID NO: 140746 - RNA, 1701 nt, Artificial Sequence; identical to SEQ ID NO: 138088
  derived and/or modified CDS sequence (opt3) from hemagglutinin__InfluenzaA__AIM56061

SEQ ID NO: 140747 - RNA, 1701 nt, Artificial Sequence; identical to SEQ ID NO: 138088
  derived and/or modified CDS sequence (opt3) from hemagglutinin__InfluenzaA__AIM56072

SEQ ID NO: 140748 - RNA, 1701 nt, Artificial Sequence; identical to SEQ ID NO: 139941
  derived and/or modified CDS sequence (opt3) from hemagglutinin__InfluenzaA__AIM56083

SEQ ID NO: 140749 - RNA, 1701 nt, Artificial Sequence; identical to SEQ ID NO: 138088
  derived and/or modified CDS sequence (opt3) from hemagglutinin__InfluenzaA__AIM56105

SEQ ID NO: 140750 - RNA, 1701 nt, Artificial Sequence; identical to SEQ ID NO: 138088
  derived and/or modified CDS sequence (opt3) from hemagglutinin__InfluenzaA__AIM56116

SEQ ID NO: 140751 - RNA, 1701 nt, Artificial Sequence
  derived and/or modified CDS sequence (opt3) from hemagglutinin__InfluenzaA__AIM56127
augaaggccauccuggugguccuccuuuacaccuucgcuacagcaaacgccgacacucugugcauuggcuaucacgcgaauaacagcacggauaccguugacacaguguuggagaagaauguaacugugacccauuccgucaacuuacuggaagauaagcacaaugggaaacuauguaagcucagaggaguggcuccccugcaucuugguaaaugcaacauagccggcuggauccuggggaauccugagugugaaucuuugucaacagcaaguagcugguccuacauuguugagaccucuucgucagacaacggaacuugcuauccaggcgauuuuaucaauuacgaagaacucagggagcagcugagcaguguguccucuuucgaacgguuugagauuuucccgaaggccagcuccuggcccaaccacgacucaaauaagggugucacagcugcauguccucaugccggggcuaaaaguuuuuauaagaaccugaucuggcucgugaaaaagggaaauagcuacccaaaauuaucucaauccuauauaaacgauaagggcaaggaaguacugguucuuuggggcauccaccaccccucaaccacggccgaccagcagagcuuguaccagaaugcggaugcauacguguucgucgggaccagucgcuauucuaaaaaguuuaaaccugagauugccauccgaccaaaggugcgugaccaagagggaagaaugaacuacuauuggacucugguggaacccggugauaaaauuacauucgaggcuacuggcaaccuagucguuccuagguacgccuuuaccauggaacggaaugcaggguccggaaucauaauuagcgacacaccagugcaugauugcaacaccacgugucagacuccggagggcgcuaucaauacaucgcuccccuuccagaacauucacccuaucaccaucgguaagugcccaaaauauguaaagucuacuaagcugcgccuugccacagggcugagaaauauucccuccauacagucaaggggauuguuuggcgcgaucgccggcuucauugaagggggauggaccgguaugguggacggcugguacggguaucaucaccaaaacgagcagggaaguggcuacgcagcugaccucaaaagcacgcagaaugccaucgauaagauaaccaacaaagucaauuccgugauugagaagaugaacacacaguuuacugcuguugguaaagaguucaaucaccuggagaagcggaucgaaaacuuaaauaagaaaguggacgauggguuccuggacaucuggaccuacaacgccgagcuccuuguccuguuggaaaaugagcgcacacuagauuaucaugacucuaacgugaagaaccuguacgagaaaguacgaaaucaacucaagaacaaugcaaaagaaauuggcaacggauguuuugaguucuaucacaagugcgauaauacuuguauggaaagcguuaagaacggcaccuacgacuauccuaaauacucagaggaagccaagcugaauagagagaaaaucgauggggugaaacuugagaguacaaggauuuaucagauacuggcuaucuacuccaccgucgcgagcucuuuggugcucgucgugucacugggagcaauuaguuuuuggaugugcagcaacgguuccuuacagugccggaucuguaucuga

SEQ ID NO: 140752 - RNA, 1701 nt, Artificial Sequence; identical to SEQ ID NO: 138088
  derived and/or modified CDS sequence (opt3) from hemagglutinin__InfluenzaA__AIM56138

SEQ ID NO: 140753 - RNA, 1701 nt, Artificial Sequence; identical to SEQ ID NO: 138088
  derived and/or modified CDS sequence (opt3) from hemagglutinin__InfluenzaA__AIM56149

SEQ ID NO: 140754 - RNA, 1701 nt, Artificial Sequence; identical to SEQ ID NO: 139941
  derived and/or modified CDS sequence (opt3) from hemagglutinin__InfluenzaA__AIM56160

SEQ ID NO: 140755 - RNA, 1701 nt, Artificial Sequence; identical to SEQ ID NO: 138088
  derived and/or modified CDS sequence (opt3) from hemagglutinin__InfluenzaA__AIM56171

SEQ ID NO: 140756 - RNA, 1701 nt, Artificial Sequence
  derived and/or modified CDS sequence (opt3) from hemagglutinin__InfluenzaA__AIM56182
augaaggccauccuggugguccuccuuuacaccuucgcuacagcaaacgccgacacucugugcauuggcuaucacgcgaauaacagcacggauaccguugacacaguguuggagaaaaauguaacugugacccauuccgucaacuuacuggaagauaagcacaaugggaaacuauguaagcucagaggaguggcuccccugcaucuugguaaaugcaacauagccggcuggauccuggggaauccugagugugaaucuuugucaacagcaaguagcugguccuacauuguugagaccucuucgucagacaacggaacuugcuauccaggcgauuuuaucaauuacgaagaacucagggagcagcugagcaguguguccucuuucgaacgguuugagauuuucccgaaggccagcuccuggcccaaccacgacucaaauaagggugucacagcugcauguccucaugccggggcuaaaaguuuuuauaagaaccugaucuggcucgugaaaaagggaaauagcuacccaaaauuaucucaauccuauauaaacgauaagggcaaggaaguacugguucuuuggggcauccaccaccccucaaccacggccgaccagcagagcuuguaccagaaugcggaugcauacguguucgucgggaccagucgcuauucuaaaaaguuuaaaccugagauugccauccgaccaaaggugcgugaccaagagggaagaaugaacuacuauuggacucugguggaacccggugauaaaauuacauucgaggcuacuggcaaccuagucguuccuagguacgccuuuaccauggaacggaaugcaggguccggaaucauaauuagcgacacaccagugcaugauugcaacaccacgugucagacuccggagggcgcuaucaauacaucgcuccccuuccagaacauucacccuaucaccaucgguaagugcccaaaauauguaaagucuacuaagcugcgccuugccacagggcugagaaauauucccuccauacagucaaggggauuguuuggcgcgaucgccggcuucauugaagggggauggaccgguaugguggacggcugguacggguaucaucaccaaaacgagcagggaaguggcuacgcagcugaccucaaaagcacgcagaaugccaucgauaagauaaccaacaaagucaauuccgugauugagaagaugaacacacaguuuacugcuguugguaaagaguucaaucaccuggagaagcggaucgaaaacuuaaauaagaaaguggacgauggguuccuggacaucuggaccuacaacgccgagcuccuuguccuguuggaaaaugagcgcacacuagauuaucaugacucuaacgugaagaaccuguacgagaaaguacgaaaucaacucaagaacaaugcaaaagaaauuggcaacggauguuuugaguucuaucacaagugcgauaauacuuguauggaaagcguuaagaacggcaccuacgacuauccuaaauacucagaggaagccaagcugaauaaagagaagaucgauggggugaaacuugagaguacaagaauuuaucagauacuggcuaucuacuccaccgucgcgagcucuuuggugcucgucgugucacugggagcaauuaguuuuuggaugugcagcaacgguuccuuacagugcaggaucuguaucuga

SEQ ID NO: 140757 - RNA, 1701 nt, Artificial Sequence
  derived and/or modified CDS sequence (opt3) from hemagglutinin__InfluenzaA__AIM56193
augaaggccauccuggugguccuccuuuacaccuucgcuacagcaaacgccgacacucugugcauuggcuaucacgcgaauaacagcacggauaccguugacacaguguuggagaagaauguaacugugacccauuccgucaacuuacuggaagauaagcacaaugggaaacuauguaagcucagaggaguggcuccccugcaucuugguaaaugcaacauagccggcuggauccuggggaauccugagugugaaucuuugucaacagcaaguagcugguccuacauuguugagaccucuucgucagacaacggaacuugcuauccaggcgauuuuaucaauuacgaagaacucagggagcagcugagcaguguguccucuuucgaacgguuugagauuuucccgaagacaagcuccuggcccaaccacgacucaaauaagggugucaccgccgcuuguccucaugcaggggccaaaaguuuuuauaagaaccugaucuggcucgugaaaaagggaaauagcuacccaaaauuaucucaauccuauauaaacgauaagggcaaggaaguacugguucuuuggggcauccaccaccccucaacgacugcugaccagcagagcuuguaccagaaugccgaugcguacguguucgucgggaccagucgcuauucuaaaaaguuuaaaccugagauugcaauccgaccaaaggugcgugaccaagagggaagaaugaacuacuauuggacacugguggaacccggugauaaagucacuuucgaggccaccggcaaccuaguugugccuagguacgcuuuuacaauggaacggaaugccggguccggaauuaucauaagcgacaccccaguacaugauugcaacacgacuugucagacaccggagggcgcaauuaauaccucgcuccccuuccagaacauccacccuauuacuaucgguaagugcccaaaauaugugaagucuacaaagcugcgccuugcuaccgggcugagaaauguccccuccauccagucaaggggauuguuuggcgccauugcgggcuucauagaagggggauggacggguaugguggacggcugguacggguaucaucaccaaaacgagcagggaaguggcuacgccgcagaccucaaaagcacccagaaugcuaucgauaagauuacaaacaaaguuaauuccgugaucgagaagaugaacacucaguuuaccgccgucgguaaagaguucaaucaccuggagaagcggauagaaaacuuaaauaagaaaguggacgauggguuccuggacauuuggacauacaacgcugagcuccuuguacuguuggaaaaugagcgcacucuagauuaucaugacucuaacguuaagaaccuguacgagaaagugcgaaaucaacucaagaacaaugccaaagaaaucggcaacggauguuuugaguucuaucacaagugcgauaauaccuguauggaaagcgucaagaacggcacauacgacuauccuaaauacucagaggaagcaaagcugaauagagagaaaaucgauggggugaaacuugagaguaccaggauuuaucagauccuggccauuuacuccacugucgcuagcucuuuggugcucguugugucacugggagcgauaaguuuuuggaugugcagcaacgguuccuuacagugccggaucuguauuuga

SEQ ID NO: 140758 - RNA, 1701 nt, Artificial Sequence; identical to SEQ ID NO: 138088
  derived and/or modified CDS sequence (opt3) from hemagglutinin__InfluenzaA__AIM56204

SEQ ID NO: 140759 - RNA, 1701 nt, Artificial Sequence; identical to SEQ ID NO: 138088
  derived and/or modified CDS sequence (opt3) from hemagglutinin__InfluenzaA__AIM56215

SEQ ID NO: 140760 - RNA, 1701 nt, Artificial Sequence; identical to SEQ ID NO: 138088
  derived and/or modified CDS sequence (opt3) from hemagglutinin__InfluenzaA__AIM56226

SEQ ID NO: 140761 - RNA, 1701 nt, Artificial Sequence; identical to SEQ ID NO: 140499
  derived and/or modified CDS sequence (opt3) from hemagglutinin__InfluenzaA__AIM56237

SEQ ID NO: 140762 - RNA, 1701 nt, Artificial Sequence; identical to SEQ ID NO: 138088
  derived and/or modified CDS sequence (opt3) from hemagglutinin__InfluenzaA__AIM56259

SEQ ID NO: 140763 - RNA, 1701 nt, Artificial Sequence
  derived and/or modified CDS sequence (opt3) from hemagglutinin__InfluenzaA__AIM56270
augaaggccauccuggugguccuccuuuacaccuucgcuacagcaaacgccgacacucugugcauuggcuaucacgcgaauaacagcacggauaccguugacacaguguuggagaagaauguaacugugacccauuccgucaacuuacuggaagauaagcacaaugggaaacuauguaagcucagaggaguggcuccccugcaucuugguaaaugcaacauagccggcuggauccuggggaauccugagugugaaucuuugucaacagcaaguagcugguccuacauuguugagaccucuucgucagacaacggaacuugcuauccaggcgauuuuaucaauuacgaagaacucagggagcagcugagcaguguguccucuuucgaacgguuugagauuuucccgaagacaagcuccuggcccaaccacgacucaaauaagggugucaccgccgcuuguccucaugcaggggccaaaaguuuuuauaagaaccugaucuggcucgugaaaaagggaaauagcuacccaaaauuaucucaauccuauauaaacgauaagggcaaggaaguacugguucuuuggggcauccaccaccccucaacgacugcugaccagcagagcuuguaccagaaugccgaugcguacguguucgucgggaccagucgcuauucuaaaaaguuuaaaccugagauugcaauccgaccaaaggugcgugaccaagagggaagaaugaacuacuauuggacacugguggaacccggugauaaaauuacuuucgaggccaccggcaaccuagucguuccuagguacgcuuuuacaauggaacggaaugccggguccggaaucauaauuagcgacaccccagugcaugauugcaacacgacuugucagacaccggagggcgcaguaaauaccucgcuccccuuccagaacauccacccuauuacuaucgguaagugcccaaaauaugugaagucuacaaagcugcgccuugcuaccgggcugagaaauguccccuccauccagucaaggggauuguuuggcgccauugcgggcuucauagaagggggauggacggguaugguggacggcugguacggguaucaucaccaaaacgagcagggaaguggcuacgccgcagaccucaaaagcacccagaaugcuaucgauaagauuacaaacaaaguuaauuccgugaucgagaagaugaacacucaguuuaccgccgucgguaaagaguucaaucaccuggagaagcggauagaaaacuuaaauaagaaaguggacgauggguuccuggacauuuggacauacaacgcugagcuccuuguacuguuggaaaaugagcgcacucuagauuaucaugacucuaacguuaagaaccuguacgagaaagugcgaaaucaacucaagaacaaugccaaagaaaucggcaacggauguuuugaguucuaucacaagugcgauaauaccuguauggaaagcgucaagaacggcacauacgacuauccuaaauacucagaggaagcaaagcugaauagagagaaaaucgauggggugaaacuugagaguaccaggauuuaucagauccuggccauuuacuccacugucgcuagcucuuuggugcucguugugucacugggagcgauaaguuuuuggaugugcagcaacgguuccuuacagugccggaucuguauuuga

SEQ ID NO: 140764 - RNA, 1701 nt, Artificial Sequence; identical to SEQ ID NO: 138088
  derived and/or modified CDS sequence (opt3) from hemagglutinin__InfluenzaA__AIM56281

SEQ ID NO: 140765 - RNA, 1701 nt, Artificial Sequence
  derived and/or modified CDS sequence (opt3) from hemagglutinin__InfluenzaA__AIM56292
augaaggccauccuggugguccuccuuuacacccuggcuacagcaaacgccgacacuuugugcauuggcuaucacgcgaauaacagcacggauaccguugacacaguguuagagaaaaauguaacugugacccauuccgucaaccugcuagaagauaagcacaaugggaaacucuguaagcugagaggaguggcuccccuucaucuggguaaaugcaacauagccggcuggaucuuggggaauccugagugugaaucucucucaacagcaaguagcugguccuacauuguugagaccucuucgucagacaacggaacuugcuauccaggcgauuucaucaauuacgaggaacugagggagcagcugagcaguguguccucuuuugaacgguucgagauuuuuccgaagacaagcuccuggcccaaccacgacucaaauaagggugucaccgccgcuuguccucaugcaggggccaaaaguuucuauaagaaccucaucugguuagugaaaaagggaaauagcuacccaaaacugucucaauccuauauaaacgauaagggcaaggaaauccuuguauuguggggcauucaccaccccucaacgacugcugaccagcagagccuguaccagaaugccgaugcguacguuuuuguggggaccagucgcuauucuaaaaaguucaaaccugagaucgcaauucgaccaaagguccgugaccaagagggaagaaugaacuacuauuggacacuuguggaacccggugauaaaaucacuuuugaggccaccggcaaccucguggucccuagguacgcuuucacaauggaacggaaugccggguccggaauaauuaucagcgacaccccaguucaugauugcaacacgacuugucagacaccggagggcgcaauuaauaccucgcugcccuuucagaacauccacccuaucacuauugguaagugcccaaaauaugugaagucuacaaagcuacgccuggcuaccggguugagaaauguacccuccauacagucaaggggacucuucggcgccaucgcgggcuuuauugaagggggauggacggguaugguggacggcugguacggguaucaucaccaaaacgagcagggaaguggcuacgccgcagaccugaaaagcacccagaaugcuaucgauaagauaacaaacaaagucaauuccgugauugagaagaugaacacucaguucaccgccguugguaaagaauuuaaucacuuagagaagcggaucgaaaaccugaauaagaaaguggacgauggguuccucgacaucuggacauacaacgcugagcuucuggucuugcuagaaaaugagcgcacucuggauuaucaugacucuaacgugaagaaccucuacgagaaaguacgaaaucaacugaagaacaaugccaaagaaauuggcaacggauguuucgaguuuuaucacaagugcgauaauaccuguauggaaagcguuaagaacggcacauacgacuauccuaaauacucagaggaagcaaaacuuaauagagagaagaucgauggggugaagcuggagaguaccaggauuuaucagauauuggccaucuacuccacugucgcuagcucucucgugcuggucgugucauuaggagcgauuaguuucuggaugugcagcaacgguucccugcagugccggaucuguaucuga

SEQ ID NO: 140766 - RNA, 1701 nt, Artificial Sequence
  derived and/or modified CDS sequence (opt3) from hemagglutinin__InfluenzaA__AIM56303
augaaggccauccuggugguccuccuuuacacccuggcuacagcaaacgccgacacuuugugcauuggcuaucacgcgaauaacagcacggauaccguugacacaguguuagagaaaaauguaacugugacccauuccgucaaccugcuagaagauaagcacaaugggaaacucuguaagcugagaggaguggcuccccuucaucuggguaaaugcaacauagccggcuggaucuuggggaauccugagugugaaucucucucaacagcaaguagcugguccuacauuguugagaccucuucgucagacaacggaacuugcuauccaggcgauuucaucaauuacgaggaacugagggagcagcugagcaguguguccucuuuugaacgguucgagauuuuuccgaagacaagcuccuggcccaaccacgacucaaauaagggugucaccgccgcuuguccucaugcaggggccaaaaguuucuauaagaaccucaucugguuagugaaaaagggaaauagcuacccaaaacugucucaauccuauauaaacgauaagggcaaggaaguacuuguuuuguggggcauccaccaccccucaacgacugcugaccagcagagccuguaccagaaugccgaugcguacguguuugucgggaccagucgcuauucuaaaaaguucaaaccugagauugcaauccgaccaaaggugcgugaccaagagggaagaaugaacuacuauuggacacuuguggaacccggugauaaaauuacuuuugaggccaccggcaaccucgucguuccuagguacgcuuucacaauggaacggaaugccggguccggaaucauaauuagcgacacccaggugcaugauugcaacacgacuugucagacaccagagggcgcaaucaauaccucgcugccguuucagaacauucaccccaucacuaucgguaagugcccuaaauauguaaagucuacaaagcuacgccuggcuaccggguugagaaaugugccauccauucaaucaaggggacucuucggcgccauagcgggcuuuaucgaagggggauggacggguauggucgacggcugguacggguaucaucaccagaacgagcagggaaguggcuacgccgcagaccugaaaagcacccagaaugcuauugauaagaucacaaacaaaguuaauuccgugauagagaagaugaacacucaauucaccgccguggguaaagaauuuaaucacuuagagaagcggauugaaaaccugaauaagaaagucgacgauggguuccucgacaucuggacauacaacgcugagcuucugguguugcuagaaaaugagcgcacucuggauuaucaugacucuaacguaaagaaccucuacgagaaaguucgaaaucagcugaagaacaaugccaaagaaaucggcaacggauguuucgaguuuuaucacaagugcgauaauaccuguauggaaagcgugaagaacggcacauacgacuaucccaaauacucagaggaagcaaaacuuaauagagagaagauugauggggucaagcuggagaguaccaggaucuaucagauuuuggccauauacuccacuguggcuagcucucucguccuggugguuucauuaggagcgaucaguuucuggaugugcagcaacgguucccugcaaugccggauuuguaucuga

SEQ ID NO: 140767 - RNA, 1701 nt, Artificial Sequence
  derived and/or modified CDS sequence (opt3) from hemagglutinin__InfluenzaA__AIM56314
augaaggccauccuggugguccuccuuuacaccuucgcuacagcaaacgccgacacucugugcauuggcuaucacgcgaauaacagcacggauaccguugacacaguguuggagaaaaauguaacugugacccauuccgucaacuuacuggaagauaagcacaaugggaaacuauguaagcucagaggaguggcuccccugcaucuugguaaaugcaacauagccggcuggauccuggggaauccugagugugaaucuuugucaacagcaaguagcugguccuacauuguugagaccucuucgucagacaacggaacuugcuauccaggcgauuuuaucaauuacgaagaacucagggagcagcugagcaguguguccucuuucgaacgguuugagauuuucccgaagacaagcuccuggcccaaccacgacucaaauaagggugucaccgccgcuuguccucaugcaggggccaaaaguuuuuauaagaaccugaucuggcucgugaaaaagggaaauagcuacccaaaauuaucucaauccuauauaaacgauaagggcaaggaaguacugguucuuuggggcauccaccaccccucaacgacugcugaccagcagagcuuguaccagaaugccgaugcguacguguucgucgggaccagucgcuauucuaaaaaguuuaaaccugagauugcaauccgaccaaaggugcgugaccaagagggaagaaugaacuacuauuggacacugguggaacccggugauaaaauuacuuucgaggccaccggcaaccuagucguuccuagguacgcuuuuacaauggaacggaaugccggguccggaaucauaauuagcgacaccccagugcaugauugcaacacgacuugucagacaccggagggcgcaaucaauaccucgcuccccuuccagaacauucacccuaucacuaucgguaagugcccaaaauauguaaagucuacaaagcugcgccuugcuaccgggcugagaaaugugcccuccauucagucaaggggauuguuuggcgccauagcgggcuucaucgaagggggauggacggguauggucgacggcugguacggguaucaucaccaaaacgagcagggaaguggcuacgccgcagaccucaaaagcacccagaaugcuauugauaagaucacaaacaaaguuaauuccgugauagagaagaugaacacucaguuuaccgccguggguaaagaguucaaucaccuggagaagcggauugaaaacuuaaauaagaaagucgacgauggguuccuggacaucuggacauacaacgcugagcuccuugugcuguuggaaaaugagcgcacucuagauuaucaugacucuaacguaaagaaacuguacgagaagguucgaaaccaacucaaaaauaacgccaaggaaaucggcaauggauguuuugaguucuaucacaagugcgauaacaccuguauggaaagcgugaaaaauggcacauacgacuauccuaaguacucagaggaagcaaaacugaacagagagaagauugauggggucaaacuugagaguaccaggaucuaucagauucuggccauauacuccacuguggcuagcucuuugguccucgugguuucacugggagcgaucaguuuuuggaugugcagcaaugguuccuuacagugccggauuuguaucuga

SEQ ID NO: 140768 - RNA, 1701 nt, Artificial Sequence; identical to SEQ ID NO: 138088
  derived and/or modified CDS sequence (opt3) from hemagglutinin__InfluenzaA__AIM56325

SEQ ID NO: 140769 - RNA, 1701 nt, Artificial Sequence
  derived and/or modified CDS sequence (opt3) from hemagglutinin__InfluenzaA__AIM56336
augaaggccauccuggugguccuccuuuacaccuucgcuacagcaaacgccgacacucugugcauuggcuaucacgcgaauaacagcacggauaccguugacacaguguuggagaagaauguaacugugacccauuccgucaacuuacuggaagauaagcacaaugggaaacuauguaagcucagaggaguggcuccccugcaucuugguaaaugcaacauagccggcuggauccuggggaauccugagugugaaucuuugucaacagcaaguagcugguccuacauuguugagaccucuucgucagacaacggaacuugcuauccaggcgauuuuaucaauuacgaagaacucagggagcagcugagcaguguguccucuuucgaacgguuugagauuuucccgaagacaagcuccuggcccaaccacgacucaaauaagggugucaccgccgcuuguccucaugcaggggccaaaaguuuuuauaagaaccugaucuggcucgugaaaaagggaaauagcuacccaaaauuaucucaauccuauauaaacgauaagggcaaggaaguacugguucuuuggggcauccaccaccccucaacgacugcugaccagcagagcuuguaccagaaugccgaugcguacguguucgucgggaccagucgcuauucuaaaaaguuuaaaccugagauugcaauccgaccaaaggugcgugaccaagagggaagaaugaacuacuauuggacacugguggaacccggugauaaaauuacuuucgaggccaccggcaaccuagucguuccuagguacgcuuuuacaauggaacggaaugccggguccggaaucauaauuagcgacaccccagugcaugauugcaacacgacuugucagacaccggagggcgcaaucaauaccucgcuccccuuccagaacauucacccuaucacuaucgguaagugcccaaaauauguaaagucuacaaagcugcgccuugcuaccgggcugagaaauauucccuccauacagucaaggggauuguuuggcgccaucgcgggcuucauugaagggggauggacggguaugguggacggcugguacggguaucaucaccaaaacgagcagggaaguggcuacgccgcagaccucaaaagcacccagaaugcuaucgauaagauaacaaacaaagucaauuccgugauugagaagaugaacacucaguuuaccgccguugguaaagaguucaaucaccuggagaagcggaucgaaaacuuaaauaagaaaguggacgauggguuccuggacaucuggacauacaacgcugagcuccuuguccuguuggaaaaugagcgcacucuagauuaucaugacucuaacgugaagaaccuguacgagaaaauucgaaaucaacucaagaacaaugccaaagaaaucggcaacggauguuuugaguucuaucacaagugcgauaauauguguauggaaagcguaaagaacggcaccuacgacuauccuaaauacucagaggaagcaaagcugaauagagagaaaauugaugggguuaaacuugagaguacaaggauauaucagauccuggccauuuacuccaccguggcuagcucuuugguccucguggucucacugggagcgaucaguuuuuggaugugcagcaacgguuccuuacagugccggaucuguauuuga

SEQ ID NO: 140770 - RNA, 1701 nt, Artificial Sequence
  derived and/or modified CDS sequence (opt3) from hemagglutinin__InfluenzaA__AIM56347
augaaggccauccuggugguccuccuuuacaccuucgcuacagcaaacgccgacacucugugcauuggcuaucacgcgaauaacagcacggauaccguugacacaguguuggagaagaauguaacugugacccauuccgucaacuuacuggaagauaagcacaaugggaaacuauguaagcucagaggaguggcuccccugcaucuugguaaaugcaacauagccggcuggauccuggggaauccugagugugaaucuuugucaacaaccaguagcugguccuacauuguugagacuucuucgucagacaacggaacaugcuauccaggcgauuuuaucaauuacgaagaacucagggagcagcugagcaguguguccucuuucgaacgguuugagauuuucccgaagaccagcuccuggcccaaccacgacucaaauaagggugucacggcagccuguccucaugcuggggcaaaaaguuuuuauaagaaccugaucuggcucgugaaaaagggaaauagcuacccaaaauuaucucaauccuauauaaacgauaagggcaaggaaguacugguucuuuggggcauccaccaccccucaacuaccgccgaccagcagagcuuguaccagaaugcugaugccuacguguucgucgggacaagucgcuauucuaaaaaguuuaaaccugagauugcgauccgaccaaaggugcgugaccaagagggaagaaugaacuacuauuggacucugguggaacccggugauaaaauuaccuucgaggcaacaggcaaccuagucguuccuagguacgccuuuaccauggaacggaaugcuggguccggaaucauaauuagcgacacgccagugcaugauugcaacacuacaugucagaccccggagggcgccaucaauacuucgcuccccuuccagaacauucacccuaucacaaucgguaagugcccaaaauauguaaagucuaccaagcugcgccuugcaacggggcugagaaaugugcccuccauucagucaaggggauuguuuggcgcuauagccggcuucaucgaagggggauggaccgguauggucgacggcugguacggguaucaucaccaaaacgagcagggaaguggcuacgcggccgaccucaaaagcacacagaaugcaauugauaagaucacuaacaaaguuaauuccgugauagagaagaugaacacccaguuuacagcuguggguaaagaguucaaucaccuggagaagcggauugaaaacuuaaauaagaaagucgacgauggguuccuggacaucuggacuuacaacgccgagcuccuugugcuguuggaaaaugagcgcacccuagauuaucaugacucuaacguaaagaaccuguacgagaaaguucgaaaucaacucaagaacaaugcuaaagaaaucggcaacggauguuuugaguucuaucacaagugcgauaauacauguauggaaagcgugaagaacggcaccuacgacuauccuaaauacucagaggaagccaagcugaauagagagaaaauugauggggucaaacuugagaguacuaggaucuaucagauucuggcaauauacuccacgguggccagcucuuugguccucgugguuucacugggagcuaucaguuuuuggaugugcagcaacgguuccuuacagugccggauuuguaucuga

SEQ ID NO: 140771 - RNA, 1701 nt, Artificial Sequence
  derived and/or modified CDS sequence (opt3) from hemagglutinin__InfluenzaA__AIM56358
augaaggccauccuggugguccuccuuuacaccuucgcuacagcaaacgccgacacucugugcauuggcuaucacgcgaauaacagcacggauaccguugacacaguguuggagaaaaauguaacugugacccauuccgucaacuuacuggaagauaagcacaaugggaaacuauguaagcucagaggaguggcuccccugcaucuugguaaaugcaacauagccggcuggauccuggggaauccugagugugaaucuuugucaacagcaaguagcugguccuacauuguugagaccucuucgucagacaacggaacuugcuauccaggcgauuuuaucaauuacgaggagcucagggagcagcugagcaguguguccucuuucgaacgguuugagauuuucccgaagacaagcuccuggcccaaccacgacucaaauaagggugucaccgccgcuuguccucaugcaggggccaaaaguuuuuauaagaaccugaucuggcucgugaaaaagggaaauagcuacccaaaauuaucucaauccuauauaaacgauaagggcaaggaaguacugguucuuuggggcauccaccaccccucaacgacugcugaccagcagagcuuguaccagaaugccgaugcguacguguucgucgggaccagucgcuauucuaaaaaguuuaaaccugagauugcaauccgaccaaaggugcgugaccaagagggaagaaugaacuacuauuggacacuggugaaacccggugauaagauuacuuucgaagccaccggcaaccuagucguuccuagguacgcuuuuacaauggagcggaaugccggguccggaaucauaauuagcgacaccccagugcaugauugcaacacgacuugucagacaccggaaggcgcaaucaauaccucgcuccccuuccagaacauucacccuaucacuaucgguaaaugcccaaaguauguaaagucuacaaaacugcgccuugcuaccgggcugagaaaugugcccuccauucagucaaggggauuguuuggcgccauagcgggcuucaucgaagggggauggacggguauggucgacggcugguacggguaucaucaccaaaacgaacagggaaguggcuacgccgcagaccucaagagcacccagaaugcuauugauaaaaucacaaacaagguaaauuccguuauagagaaaaugaacacucaguuuaccgccguggguaaggaguucaaucaccuggaaaagcggauugagaacuuaaauaaaaaggucgacgauggguuccuggacaucuggacauacaacgcugaacuccuugugcuguuggagaaugaacgcacucuagauuaucaugacucuaacgugaaaaaccuguacgagaagguucgaaaucaacucaaaaacaaugccaaggagaucggcaacggauguuuugaguucuaucacaagugcgauaauaccuguauggaaagcgugaaaaacggcacauacgacuauccuaaguacucagaagaggcaaaacugaauagagaaaagauugauggggucaaacuugagaguaccaggaucuaucagauucuggccauauacuccacuguggcuagcucuuugguccucgugguuucacugggagcgaucaguuuuuggaugugcagcaacgguuccuuacagugccggauuuguaucuga

SEQ ID NO: 140772 - RNA, 1701 nt, Artificial Sequence; identical to SEQ ID NO: 138088
  derived and/or modified CDS sequence (opt3) from hemagglutinin__InfluenzaA__AIM56369

SEQ ID NO: 140773 - RNA, 1701 nt, Artificial Sequence
  derived and/or modified CDS sequence (opt3) from hemagglutinin__InfluenzaA__AIM56380
augaaggccauccuggugguccuccuuuacaccuucgcuacagcaaacgccgacacucugugcauuggcuaucacgcgaauaacagcacggauaccguugacacaguguuggagaagaauguaacugugacccauuccgucaacuuacuggaagauaagcacaaugggaaacuauguaagcucagaggaguggcuccccugcaucuugguaaaugcaacauagccggcuggauccuggggaauccugagugugaaucuuugucaacagcaaguagcugguccuacauuguugagaccucuucgucagacaacggaacuugcuauccaggcgauuuuaucaauuacgaagaacucagggagcagcugagcaguguguccucuuucgaacgguuugagauuuucccgaagacaagcuccuggcccaaccacgacucaaauaagggugucaccgccgcuuguccucaugcaggggccaaaaguuuuuauaagaaccugaucuggcucgugaaaaagggaaauagcuacccaaaauuaucucaauccuauauaaacgauaagggcaaggaaguacugguucuuuggggcauccaccaccccucaacgacugcugaccagcagagcuuguaccagaaugccgaugcguacguguucgucgggaccagucgcuauucuaaaaaguuuaaaccugagauugcaauccgaccaaaggugcgugaccaagagggaagaaugaacuacuauuggacacugguggaacccggugauaaaauuacuuucgaggccaccggcaaccuagucguuccuagguacgcuuuuacaauggaacggaaugccggguccggaaucauaauuagcgacaccccagugcaugauugcaacacgacuugucagacaccggagggcgcaaucaauaccucgcuccccuuccagaacauucacccuaucacuaucgguaagugcccaaaauauguaaagucuacaaagcugcgccuugcuaccgggcugagaaaugugcccuccauucagucaaggggauuguuuggcgccauagcgggcuucaucgaagggggauggacggguauggucgacggcugguacggguaucaucaccaaaacgagcagggaaguggcuacgccgcagaccucaaaagcacccagaaugcuauugauaagaucacaaacaaaguuaauuccgugauagagaagaugaacacucaguuuaccgccguggguaaagaguucaaucaccuggagaagcggauugaaaacuuaaauaagaaagucgacgauggguuccuggacaucuggacauacaacgcugagcuccuugugcuguuggaaaaugagcgcacucuagauuaucaugacucuaacguaaagaaccuguacgagaaaguucgaaaucaacucaagaacaaugccaaagaaaucggcaacggauguuuugaguucuaucacaagugcgauaauaccuguauggaaagcgugaagaacggcacauacgacuauccuaaauacucagaggaagcaaagcugaguagagagaaaauugauggggucaaacuugaguccaccaggaucuaucagauucuggccauauacagcacuguggcuucuucauugguccucgugguuagucugggagcgaucagcuuuuggaugugcuccaaugguucuuuacagugccggauuuguaucuga

SEQ ID NO: 140774 - RNA, 1701 nt, Artificial Sequence; identical to SEQ ID NO: 138088
  derived and/or modified CDS sequence (opt3) from hemagglutinin__InfluenzaA__AIM56391

SEQ ID NO: 140775 - RNA, 1701 nt, Artificial Sequence; identical to SEQ ID NO: 138088
  derived and/or modified CDS sequence (opt3) from hemagglutinin__InfluenzaA__AIM56402

SEQ ID NO: 140776 - RNA, 1701 nt, Artificial Sequence; identical to SEQ ID NO: 139941
  derived and/or modified CDS sequence (opt3) from hemagglutinin__InfluenzaA__AIM56413

SEQ ID NO: 140777 - RNA, 1701 nt, Artificial Sequence; identical to SEQ ID NO: 138088
  derived and/or modified CDS sequence (opt3) from hemagglutinin__InfluenzaA__AIM56425

SEQ ID NO: 140778 - RNA, 1701 nt, Artificial Sequence; identical to SEQ ID NO: 138088
  derived and/or modified CDS sequence (opt3) from hemagglutinin__InfluenzaA__AIM56436

SEQ ID NO: 140779 - RNA, 1701 nt, Artificial Sequence; identical to SEQ ID NO: 138088
  derived and/or modified CDS sequence (opt3) from hemagglutinin__InfluenzaA__AIM56447

SEQ ID NO: 140780 - RNA, 1701 nt, Artificial Sequence; identical to SEQ ID NO: 138088
  derived and/or modified CDS sequence (opt3) from hemagglutinin__InfluenzaA__AIM56469

SEQ ID NO: 140781 - RNA, 1701 nt, Artificial Sequence
  derived and/or modified CDS sequence (opt3) from hemagglutinin__InfluenzaA__AIM56480
augaaggccauccuggugguccuccuuuacaccuucgcuacaacuaacgcagacacgcugugcauuggcuaucacgccaauaacagcaccgauacaguugacacuguguuggagaaaaauguaaccgugacacauuccgucaacuuacuggaagauaagcacaaugggaaacuauguaagcucagaggaguggcgccccugcaucuugguaaaugcaacauagcuggcuggauccuggggaauccugagugugaaucuuugucaaccgccaguagcugguccuacauuguugagacuucuucgucagacaacggaacaugcuauccaggcgauuuuaucaauuacgaagaacucagggagcagcugagcaguguguccucuuucgaacgguuugagauuuucccgaagaccagcuccuggcccaaccacgacucaaauaagggugucacggcagccuguccucaugcuggggcaaaaaguuuuuauaagaaccugaucuggcucgugaaaaagggaaauagcuacccaaaauuaucucaauccuauauaaacgauaagggcaaggaaguacugguucuuuggggcauccaccaccccucaacuaccgccgaccagcagagcuuguaccagaaugcugaugccuacguguucgucgggacaagucgcuauucuaaaaaguuuaaaccugagauugcgauccgaccaaaggugcgugaccaagagggaagaaugaacuacuauuggacucugguggaacccggugauaaaauuaccuucgaggcaacaggcaaccuagucguuccuagguacgccuuuaccauggaacggaaugcuggguccggaaucauaauuagcgacacgccagugcaugauugcaacacuacaugucagaccccggagggcgccaucaauacuucgcuccccuuccagaacauucacccuaucacacuggguaagugcccaaaauauguaaagucuaccaagcugcgccuugcaacgggguugagaaaugugcccuccauccagucaaggggacucuuuggcgcuauugccggcuucauagaagggggauggaccgguauggucgacggcugguacggguaucaucaccaaaacgagcagggaaguggcuacgcggccgaccugaaaagcacacagaaugcaaucgauaagauuacuaacaaaguuaauuccgugaucgagaagaugaacacccaguuuacagcuguggguaaagaguucaaucacuuagagaagcggauagaaaaccugaauaagaaagucgacgauggguuccucgacauuuggacuuacaacgccgagcuucugguguugcuagaaaaugagcgcacccuggauuaucaugacucuaacguaaagaaccucuacgagaaaguucgaaaucaacugaagaacaaugcuaaagaaaucggcaacggauguuuugaguucuaucacaagugcgauaauacauguauggaaagcgugaagaacggcaccuacgacuauccuaaauacucagaggaagccaaacuuaauagagagaagaucgauggggucaagcuggagaguacuaggauuuaucagaucuuggcaauuuacuccacgguggccagcucucucguccuggugguuucauuaggagcuauaaguuuuuggaugugcagcaacgguucccugcagugccggaucuguauuuga

SEQ ID NO: 140782 - RNA, 1701 nt, Artificial Sequence; identical to SEQ ID NO: 138088
  derived and/or modified CDS sequence (opt3) from hemagglutinin__InfluenzaA__AIM56491

SEQ ID NO: 140783 - RNA, 1710 nt, Artificial Sequence
  derived and/or modified CDS sequence (opt3) from hemagglutinin__InfluenzaA__AIM56502
augaaggccauccuggugguccuccuuuacaccuucgcuacagcaaacgccgacacucugugcauuggcuaucacgcgaauaacagcacggauaccguugacacaguguuggagaaaaauguaacugugacccauuccgucaacuuacuggaagauaagcacaaugggaaacuauguaagcucagaggaguggcuccccugcaucuugguaaaugcaacauagccggcuggauccuggggaauccugagugugaaucuuugucaacagcaaguagcugguccuacauuguugagaccucuucgucagacaacggaacuugcuauccaggcgauuuuaucaauuacgaagaacucagggagcagcugagcaguguguccucuuucgaacgguuugagauuuucccgaaggccagcuccuggcccaaccacgacucaaauaagggugucacagcugcauguccucaugccggggcuaaaaguuuuuauaagaaccugaucuggcucgugaaaaagggaaauagcuacccaaaauuaucucaauccuauauaaacgauaagggcaaggaaguacugguucuuuggggcauccaccaccccucaaccacggccgaccagcagagcuuguaccagaaugcggaugcauacguguucgucgggaccagucgcuauucuaaaaaguuuaaaccugagauugccauccgaccaaaggugcgugaccaagagggaagaaugaacuacuauuggacucugguggaacccggugauaaaauuacauucgaggcuacuggcaaccuagucguuccuagguacgccuuuaccauggaacggaaugcaggguccggaaucauaauuagcgacacaccagugcaugauugcaacaccacgugucagacuccggagggcgcuaucaauacaucgcucaccucucugcccuuccagaacauucacccuaucacuaucgguaagugcccaaaauauguaaaguccacaaaacuucgccuggccaccggguugagaaauauucccucaauacagaguaggggacucuuuggcgcgaucgccggcuucauugaagggggauggacggguaugguggacggcugguacggguaucaucaccaaaacgagcagggaagcggcuacgcagcugaccugaaguccacccagaaugccaucgauaagauaacaaacaaagucaauucugugauugagaagaugaacacucaguuuaccgcuguugguaaagaguucaaucacuuagagaagcggaucgaaaaccugaauaagaaaguggacgauggguuccucgacaucuggacauacaacgccgagcuucuggucuugcuagaaaaugagcgcacucuggauuaucaugacagcaacgugaagaaccucuacgagaaaguacgaaaucaacugaagaacaaugcaaaagaaauuggcaacggauguuuugaguucuaucacaagugcgauaauaccuguauggaaucaguuaagaacggcacauacgacuauccuaaauacagugaggaagccaaacuuaauagagagaagaucgauggggugaagcuggaguccaccaggauuuaucagauauuggcuaucuacagcacugucgcgucuucacucgugcuggucgugaguuuaggagcaauuagcuuuuggaugugcuccaacgguucucugcagugccggaucuguaucuga

SEQ ID NO: 140784 - RNA, 1701 nt, Artificial Sequence; identical to SEQ ID NO: 138088
  derived and/or modified CDS sequence (opt3) from hemagglutinin__InfluenzaA__AIM56513

SEQ ID NO: 140785 - RNA, 1701 nt, Artificial Sequence; identical to SEQ ID NO: 140033
  derived and/or modified CDS sequence (opt3) from hemagglutinin__InfluenzaA__AIM56524

SEQ ID NO: 140786 - RNA, 1701 nt, Artificial Sequence; identical to SEQ ID NO: 138088
  derived and/or modified CDS sequence (opt3) from hemagglutinin__InfluenzaA__AIM56535

SEQ ID NO: 140787 - RNA, 1701 nt, Artificial Sequence; identical to SEQ ID NO: 138088
  derived and/or modified CDS sequence (opt3) from hemagglutinin__InfluenzaA__AIM56546

SEQ ID NO: 140788 - RNA, 1701 nt, Artificial Sequence; identical to SEQ ID NO: 139941
  derived and/or modified CDS sequence (opt3) from hemagglutinin__InfluenzaA__AIM56557

SEQ ID NO: 140789 - RNA, 1701 nt, Artificial Sequence
  derived and/or modified CDS sequence (opt3) from hemagglutinin__InfluenzaA__AIM56568
augaaggccauccuggugguccuccuuuacaccuucgcuacagcaaacgccgacacucugugcauuggcuaucacgcgaauaacagcacggauaccguugacacaguguuggagaaaaauguaacugugacccauuccgucaacuuacuggaagauaagcacaaugggaaacuauguaagcucagaggaguggcuccccugcaucuugguaaaugcaacauagccggcuggauccuggggaauccugagugugaaucuuugucaacagcaaguagcugguccuacauuguugagaccucuucgucagacaacggaacuugcuauccaggcgauuuuaucaauuacgaagaacucagggagcagcugagcaguguguccucuuucgaacgguuugagauuuucagcaagacauccucauggccgaaccacgacaguaauaagggugucaccgccgcuuguccccaugcaggggccaagagcuuuuauaagaaccugaucuggcucgugaaaaagggaaauucuuacccuaaauuaucccaaucauauauaaacgauaagggcaaggaaguacugguucuuuggggcauccaccacccaagcacgacugcugaccagcagaguuuguaccagaaugccgaugcguacguguucgucgggaccucucgcuauuccaaaaaguuuaaacccgagauugcaauccgaccuaaggugcgugaccaagagggaagaaugaacuacuauuggacacugguggaaccaggugauaaaauuacuuucgaggccaccggcaaccuagucguucccagguacgcuuuuacaauggaacggaaugccgggagcggaaucauaauuucggacaccccugugcaugauugcaacacgacuugucagacaccagagggcgcaaucaauaccucucucccguuccagaacauucaccccaucacuaucgguaagugcccuaaauauguaaaguccacaaagcugcgccuugcuaccgggcugagaaaugugccaucaauucagaguaggggauuguuuggcgccauagcgggcuucaucgaagggggauggacggguauggucgacggcugguacggguaucaucaccaaaacgagcagggaagcggcuacgccgcagaccucaaauccacccagaaugcuauugauaagaucacaaacaaaguuaauucugugauagagaagaugaacacucaguuuaccgccguggguaaagaguucaaucaccuggagaagcggauugaaaacuuaaauaagaaagucgacgauggguuccuggacaucuggacauacaacgcugagcuccuugugcuguuggaaaaugagcgcacucuagauuaucaugacagcaacguaaagaaccuguacgagaaaguucgaaaucaacucaagaacaaugccaaagaaaucggcaacggauguuuugaguucuaucacaagugcgauaauaccuguauggaaucagugaagaacggcacauacgacuaucccaaauacagugaggaagcaaagcugaauagagagaaaauugauggggucaaacuugaguccaccaggaucuaucagauucuggccauauacagcacuguggcuucuucauugguccucgugguuagucugggagcgaucagcuuuuggaugugcuccaacgguucuuuacagugccggauuuguaucuga

SEQ ID NO: 140790 - RNA, 1701 nt, Artificial Sequence
  derived and/or modified CDS sequence (opt3) from hemagglutinin__InfluenzaA__AIM56579
augaaggccauccuggugguccuccuuuacaccuucgcuacaacuaacgcagacacgcugugcauuggcuaucacgccaauaacagcaccgauacaguugacacuguguuggagaaaaauguaaccgugacacauuccgucaacuuacuggaagaugagcacaaugggaagcuauguaaacucagaggaguggcgccccugcaucuugguaagugcaacauagcuggcuggauccuggggaauccugaaugugagucuuugucaaccgccaguagcugguccuacauuguugaaacuucuucgucagacaacggaacaugcuauccaggcgauuuuaucaauuacgaggagcucagggaacagcugagcaguguguccucuuucgagcgguuugaaauuuucccgaaaaccagcuccuggcccaaccacgacucaaauaagggugucacggcagccuguccucaugcuggggcaaagaguuuuuauaaaaaccugaucuggcucgugaagaaaggaaauagcuacccaaaguuaucucaauccuauauaaacgauaaaggcaaggagguacugguucuuuggggcauccaccaccccucaacuaccgccgaccagcagagcuuguaccagaauacagaugcuuacguguucgucgggaccagucgcuauucuaagaaauuuaagccugagauugccauccgaccaaaagugcgugaccaagaaggaagaauguccuacuauuggacucugguggagcccggugauaagauuacauucgaagcgaccggcaaccuagucguuccuagguacgcauuuacgauggagcggaacgccgggagcggaaucauaauuucggacacuccagugcaugauugcaauacaaccugucagacuccggaaggcgcuaucaacacaucucuccccuuccagaauauucacccuaucaccaucgguaaaugcccaaaguauguaaaauccacgaagcugcgccuugccaccgggcugagaaacgugcccucaauucagaguaggggauuguuuggcgcaauagcuggcuucaucgaagggggauggacagguauggucgacggcugguacggguaucaucaccaaaaugagcagggaagcggcuacgccgcggaccucaaguccacucagaacgccauugauaaaaucaccaauaaggugaacucuguuauagagaaaaugaauacacaguuuacugcaguggguaaggaguucaaccaccuggaaaaacggauugagaauuuaaacaagaaggucgacgauggguuccuggacaucuggaccuacaaugcugaacuccuugugcuguuggagaacgagcgcacacuagauuaucaugacagcaauguuaaaaaccuguacgaaaagguacgaaaccaacucaaaaauaacgccaaggagaucggcaauggauguuuugaguucuaucacaaaugcgauaacaccuguauggaaucagugaagaauggcacuuacgacuauccuaaguacagugaagaggcuaaacugaacagagagaagauugauggggucaaacuugaauccacgaggaucuaucagauucuggccauauacagcacaguggcaucuucauugguccucgugguuagucugggagccaucagcuuuuggaugugcuccaaugguucuuuacagugccggauuuguaucuga

SEQ ID NO: 140791 - RNA, 1710 nt, Artificial Sequence
  derived and/or modified CDS sequence (opt3) from hemagglutinin__InfluenzaA__AIM56590
augaaggccauccuggugguccuccuuuacaccuucgcuacagcaaacgccgacacucugugcauuggcuaucacgcgaauaacagcacggauaccguugacacaguguuggagaaaaauguaacugugacccauuccgucaacuuacuggaagauaagcacaaugggaaacuauguaagcucagaggaguggcuccccugcaucuugguaaaugcaacauagccggcuggauccuggggaauccugagugugaaucuuugucaacagcaaguagcugguccuacauuguugagaccucuucgucagacaacggaacuugcuauccaggcgauuuuaucaauuacgaagaacucagggagcagcugagcaguguguccucuuucgaacgguuugagauuuucccgaagacaagcuccuggcccaaccacgacucaaauaagggugucaccgccgcuuguccucaugcaggggccaaaaguuuuuauaagaaccugaucuggcucgugaaaaagggaaauagcuacccaaaauuaucucaauccuauauaaacgauaagggcaaggaaguacugguucuuuggggcauccaccaccccucaacgacugcugaccagcagagcuuguaccagaaugccgaugcguacguguucgucgggaccagucgcuauucuaaaaaguuuaaaccugagauugcaauccgaccaaaggugcgugaccaagagggaagaaugaacuacuauuggacacugguggaacccggugauaaaauuacuuucgaggccaccggcaaccuagucguuccuagguacgcuuuuacaauggaacggaaugccggguccggaaucauaauuagcgacaccccagugcaugauugcaacacgacuugucagacaccggagggcgcaaucaauaccucgcucacuucucugcccuuccagaacauucacccuaucacaaucgguaagugcccaaaauauguaaaguccaccaaacuucgccuggcuacgggguugagaaaugugcccucaauucagaguaggggacucuuuggcgccauagcgggcuucaucgaagggggauggaccgguauggucgacggcugguacggguaucaucaccaaaacgagcagggaagcggcuacgccgcagaccugaaguccacacagaaugcuauugauaagaucacuaacaaaguuaauucugugauagagaagaugaacacccaguuuacagccguggguaaagaguucaaucacuuagagaagcggauugaaaaccugaauaagaaagucgacgauggguuccucgacaucuggacuuacaacgcugagcuucugguguugcuagaaaaugagcgcacccuggauuaucaugacagcaacguaaagaaccucuacgagaaaguucgaaaucaacugaagaacaaugccaaagaaaucggcaacggauguuuugaguucuaucacaagugcgaugacacauguauggaaucagugaagaauggcaccuacgauuauccuaaauacagugaggaagcaaaacuuaacagagagaagauugacggggucaagcuggaguccacuaggaucuaucagauuuuggccauauacagcacgguggcuucuucacucguccuggugguuaguuuaggagcgaucagcuuuuggaugugcuccaaugguucucugcagugccggauuuguaucuga

SEQ ID NO: 140792 - RNA, 1710 nt, Artificial Sequence
  derived and/or modified CDS sequence (opt3) from hemagglutinin__InfluenzaA__AIM56601
augaaggccauccuggugguccuccuuuacaccuucgcuacagcaaacgccgacacucugugcauuggcuaucacgcgaauaacagcacggauaccguugacacaguguuggagaaaaauguaacugugacccauuccgucaacuuacuggaagauaagcacaaugggaaacuauguaagcucagaggaguggcuccccugcaucuugguaaaugcaacauagccggcuggauccuggggaauccugagugugaaucuuugucaacagcaaguagcugguccuacauuguugagaccucuucgucagacaacggaacuugcuauccaggcgauuuuaucaauuacgaagaacucagggagcagcugagcaguguguccucuuucgaacgguuugagauuuucccgaagacaagcuccuggcccaaccacgacucaaauaagggugucaccgccgcuuguccucaugcaggggccaaaaguuuuuauaagaaccugaucuggcucgugaaaaagggaaauagcuacccaaaauuaucucaauccuauauaaacgauaagggcaaggaaguacugguucuuuggggcauccaccaccccucaacgacugcugaccagcagagcuuguaccagaaugccgaugcguacguguucgucgggaccagucgcuauucuaaaaaguuuaaaccugagauugcaauccgaccaaaggugcgugaccaagagggaagaaugaacuacuauuggacacugguggaacccggugauaaaauuacuuucgaggccaccggcaaccuagucguuccuagguacgcuuuuacaauggaacggaaugccggguccggaaucauaauuagcgacaccccagugcaugauugcaacacgacuugucagacaccggagggcgcaaucaauaccucgcucacuucucugcccuuccagaacauucacccuaucacaaucgguaagugcccaaaauauguaaaguccaccaaacuucgccuggcuacgggguugagaaaugugcccucaauucagaguaggggacucuuuggcgccauagcgggcuucaucgaagggggauggaccgguauggucgacggcugguacggguaucaucaccaaaacgagcagggaagcggcuacgccgcagaccugaaguccacacagaaugcuauugauaagaucacuaacaaaguuaauucugugauagagaagaugaacacccaguuuacagccguggguaaagaguucaaucacuuagagaagcggauugaaaaccugaauaagaaagucgacgauggguuccucgacaucuggacuuacaacgcugagcuucugguguugcuagaaaaugagcgcacccuggauuaucaugacagcaacguaaagaaccucuacgagaaaguucgaaaucaacugaagaacaaugccaaagaaaucggcaacggauguuuugaguucuaucacaagugcgauaauacauguauggaaucagugaagaacggcaccuacgacuauccuaaauacagugaggaagcaaaacuuaauagagagaagauugauggggucaagcuggaguccacuaggaucuaucagauuuuggccauauacagcacgguggcuucuucacucguccuggugguuaguuuaggagcgaucagcuuuuggaugugcuccaacgguucucugcagugccggauuuguaucuga

SEQ ID NO: 140793 - RNA, 1710 nt, Artificial Sequence
  derived and/or modified CDS sequence (opt3) from hemagglutinin__InfluenzaA__AIM56612
augaaggccauccuggugguccuccuuuacaccuucgcuacagcaaacgccgacacucugugcauuggcuaucacgcgaauaacagcacggauaccguugacacaguguuggagaaaaauguaacugugacccauuccgucaacuuacuggaagauaagcacaaugggaaacuauguaagcucagaggaguggcuccccugcaucuugguaaaugcaacauagccggcuggauccuggggaauccugagugugaaucuuugucaacagcaaguagcugguccuacauuguugagaccucuucgucagacaacggaacuugcuauccaggcgauuuuaucaauuacgaagaacucagggagcagcugagcaguguguccucuuucgaacgguuugagauuuucccgaagacaagcuccuggcccaaccacgacucaaauaagggugucaccgccgcuuguccucaugcaggggccaaaaguuuuuauaagaaccugaucuggcucgugaaaaagggaaauagcuacccaaaauuaucucaauccuauauaaacgauaagggcaaggaaguacugguucuuuggggcauccaccaccccucaacgacugcugaccagcagagcuuguaccagaaugccgaugcguacguguucgucgggaccagucgcuauucuaaaaaguuuaaaccugagauugcaauccgaccaaaggugcgugaccaagagggaagaaugaacuacuauuggacacugguggaacccggugauaaaauuacuuucgaggccaccggcaaccuagucguuccuagguacgcuuuuacaauggaacggaauaccggguccggaaucauaauuagcgacacgccagugcaugauugcaacacuacaugucagaccccggagggcgccaucaauacuucgcucacaucucugcccuuccagaacauucacccuaucaccaucgguaagugcccaaaauauguaaaguccacgaaacuucgccuggcaaccggguugagaaaugugcccucaauucagaguaggggacucuuuggcgcuauagccggcuucaucgaagggggauggacagguauggucgacggcugguacggguaucaucaccaaaacgagcagggaagcggcuacgcggccgaccugaaguccacucagaaugcaauugauaagaucaccaacaaaguuaauucugugauagagaagaugaacacacaguuuacugcuguggguaaagaguucaaucacuuagagaagcggauugaaaaccugaauaagaaagucgacgauggguuccucgacaucuggaccuacaacgccgagcuucugguguugcuagaaaaugagcgcacacuggauuaucaugacagcaacguaaagaaccucuacgagaaaguucgaaaucaacugaagaacaaugcuaaagaaaucggcaacggauguuuugaguucuaucacaagugcgauaauaccuguauggaaucagugaagaacggcacuuacgacuauccuaaauacagugaggaagccaaacuuaauagagagaagauugauggggucaagcuggaguccacgaggaucuaucagauuuuggcaauauacagcacaguggccucuucacucguccuggugguuaguuuaggagcuaucagcuuuuggaugugcuccaacgguucucugcagugccggauuuguaucuga

SEQ ID NO: 140794 - RNA, 1701 nt, Artificial Sequence
  derived and/or modified CDS sequence (opt3) from hemagglutinin__InfluenzaA__AIM56623
augaaggccauccuggugguccuccuuuacaccuucgcuacagcaaacgccgacacucugugcauuggcuaucacgcgaauaacagcacggauaccguugacacaguguuggagaagaauguaacugugacccauuccgucaacuuacuggaagauaagcacaaugggaaacuauguaagcucagaggaguggcuccccugcaucuugguaaaugcaacauagccggcuggauccuggggaauccugagugugaaucuuugucaacagcaaguagcugguccuacauuguugagaccucuucgucagacaacggaacuugcuauccaggcgauuuuaucaauuacgaagaacucagggagcagcugagcaguguguccucuuucgaacgguuugagauuuucccgaagacaagcuccuggcccaaccacgacucaaauaagggugucaccgccgcuuguccucaugcaggggccaaaaguuuuuauaagaaccugacguggcucgugaaaaagggaaauagcuacccaaaauuaucucaauccuauaucaacgauaagggcaaggaaguacugguucuuuggggcauacaccaccccucaacuaccgcugaccagcagagcuuguaccagaaugccgaugcguacguguucgucgggacaagucgcuauucuaaaaaguuuaaaccugagaucgcaauucgaccaaaggugcgugaccaagagggaagaaugaacuacuauuggacucugguggaacccggugauaaaaucaccuucgaggccacaggcaaccuagucguuccuagguacgcuuuuaccauggaacggaaugccggguccggaauuaucauaagcgacacgccagugcaugauugcaacacuacaugucagaccccggagggcgcaauuaauacuucgcuccccuuccagaacauccacccuauuacaaucgguaagugcccaaaauauguaaagucuaccaagcugcgccuugcuacggggcugagaaaugugcccuccauccagucaaggggauuguuuggcgccauugcgggcuucauagaagggggauggaccgguauggucgacggcugguacggguaucaucaccaaaacgagcagggaaguggcuacgccgcagaccucaaaagcacacagaaugcuaucgauaagauuacuaacaaaguuaauuccgugaucgagaagaugaacacccaguuuacagccguggguaaagaguucaaucaccuggagaagcggauagaaaacuuaaauaagaaagucgacgauggguuccuggacauuuggacuuacaacgcugagcuccuugugcuguuggaaaaugagcgcacccuagauuaucaugacucuaacguaaagaaccuguacgagaaaguucgaaaucaacucaagaacaaugccaaagaaaucggcaacggauguuuugaguucuaucacaagugcgauaauacauguauggaaagcgugaagaacggcaccuacgacuauccuaaauacucagaggaagcaaagcugaauagagagaaaaucgauggggucaaacuugagaguacuaggauuuaucagauccuggccauuuacuccacgguggcuagcucuuugguccucgugguuucacugggagcgauaaguuuuuggaugugcagcaacgguuccuuacagugccggaucuguauuuga

SEQ ID NO: 140795 - RNA, 1701 nt, Artificial Sequence
  derived and/or modified CDS sequence (opt3) from hemagglutinin__InfluenzaA__AIM56634
augaaggccauccuggugguccuccuuuacaccuucgcuacagcaaacgccgacacucugugcauuggcuaucacgcgaauaacagcacggauaccguugacacaguguuggagaagaauguaacugugacccauuccgucaacuuacuggaagauaagcacaaugggaaacuauguaagcucagaggaguggcuccccugcaucuugguaaaugcaacauagccggcuggauccuggggaauccugagugugaaucuuugucaacagcaaacaguuggagcuacauuguugagaccuccucuucggacaauggaacuugcuauccaggcgauuuuaucaacuacgaagaacucagggagcagcugucaagcgugaguuccuucgaacgguuugagauuuucccgaagacaucuagcuggcccaaucacgacuccaacaagggugucaccgccgcuuguccucaugcaggggccaaaucauuuuauaagaaucugaucuggcucgugaaaaagggaaacaguuacccaaaauuaagccaaucuuauauaaaugauaagggcaaggaaguacugguucuuuggggcauccaccaccccuccacgacugcugaccagcagucauuguaccagaacgccgaugcguacguguucgucgggaccagccgcuauaguaaaaaguuuaaaccugagauugcaauccgaccaaaggugcgugaccaagagggaagaaugaacuacuauuggacacugguggaacccggugauaaaauuacuuucgaggccaccggcaaucuagucguuccuagguacgcuuuuacaauggaacggaacgccgggucuggaaucauaauuuccgacaccccagugcaugauugcaauacgacuugucagacaccggagggcgcaaucaacaccagccuccccuuccagaauauucacccuaucacuaucgguaagugcccaaaauauguaaagucgacaaagcugcgccuugcuaccgggcugagaaacgugcccucuauucaguccaggggauuguuuggcgccauagcgggcuucaucgaagggggauggacggguauggucgacggcugguacggguaucaucaccaaaaugagcagggaucaggcuacgccgcagaccucaaaaguacccagaacgcuauugauaagaucacaaauaaagugaacagcguuauagagaagaugaauacucaguuuaccgccguggguaaagaguucaaccaccuggagaagcggauugaaaauuuaaacaagaaagucgacgauggguuccuggacaucuggacauacaaugcugagcuccuugugcuguuggaaaacgagcgcacucuagauuaucaugacuccaacguaaagaaucuguacgagaaaguucgaaaccaacucaagaauaacgccaaagaaaucggcaauggauguuuugaguucuaucacaagugcgauaacaccuguauggaaucugugaagaauggcacauacgacuauccuaaauacagcgaggaagcaaagcugaacagagagaaaauugauggggucaaacuugagucaaccaggaucuaucagauucuggccauauacaguacuguggcuuccagcuugguccucgugguuucucugggagcgaucucauuuuggaugugcaguaaugguagcuuacagugccggauuuguaucuga

SEQ ID NO: 140796 - RNA, 1710 nt, Artificial Sequence
  derived and/or modified CDS sequence (opt3) from hemagglutinin__InfluenzaA__AIM56645
augaaggccauccuggugguccuccuuuacaccuucgcuacagcaaacgccgacacucugugcauuggcuaucacgcgaauaacagcacggauaccguugacacaguguuggagaagaauguaacugugacccauuccgucaacuuacuggaagauaagcacaaugggaaacuauguaagcucagaggaguggcuccccugcaucuugguaaaugcaacauagccggcuggauccuggggaauccugagugugaaucuuugucaacagcaaguagcugguccuacauuguugagaccucuucgucagacaacggaacuugcuauccaggcgauuuuaucaauuacgaagaacucagggagcagcugagcaguguguccucuuucgaacgguuugagauuuucccgaagacaagcuccuggcccaaccacgacucaaauaagggugucaccgccgcuuguccucaugcaggggccaaaaguuuuuauaagaaccugaucuggcucgugaaaaagggaaauagcuacccaaaauuaucucaauccuauauaaacgauaagggcaaggaaguacugguucuuuggggcauccaccaccccucaacgacugcugaccagcagagcuuguaccagaaugccgaugcguacguguucgucgggaccagucgcuauucuaaaaaguuuaaaccugagauugcaauccgaccaaaggugcgugaccaagagggaagaaugaacuacuauuggacacugguggaacccggugauaaaauuacuuucgaggccaccggcaaccuagucguuccuagguacgcuuuuacaauggaacggaaugccggguccggaaucauaauuagcgacaccccagugcaugauugcaacacgacuugucagacaccggagggcgcaaucaauaccucgcucacuucucugcccuuccagaacauucacccuaucacaaucgguaagugcccaaaauauguaaaguccaccaaacuucgccuggcuacgggguugagaaaugugcccucaauucagaguaggggacucuuuggcgccauagcgggcuucaucgaagggggauggaccgguauggucgacggcugguacggguaucaucaccaaaacgagcagggaagcggcuacgccgcagaccagaaguccacacagaaugcuauugauaagaucacuaacaaaguuaauucugugauagagaagaugaacacccaauuuacagccguggguaaagaguucaaucaccuggagaagcggauugaaaacuuaaauaagaaagucgacgauggguuccuggacaucuggacuuacaacgcugagcuccuugugcuguuggaaaaugagcgcacccuagauuaucaugacagcaacguaaagaaccuguacgagaaaguucgaaaucagcucaagaacaaugccaaagaaaucggcaacggauguuuugaguucuaucacaagugcgauaauacauguauggaaucagugaagaacggcaccuacgacuauccuaaauacagugaggaagcaaagcugaauagagagaaaauugauggggucaaacuugaguccacuaggaucuaucagauucuggccauauacagcacgguggcuucuucauugguccucgugguuagucugggagcgaucagcuuuuggaugugcuccaacgguucuuuacaaugccggauuuguaucuga

SEQ ID NO: 140797 - RNA, 1701 nt, Artificial Sequence
  derived and/or modified CDS sequence (opt3) from hemagglutinin__InfluenzaA__AIM56656
augaaggccauccuggugguccuccuuuacaccuucgcuacagcaaacgccgacacucugugcauuggcuaucacgcgaauaacagcacggauaccguugacacaguguuggagaaaaauguaacugugacccauuccgucaacuuacuggaagauaagcacaaugggaaacuauguaagcucagaggaguggcuccccugcaucuugguaaaugcaacauagccggcuggauccuggggaauccugagugugaaucuuugucaacagcaaguagcugguccuacauuguugagaccucuucgucagacaacggaacuugcuauccaggcgauuuuaucaauuacgaagaacucagggagcagcugagcaguguguccucuuucgaacgguuugagauuuucccgaagacaaacagcuggcccaaucacgacuccaacaagggugucaccgccgcuuguccucaugcaggggccaaaucauuuuauaagaaucugaucuggcucgugaaaaagggaaacaguuacccaaaauuaagccaaucuuauauaaaugauaagggcaaggaaguacugguucuuuggggcauccaccaccccuccacgacugcugaccagcagucauuguaccagaacgccgaugcguacguguucgucgggaccagccgcuauaguaaaaaguuuaaaccugagauugcaauccgaccaaaggugcgugaccaagagggaagaaugaacuacuauuggacacugguggaacccggugauaaaauuacuuucgaggccaccggcaauaucgucguuccuagguacgcuuuuacaauggaacggaacgccgggucuggaauaauuaucuccgacaccccagugcaugauugcaauacgacuugucagacaccggagggcgcaauuaacaccagccuacccuuccagaauauccacccuaucacuauugguaagugcccaaaauauguaaagucgacaaagcuccgccuggcuaccgggcuuagaaacgugcccucuauacaguccaggggacuguuuggcgccaucgcgggcuucauugaagggggauggacggguauggucgacggcugguacggguaucaucaccaaaaugagcagggaucaggcuacgccgcagacuugaaaaguacccagaacgcuaucgauaagauaacaaauaaagugaacagcguuauugagaagaugaauacucaguuuaccgccguggguaaagaguucaaccaccucgagaagcggaucgaaaaucugaacaagaaagucgacgauggguucuuagacaucuggacauacaaugcugagcugcucgugcuucuggaaaacgagcgcacuuuggauuaucaugacuccaacguaaagaaucuauacgagaaaguucgaaaccaacugaagaauaacgccaaagaaauuggcaauggauguuuugaguucuaucacaagugcgauaacaccuguauggaaucugugaagaauggcacauacgacuauccuaaauacagcgaggaagcaaagcucaacagagagaaaaucgauggggucaagcuggagucaaccaggauuuaucagauacuugccaucuacaguacuguggcuuccagccuggucuuggugguuucucucggagcgauuucauuuuggaugugcaguaaugguagccugcagugccggaucuguaucuga

SEQ ID NO: 140798 - RNA, 1701 nt, Artificial Sequence; identical to SEQ ID NO: 138088
  derived and/or modified CDS sequence (opt3) from hemagglutinin__InfluenzaA__AIM56667

SEQ ID NO: 140799 - RNA, 1701 nt, Artificial Sequence
  derived and/or modified CDS sequence (opt3) from hemagglutinin__InfluenzaA__AIM56678
augaaggccauccuggugguccuccuuuacaccuucgcuacagcaaacgccgacacucugugcauuggcuaucacgcgaauaacagcacggauaccguugacacaguguuggagaagaauguaacugugacccauuccgucaacuuacuggaagauaagcacaaugggaaacuauguaagcucagaggagugcccccucugcaucuugguaaaugcaacauagcuggcuggauccuggggaauccagagugugaaucuuugucaacagccaguagcugguccuacauuguugagaccucuucgucagacaacggaacuugcuauccgggcgauuuuaucaauuacgaagaacucagggagcagcugagcaguguguccucuuucgaacgguuugagauuuuccccaagacaagcuccuggccuaaccacgacucaaauaagggugucaccgcagccuguccacaugcuggggcaaaaaguuuuuauaagaaccugaucuggcucgugaaaaagggaaauagcuaccccaaauuaucucaauccuauauaaacgauaagggcaaggaaguacugguucuuuggggcauccaccacccuucaacgacugccgaccagcagagcuuguaccagaaugcugaugccuacguguucgucgggaccagucgcuauucuaaaaaguuuaaaccagagauugcgauccgacccaaggugcgugaccaagagggaagaaugaacuacuauuggacacugguggaaccuggugauaaaauuacuuucgaggcaaccggcaaccuagucguuccaagguacgccuuuacaauggaacggaaugcuggguccggaaucauaauuagcgacaccccggugcaugauugcaacacgacuugucagacacccgagggcgccaucaauaccucgcucccuuuccagaacauucacccaaucacuaucgguaagugccccaaauauguaaagucuacaaagcugcgccuugcaaccgggcugagaaaugugccuuccauucagucaaggggauuguuuggcgcuauagccggcuucaucgaagggggauggacggguauggucgacggcugguacggguaucaucaccaaaacgagcagggaaguggcuacgcggccgaccucaaaagcacccagaaugcaauugauaagaucacaaacaaaguuaauuccgugauagagaagaugaacacucaguuuaccgcuguggguaaagaguucaaucaccuggagaagcggauugaaaacuuaaauaagaaagucgacgauggguuccuggacaucuggacauacaacgccgagcuccuugugcuguuggaaaaugagcgcacucuagauuaucaugacucuaacguaaagaaccuguacgagaaaguucgaaaucaacucaagaacaaugcuaaagaaaucggcaacggauguuuugaguucuaucacaagugcgauaauaccuguauggaaagcgugaagaacggcacauacgacuauccaaaauacucagaggaagccaagcugaauagagagaaaauugauggggucaaacuugagaguaccaggaucuaucagauucuggcaauauacuccacuguggccagcucuuugguccucgugguuucacugggagcuaucaguuuuuggaugugcagcaacgguuccuuacagugccggauuuguaucuga

SEQ ID NO: 140800 - RNA, 1701 nt, Artificial Sequence; identical to SEQ ID NO: 140436
  derived and/or modified CDS sequence (opt3) from hemagglutinin__InfluenzaA__AIM56689

SEQ ID NO: 140801 - RNA, 1701 nt, Artificial Sequence; identical to SEQ ID NO: 138088
  derived and/or modified CDS sequence (opt3) from hemagglutinin__InfluenzaA__AIM56700

SEQ ID NO: 140802 - RNA, 1710 nt, Artificial Sequence
  derived and/or modified CDS sequence (opt3) from hemagglutinin__InfluenzaA__AIM56711
augaaggccauccuggugguccuccuuuacaccuucgcuacagcaaacgccgacacucugugcauuggcuaucacgcgaauaacagcacggauaccguugacacaguguuggagaaaaauguaacugugacccauuccgucaacuuacuggaagauaagcacaaugggaaacuauguaagcucagaggagugcccccucugcaucuugguaaaugcaacauagcuggcuggauccuggggaauccagagugugaaucuuugucaacagccaguagcugguccuacauuguugagaccucuucgucagacaacggaacuugcuauccgggcgauuuuaucaauuacgaagaacucagggagcagcugagcaguguguccucuuucgaacgguuugagauuuuccccaagacaagcuccuggccuaaccacgacucaaauaagggugucaccgcagccuguccacaugcuggggcaaaaaguuuuuauaagaaccugaucuggcucgugaaaaagggaaauagcuaccccaaauuaucucaauccuauauaaacgauaagggcaaggaaguacugguucuuuggggcauccaccacccuucaacgacugccgaccagcagagcuuguaccagaaugcugaugccuacguguucgucgggaccagucgcuauucuaaaaaguuuaaaccagagauugcgauccgacccaaggugcgugaccaagagggaagaaugaacuacuauuggacacugguggaaccuggugauaaaauuacuuucgaggcaaccggcaaccuagucguuccaagguacgccuuuacaauggaacggaaugcuggguccggaaucauaauuagcgacaccccggugcaugauugcaacacgacuugucagacacccgagggcgccaucaauaccucgcucacuucucugccuuuccagaacauucacccaaucacaaucgguaagugccccaaauauguaaaguccaccaaacuucgccuggcaacgggguugagaaaugugccuucaauucagaguaggggacucuuuggcgcuauagccggcuucaucgaagggggauggaccgguauggucgacggcugguacggguaucaucaccaaaacgagcagggaagcggcuacgcggccgaccugaaguccacacagaaugcaauugauaagaucacuaacaaaguuaauucugugauagagaagaugaacacccaguuuacagcuguggguaaagaguucaaucacuuagagaagcggauugaaaaccugaauaagaaagucgacgauggguuccucgacaucuggacuuacaacgccgagcuucugguguugcuagaaaaugagcgcacccuggauuaucaugacagcaacguaaagaaccucuacgagaaaguucgaaaucaacugaagaacaaugcuaaagaaaucggcaacggauguuuugaguucuaucacaagugcgauaauacauguauggaaucagugaagaacggcaccuacgacuauccaaaauacagugaggaagccaaacuuaauagagagaagauugauggggucaagcuggaguccacuaggaucuaucagauuuuggcaauauacagcacgguggccucuucacucguccuggugguuaguuuaggagcuaucagcuuuuggaugugcuccaacgguucucugcagugccggauuuguaucuga

SEQ ID NO: 140803 - RNA, 1701 nt, Artificial Sequence; identical to SEQ ID NO: 140436
  derived and/or modified CDS sequence (opt3) from hemagglutinin__InfluenzaA__AIM56722

SEQ ID NO: 140804 - RNA, 1701 nt, Artificial Sequence; identical to SEQ ID NO: 138088
  derived and/or modified CDS sequence (opt3) from hemagglutinin__InfluenzaA__AIM56733

SEQ ID NO: 140805 - RNA, 1701 nt, Artificial Sequence; identical to SEQ ID NO: 138088
  derived and/or modified CDS sequence (opt3) from hemagglutinin__InfluenzaA__AIM56744

SEQ ID NO: 140806 - RNA, 1701 nt, Artificial Sequence
  derived and/or modified CDS sequence (opt3) from hemagglutinin__InfluenzaA__AIM56755
augaaggccauccuggugguccuccuuuacaccuucgcuacagcaaacgccgacacucugugcauuggcuaucacgcgaauaacagcacggauaccguugacacaguguuggagaaaaauguaacugugacccauuccgucaacuuacuggaagauaagcacaaugggaaacuauguaagcucagaggaguggcuccccugcaucuugguaaaugcaacauagccggcuggauccuggggaauccugagugugaaucuuugucaacagcaaguagcugguccuacauuguugagaccucuucgucagacaacggaacuugcuauccaggcgauuuuaucaauuacgaagaacucagggagcagcugagcaguguguccucuuucgaacgguuugagauuuucccgaagacaagcuccuggcccucacacgacaguaacaagggugucaccgccgcuuguccucaugcaggggccaagagcuuuuauaagaaucugaucuggcucgugaaaaagggaaacucuuacccaaaauuaucccaaucauauauaaaugauaagggcaaggaaguacugguucuuuggggcauccaccaccccagcacgacugcugaccagcagaguuuguaccagaacgccgaugcguacguguucgucgggaccucucgcuauuccaaaaaguuuaaaccugagauugcaauccgaccaaaggugcgugaccaagagggaagaaugaauuacuauuggacacugguggaacccggugauaaaauuacuuucgaggccaccggcaaccuagucguuccuagguacgcuuuuacaauggaacggaacgccgggagcggaaucauaauuucggacaccccagugcaugauugcaauacgacuugucagacaccggagggcgcaaucaacaccucucuccccuuccagaauauucacccuaucacuaucgguaagugcccaaaauauguaaaguccacaaagcugcgccuugcuaccgggcugagaaacgugcccucaauucagaguaggggauuguuuggcgccauagcgggcuucaucgaagggggauggacggguauggucgacggcugguacggguaucaucaccaaaaugagcagggaagcggcuacgccgcagaccucaaauccacccagaacgcuauugauaagaucacaaauaaagugaacucuguuauagagaagaugaauacucaguuuaccgccguggguaaagaguucaaccaccuggagaagcggauugaaaauuuaaacaagaaagucgacgauggguuccuggacaucuggacauacaaugcugagcuccuugugcuguuggaaaacgagcgcacucuagauuaucaugacagcaauguaaagaaccuguacgagaaaguucgaaaccaacucaagaauaacgccaaagaaaucggcaauggauguuuugaguucuaucacaagugcgauaacaccuguauggaaucagugaagaauggcacauacgacuauccuaaauacagugaggaagcaaagcugaacagagagaaaauugauggggucaaacuugaguccaccaggaucuaucagauucuggccauauacagcacuguggcuucuucauugguccucgugguuagucugggagcgaucagcuuuuggaugugcuccaaugguucuuuacagugccggauuuguaucuga

SEQ ID NO: 140807 - RNA, 1710 nt, Artificial Sequence; identical to SEQ ID NO: 140792
  derived and/or modified CDS sequence (opt3) from hemagglutinin__InfluenzaA__AIM56766

SEQ ID NO: 140808 - RNA, 1701 nt, Artificial Sequence
  derived and/or modified CDS sequence (opt3) from hemagglutinin__InfluenzaA__AIM56777
augaaggccauccuggugguccuccuuuacaccuucgcuacagcaaacgccgacacucugugcauuggcuaucacgcgaauaacagcacggauaccguugacacaguguuggagaagaauguaacugugacccauuccgucaacuuacuggaagggaagcacaauggaaaacuauguaagcucagagguguggcuccccugcaucuuggcaaaugcaacauagccggguggauccugggaaauccugagugugaaucuuugucaacagcaaguagcugguccuacauuguugagaccucuucgucagauaacggcacuugcuauccaggugacuuuaucaauuacgaggaacucagggagcagcugagcaguguguccucuuucgaacgguuugagauuuucccgaagacaagcuccuggcccaaccacgauucaaauaagggggucaccgccgcuuguccucaugcaggagccaaaaguuuuuauaagaaccugaucuggcucgugaaaaagggcaauagcuacccaaaauuaucucaauccuauauaaacgacaagggcaaggaaguacugguucuuugggggauccaccaccccucaacgacugcugaucagcagagcuuguaccagaaugccgacgcguacguguucgucggaaccagucgcuauucuaaaaaguuuaaaccugagauugcaauccgaccaaaggugcgugaucaagaggguagaaugaacuacuauuggacacugguggaacccggcgacaaaauuacuuucgaggccaccgggaaccuagucguuccuagguacgcuuuuacaauggaacggaaugccggauccggcaucauaauuagcgauaccccagugcaugacugcaacacgacuugucagacaccggagggugcaaucaauaccucgcuccccuaucagaacauucacccuaucacuaucgggaagugcccaaaauacguaaagucuacaaagcugcgccuugcuaccggacugagaaaugugcccuccauucagucaaggggcuuguucggcgccauagcgggguuuaucgaaggagguuggacgggcauggucgaugggugguauggauaccaucaccaaaacgagcagggcagugguuacgccgcagaccucaaaagcacccagaaugcuauugacaagaucacaaacaaaguuaauuccgugauagagaagaugaacacucaguucaccgccguggggaaagaauuuaaucaccuggagaagcggauugaaaacuuaaauaagaaagucgaugacggcuuccuggauaucuggacauauaacgcugagcuccuugugcuguuggaaaaugagcgcacucuagacuaccaugauucuaacguaaagaaccuguaugagaaaguucgaaaucaacucaagaacaaugccaaagaaaucggaaacggcuguuucgaguuuuaccacaagugcgacaauaccuguauggaaagcgugaagaacgggacauaugauuacccuaaauauucagaggaagcaaagcugaauagagagaaaauugacggagucaaacuugagaguaccaggaucuaccagauucuggccauauacuccacuguggcuagcucuuugguccucgugguuucacugggugcgaucaguuucuggaugugcagcaacggcuccuuacagugccggauuuguaucuga

SEQ ID NO: 140809 - RNA, 1701 nt, Artificial Sequence; identical to SEQ ID NO: 138088
  derived and/or modified CDS sequence (opt3) from hemagglutinin__InfluenzaA__AIM56788

SEQ ID NO: 140810 - RNA, 1701 nt, Artificial Sequence; identical to SEQ ID NO: 138088
  derived and/or modified CDS sequence (opt3) from hemagglutinin__InfluenzaA__AIM56799

SEQ ID NO: 140811 - RNA, 1701 nt, Artificial Sequence; identical to SEQ ID NO: 138088
  derived and/or modified CDS sequence (opt3) from hemagglutinin__InfluenzaA__AIM56810

SEQ ID NO: 140812 - RNA, 1701 nt, Artificial Sequence; identical to SEQ ID NO: 138088
  derived and/or modified CDS sequence (opt3) from hemagglutinin__InfluenzaA__AIM56821

SEQ ID NO: 140813 - RNA, 1683 nt, Artificial Sequence
  derived and/or modified CDS sequence (opt3) from hemagglutinin__InfluenzaA__AIN76383
augaacacccagauccugguguucgcccucauugcuauaguccccacaaaugcagacaagaucugccuuggccaccaugccguuagcaacgggacuaaagugaauacgcugaccgagagaggaguagaaguggucaacgcgacagagacuguggaaaggaccaauauuccucggaucuguuccaaggguaaaaagacaguugauuugggccaaugcggguuacugggaaccauuacuggcccaccgcagugugaccaguuucuagaguucucugcugaucucaucauagaacgccgagaggguucagacgugugcuaccccgggaaauuugucaacgaggaagcccugcgucagauccuuagagagaguggaggcauugauaaggaagcaaugggcuucacauauagcgggaucaggaccaauggaacgacuuccgccugucggcgcucugguucgucauuuuacgcugagaugaaguggcuguugagcaacaccgacaaugcagccuucccucaaaugacaaaaaguuauaagaacacuagaaaauccccagcucucauuguguggggcauccaccauucuguaagcaccgccgagcagacaaagcuguacggguccggaaauaaacugguuaccgugggcucaaguaacuaucagcagagcuuuguccccucuccuggugcgaggccacaagugaaugggcucuccggacggauagauuuccacugguuaaugcugaaccccaaugacacggugacuuuuucauucaacggcgcauuuauugccccugaucgcgcuagcuuccuucgaggcaagaguauggggauccagucuggaguccagguugacgccaacugcgaaggugauuguuaccauuccggcgggacaauuaucagcaauuugccauuucagaacaucgacucgagagcagugggaaagugcccgagguauguaaaacaaaagucucugcuacucgcuaccggcaugaaaaaugugcccgagauuccuaagggucgggggcuguucggcgccauagcgggauucaucgaaaacggcugggaggggcuuauugauggaugguacgguuuucgucaccagaaugcccagggcgaagggacugcagcugacuacaaauccacacaaucagccaucgaccagauaaccggaaagcugaaccgcuugauugagaaaacgaaucagcaguucgagcucaucgauaacgaauuuaaugaggucgaaaagcaaaucggcaacgugauuaauuggaccagagacaguaucacagagguuuggagcuauaacgcugaacuguuaguggccauggagaaucagcacacuauugaucuggcagacuccgagauggauaagcucuacgaaagggucaaacggcagcuucgagagaacgccgaagaggacgguaccggguguuucgaaauauuucauaagugcgaugacgauuguauggcuucuauccgcaauaacacauaugaccacagcaaauacagagaggaggcgaugcagaacaggauucaaaucgauccagugaagcugucaaguggcuauaaagacguaaucuugugguucuccuuuggagcaagcugcuucauucuacuggccauaguuaugggccucguguuuaucugcgucaagaaugggaacaugcgguguacuauuugcaucuga

SEQ ID NO: 140814 - RNA, 1689 nt, Artificial Sequence
  derived and/or modified CDS sequence (opt3) from hemagglutinin__InfluenzaA__AIP93103
auggccaucauuuaccugauacuccuuuucaccgcugugagaggcgaccagaucugcauuggguaucacgcaaacaauagcacagagaaggucgauacuauccuggaaaggaacguuacggugacccaugccaaagacauuuuggagaagacacacaauggaaaauuauguaagcugaacgguauacccccucuagaacucggcgauugcuccaucgcgggguggcugcuuggaaauccagagugugaccggcuguugcgcguaccggaauggucuuacaucauggagaaagagaacccccgauauucacucugcuacccuggcaguuuuaaugauuaugaagaacugaagcaucugcucagcuccgugaagcacuucgaaaaagucaagauuuuaccaaaagacgguuggacucaacaugagaccgaugggggaucuaaggcuugugccgugucgggcaaacccucauuuuuccguaacaugguuuggcugacaaagaagggcccuaauuacccaguggcaaaaagaagcuauaacaauaccaguggggagcagaugcuuaucauuuggggaguccaccaccccaacgacgaagccgagcagagggcuuuguaccagaauguggguacuuacguauccgcaucuacaagcacccugaacaagcgguccacgccugaaaucgccgcucgcccaaaaguuucaggccuagggaguagaauggaguuuagcuggacucuccuggaugugugggacaccauaucuuucgaauccacaggaaaucuugucgccccggaguauggcuuuaagauuucaaaaagggguagcagugggaucaugaagacugagggaacccugggcaacugcgaaacaaaaugucaaacccccuugggcgcgauuaacacgacucucccuuuccauaaugugcacccacugacaaucggggagugccccaaguacgugaagucugaaaaauuaguccuggcaaccggaccucggaacguuccacagaucgagucccgcggucucuuuggcgccauugcuggguucauagaaggaggcuggcaggguaugguggaugggugguauggcuaccaucacagcaaugaccagggaucgggcuaugccgcagauaaggagucuacucaaaaggcuuuugaccgaaucacaaacaaaguaaauuccgugauugagaaaaugaacacccaguucgaagccgucgggaaggaguuuucaaaucuugaaaagagacuggagaacuugaauaaaaagauggaagacggauuccuagauguguggacguacaacgcggagcugcucguucugauggagaaugaaaggacccuugacuuccacgauaguaacgugaaaaaucuguaugacaagguccggaugcaguugcgugauaacgugaaagagcucgguaauggcuguuuugaguucuaccauaagugcgacgaugaguguaugaacagcguaaagaacgggacauacgacuaucccaaauacgaggaagaguccaagcugaaacgcaaugaaaucaagggaguuaaauuaucuagcaugggcguguaucagauacuggccauuuacgcaacugucgcugguucacuaagucucgccaucaugaucgcugggauuuccuuuuggaugugcagcaacggcucucugcaaugcagaaucuguauuuga

SEQ ID NO: 140815 - RNA, 1689 nt, Artificial Sequence; identical to SEQ ID NO: 129703
  derived and/or modified CDS sequence (opt3) from hemagglutinin__InfluenzaA__AIP93115

SEQ ID NO: 140816 - RNA, 1701 nt, Artificial Sequence
  derived and/or modified CDS sequence (opt3) from hemagglutinin__InfluenzaA__AIR93971
augaaggccauccuggugguccuccuuuacaccuucgcuacaacuaacgcagacauucugugcauaggcuaucacgccaauaacagcacggauaccguugacacaguguuggagaaaaauguaacugugacccauuccgucaacuuacuggaagauaagcacaaugggaaacuauguaagcucagaggaguggcgccccugcaucuugguaaaugcaacaucgcuggcuggauucuggggaauccugagugugaaucuuugucaacagccaguagcugguccuacaucguugagaccucuucgucagacaacggaacuugcuauccaggcgauuuuauugacuacgaggagcucagggagcagcugagcaguguguccucuuucgaacgguuugagaucuucccgaagacaagcuccuggcccaaucacgauucaaacaagggugucaccgcagccuguccucaugcuggggcacgcaguuuuuauaaaaaucugauauggcucgugaagaaaggaaacagcuacccaaaguuaucuaaauccuauaucaaugacaagggcaaggaaguacugguucuuuggggcauucaccaccccucaacgagcgccgaucaacagaguuuguaccagaacgcugacgccuacguguucgucgggacuucucgauauuccaaaaaguuuaaaccugagaucgcgauucguccaaaggugagagauagggagggacggaugaauuacuauuggacccugguggaacccggugacaaaaucacauucgaggcaacuggcaaccuagucguuccucgcuacgccuuugcuauggaaagaaacgccgggagcggaauaauuaccucggauacaccagugcaugacugcaauaccacgugucagacuccgaagggcgcaaucaacacaucucuccccuuccaaaauauucacccuaucaccaucgguaaaugcccaaaguauguaaaguccacuaaacugaggcuugcuacagggcugcggaacgugcccucaauucagagucgcggauuguuuggcgccauagcgggcuucaucgaagggggauggaccgguauggucgacggcugguacggguaucaucaccagaaugaacagggaagcggcuacgccgcagaucucaaguccacgcaaaacgcuauugacgagaucaccaauaaagugaacucuguuauagagaagaugaauacacaguuuacugccguggguaaagaguucaaccaccuggaaaagcgaauugaaaauuuaaacaagaaagucgaugacggguuccuggauaucuggaccuacaaugcugagcuccuugugcuguuggaaaacgagagaacacuagacuaucaugauagcaauguaaagaaccuguacgagaaaguuaggucacagcucaagaacaaugccaaagaaaucggcaacggauguuuugaguucuaucacaagugcgacaauacuuguauggaaagugugaagaacggcaccuacgauuauccuaaauacuccgaggaagcaaagcugaaucgggaggagauugacggggucaaacuugaaagcacacguaucuaucagauucuggccauauacucuaccguggcuucaaguuugguccucgugguuagccugggagcgaucuccuuuuggaugugcucuaacgguucguuacaaugccgcauuuguaucuga

SEQ ID NO: 140817 - RNA, 1701 nt, Artificial Sequence
  derived and/or modified CDS sequence (opt3) from hemagglutinin__InfluenzaA__AIR93982
augaaggccauccuggugguccuccuuuacaccauugcuacagcaaacgccgacacucugugcauaggcuaucacgcgaauaacagcacggauaccguugacacaguguuggagaaaaauguaacugugacccauuccgucaacuuacuggaagauaagcacaaugggaaacuauguaagcucagaggaguggcuccccugcaucuugguaaaugcaacaucgccggcuggauucuggggaauccugagugugaaucuuugucaacagcaaguagcugguccuacaucguugagaccucuucgucagacaacggaacuugcuauccaggcgauuucauugacuacgaggagcucagggagcagcugagcaguguguccucuuuugaacgguucgagaucuuuccgaagacaagcuccuggcccaaucacgauucaaacaagggugucaccgccgcuuguccucaugcaggggcccgcaguuucuauaaaaaucugauauggcucgugaagaaaggaaacagcuacccaaaguuaucuaaauccuauaucaaugacaagggcaaggaaguacugguucuuuggggcauucaccaccccucaacgagcgcugaucaacagaguuuguaccagaacgccgacgcguacguguuugucgggacuucucgauauuccaaaaaguucaaaccugagaucgcaauucguccaaaggugagagauagggagggacggaugaauuacuauuggacccugguggaacccggugacaaaaucacauuugaggccacuggcaaccuagucguuccucgcuacgcuuucaccauggaaagaaacgccgggagcggaauaauuaucucggauacaccagugcaugacugcaauaccacgugucagacuccgaagggcgcaauuaacacaucucuccccuuucaaaauauccacccuaucaccauugguaaaugcccaaaguauguaaaguccacuaaacugaggcuugcuacagggcugcggaacgugcccucaauacagagucgcggauuguucggcgccaucgcgggcuuuauugaagggggauggaccgguauggucgacggcugguacggguaucaucaccagaaugaacagggaagcggcuacgccgcagaucucaaguccacgcaaaacgcuaucgacgagauaaccaauaaagugaacucuguuauugagaagaugaauacacaguucacugccguggguaaagaauuuaaccaccuggagaagcgaaucgaaaauuuaaacaagaaagucgaugacggguuccuggauaucuggaccuacaaugcugagcuccuugugcuguuggaaaacgagagaacacuagacuaucaugauagcaauguaaagaaccuguacgagaaaguuaggucacagcucaagacuaacgccaaagaaauuggcaauggauguuucgaguuuuaucacaagugcgacaacaccuguauggaaagugugaagaauggcacauacgauuauccuaaauacuccgaggaagcaaagcugaaccgggaggagaucgacggggucaaacuugaaagcacccguauuuaucagauacuggccaucuacucuacuguggcuucaaguuugguccucgugguuagccugggagcgauuuccuucuggaugugcucuaaugguucguuacaaugccgcaucuguaucuga

SEQ ID NO: 140818 - RNA, 1701 nt, Artificial Sequence
  derived and/or modified CDS sequence (opt3) from hemagglutinin__InfluenzaA__AIR93993
augaaggccauccuggugguccuccuuuacaccuucgcuacagcaaacgccgacacucugugcauuggcuaucacgcgaauaacagcacggauaccguugacacaguguuggagaaaaauguaacugugacccauuccgucaacuuacuggaagauaagcacaaugggaaacuauguaagcucaaaggaguggcuccccugcaucuugguaagugcaacauagccggcuggauccuggggaauccugaguguggaucuuugucaacagcaaguagcugguccuacauuguugaaaccucuucgucagacaacggcacuugcuauccaggugauuuuaucgacuacgaggaacucagagagcagcugagcaguguguccucuuucgagagguuugaaauuuucccgaagacaagcuccuggcccaaucacgauucaaacaaaggggucaccgccgcuuguccuaaugcaggaaguaagagcuuuuauaaaaaccugaucuggcucgugaagaaaggcaauucuuacccaaaguuauccaagucauauauaaacgacaaaggcaaggagguacugguucuuugggggauccaucaccccagcacgagugccgaucaacagucuuuguaccagaaugcugacgccuacguguucgucggaacuucccgguauagcaaaaaguuuaaaccugaaauugcgauccgcccaaaggugcgaggucaggagggccguauggauuacuauuggacccugguggagcccggggacaaaauuacauucgaagcaacuggaaaccuagucguuccuagauacgccuuugcuauggagaggaacaccggcucggguaucauaauuucugauacaccagugcacgacugcaauaccaucugucaaacgccgaagggggccauuaacacuucccuccccuuccagaauauccauccuaucacaauuggaaagugcccaaaauauguaaagucaaccaaacugcggcuugcaacuggccugcgcaacgugcccaguauacagagcagaggcuuguuuggggcuaucgccggauucauugaagguggcuggacagggauggucgacggaugguacggcuaucaccaucagaaugagcaagguuccggguacgcggccgaucucaagucuacccagaacgcaaucgacgaaauaacgaauaaagugaacagcguuauugagaagaugaauacccaguuuacagcugugggcaaggaguucaaccaccuggaaaagaggaucgagaauuuaaacaagaaagucgaugacggauuccuggauaucuggacuuacaaugccgaacuccuugugcuguuggagaacgaacggacccuagacuaucacgauucaaauguaaagaaccuguacgagaaaguucgcagucagcucaagaacaaugcuaaggagauuggcaaaggguguuuugaguucuaucauaagugcgacacaauguguauggaauccgugaaaaacggaacuuacgauuauccuaaguacagcgaagaggccaaacugaaucgagaagagaucgacggugucaaacuugagucuaccagaauuuaucaaauacuggcaaucuacucaacaguggccaguagcuugguccucgugguuucccugggcgcuauuucuuuuuggaugugcucgaacgggagcuuacagugcaggaucuguaucuga

SEQ ID NO: 140819 - RNA, 1701 nt, Artificial Sequence
  derived and/or modified CDS sequence (opt3) from hemagglutinin__InfluenzaA__AIR94000
augaaggccauccuggugguccuccuuuacaccuucgcuacagcaaacgccgacacucugugcauuggcuaucacgcgaauaacagcacggauaccguugacacaguguuggagaaaaauguaacugugacccauuccgucaacuuacuggaagauaagcacaaugggaaacuauguaagcucagaggaguggcuccccugcaucuugguaaaugcaacauagccggcuggauccuggggaauccugagugugaaucuuugucaacagcaaguagcugguccuacauuguugagaccucuucgucagacaacggaacuugcuauccaggcgauuuuaucgacuacgaggagcucagggagcagcugagcaguguguccucuuucgaacgguuugagauuuucccgaagacaagcuccuggcccaaucacgauucaaacaagggugucaccgccgcuuguccucaugcaggggccaaaaguuuuuauaagaaucugaucuggcucgugaaaaagggaaacagcuacccaaaauuaucuaaguccuauauaaaugacaagggcaaagaaguacugguucuuuggggcauccaccaccccucaacgagcgcugaucaacagaguuuguaccagaacgccgacgcguacguguucgucgggacuucucgcuauuccaagaaauuuaagccugagauugcaauccgaccaaaagugcgugaucaggagggaagaaugaauuacuauuggacccugguggaacccggugacaagauuacauucgaggccacuggcaaccuagucguuccuagguacgcuuuugccauggaacggaacgcagggagcggaaucauaauuucggauaccccagugcaugacugcaauacaaccugucaaacgccgaaaggcgcuaucaacacuucuuuccccuuucagaauauucacccuaucacaaucgguaagugcccaaaguauguaaaauccaccaagcuccgccuggccacugggcuuagaaacgugcccucaauucagaguaggggacuguucggcgcgauagccggcuuuaucgaagggggauggacagguauggucgacggcugguacggguaucaucaccagaaugaacaaggaagcggcuacgcagcugauuugaaauccacccagaacgccauugacgagaucacgaauaaggugaacucuguuauagagaaaaugaauacccaguucacagcuguggguaaggaguucaaccaccucgaaaagcggauugaaaaucugaacaaaaaggucgaugacggguuuuuagauaucuggacuuacaaugccgagcugcucgugcuucuggaaaacgagcgcaccuuggacuaucaugauagcaauguuaaaaaccuauacgagaagguacgaucacagcugaaaacaaacgcaaaggaaaucggcaauggauguuucgaguuuuaucacaagugcgacaacacuuguauggaaagugugaaaaauggcaccuacgauuauccuaaguacuccgaggaagccaaacucaacagagaggagauugacggggucaagcuggaaagcacaaggaucuaucaaauucuugcuauauacucuaccguggcgucaagucuggucuuggugguuagccucggagcaaucuccuucuggaugugcucuaaugguucgcugcagugccggauuuguaucuga

SEQ ID NO: 140820 - RNA, 1683 nt, Artificial Sequence
  derived and/or modified CDS sequence (opt3) from hemagglutinin__InfluenzaA__AIR94116
auggagaccgccagccugaucacaauucuccuuguggucacuguuuccaacgcugacaagauaugcaucggcuaccagucuacuaauucaaccgaaacaguggauacucugaccgagaacaauguacccgugacacacgcaaaagaauuguuacauaccgagcacaacgggaugcugugugccacgagucuaggacauccucucauucuggacacaugcaccaucgaaggucuuauuuauggcaauccaagcugugaucuguugcucgggggaagagagugguccuacaucgucgagaggccgucugcggugaacggccugugcuaucccgguaauguugaaaaccuggaggaacuccggucguuauucucaagcgcucgcaguuaccaacgaauacagaucuuuccugacacgauuuggaauguguccuauucugggacuagcaaggccuguuccgauucauucuaccguaguaugagauggcugacccagaaagacaacgcauauccaauccaggaugcccaauacacaaauaaccagggaaagaauauucuuuuuauguggggcaucaaccaucccccuacugacaccgcucagacaaauuuguacaccaggacggauacuacaaccagcgucgcaacugaggagauaaaccggacauucaaaccacugauuggcccccgcccucuagugaacgggcucaugggaagaaucaauuauuacuggucuguacugaagccaggucagacccuuaggauuaaguccaacggcaaucugaucgccccgugguaugggcacaucuugucaggagaaagccacggccggauucucaaaacggaccugaagcgcgguaguugcaccguucaaugucagacagagaaagggggauuaaacacuacccugcccuuucagaaugugucuaaguacgcuuucggcaacugcuccaaauauauaggcaucaagagccucaaacuugccgucgggcugcgaaaugugccuucgagaucuuccaggggauuguuuggugcgauugcaggcuucaucgaagggggauggucaggccuaguggccgguugguacggguuucagcacaguaacgaucaaggcgucggaauggcugccgaccgggauagcacacagaaggcaauagacaagauuacuuccaaaguuaauaacaucguggacaagaugaauaaacaguaugagaucauugaucaugaguucaacgaaguagagacccgucugaauaugaucaacaauaagauugacgaucaaauacaggacaucugggcuuacaacgccgaacuccuggugcuucuggagaaccagaaaacauuggaugaacacgacgcgaaugucaacaaucucuacaacaaggugaagcgcgcccugggcucuaaugcaguugaggaugggaaaggauguuuugaauuauaucauaagugcgacgaucaguguauggagaccauuagaaacgguacuuacaauaggcggaaauaucaagaggaaagcaagcuggagcgacagaaaaucgaaggcgugaagcuagagucagaagggacguacaagauccucacaauuuauaguaccgucgcuuccagccuggugauagccaugggauucgcugccuuucuuuucugggcaaugucuaacggcucaugccgcugcaauaucuguauuuga

SEQ ID NO: 140821 - RNA, 1701 nt, Artificial Sequence
  derived and/or modified CDS sequence (opt3) from hemagglutinin__InfluenzaA__AIT38333
augaagaccaucauuacacugagcuacauacucugccacguguucgcccagaaaauccauggcuccgacucuucaacugcuacgcuuugucuggggcaccaugcaguccccaacggaaccuugguuaagacaauuacuaaugaucaaaucgaggugaccaacgccacagaauuaguacagaguagcuccaccgguagaauuugcgacaauccucacaggauccuggauggcaaaaacuguacucuaauagacgcgcuccugggggauccacauugcgacgaguuucagaauaaggaaugggaucuuuucguggagcggucuaacgcuuauucggacuguuacccguauuacguccccgauuaugccucacugcgcagcuugguggcaaguuccggaacacucgaauuuaauaacgagucuuucaauuggaccggcaucagccaggacgguacguccucaaguugccgacgugggagcguuaaauccuuuuucucuagacugaacuggcugcacggacucgaguacaaguauccugcccaaaaugugacuauguuaaacaaugaugaauuugacaagcuguacauuuggggcguccaccauccaucaaccgauagcgaccagacaagucuuuacgugcagacuucuggcaggguaaccguuuccacaaaacggagccagcaaaccgugauccccaacauugggucgcgcccuugggucagaggaaucucuuccaggauaucaauucacuggacgaucgugaagccaggugacauuuugcugaucaauaguacuggcaaccuaaucgcuccccggggguauuucaaaauucgcggaggcaagagcuccauaaugcgaucugaugcaccuaucgacaacugugauagcgagugcgugacaccaaaugguaacauuccgaaugacaaacccuuucagaacgucaauagaaucaccuacgggccuuguccaagguauauaaagcagaacacucucaagcuggccacaggaaugcggaauguucccgaaaaacagacccguggcgugcuuggcgcuauugccggguucaucgagaacggaugggaggguaugguagauggcugguacggguuucgccaucaaaauucagaaggaacgggccaggcggcagaccugaagaguacccaggccgcuaucgaucaaauuaacgguaaauugaauagacucaucgggaagacaaacgagaaauuccaccagauugaaaaggaguuuuccgaaauagagggcagggugcaggaccuggagaaauaugucgaagauacuaagaucgacuuauggagcuacaaugccgagcugcucgugguucuugaaaaccagcacaccauugaucugacagacucugagaugaauaaguuguucgaacggacucgacgccaacuaagagagaacgcagaggacaugggaaacggcugcuucaaaaucuaucauaagugugauaaugcuugcaucgggucaauuaggaacggaaccuacgugcacgacgucuaccgggaugaagcccugaauaaccgcuuucagauaaaagguguggagcucaagaguggcuauaaagacuggauccuguggauuagcuucgcgaucuccugcuuucuucugugugccguauugcucggguucauuacaugggcaugccagaagggaaauaucagauguaacauaugcaucuga

SEQ ID NO: 140822 - RNA, 1698 nt, Artificial Sequence
  derived and/or modified CDS sequence (opt3) from hemagglutinin__InfluenzaA__AIT38344
augaagaucaaacugcucauucuucugugcaccuucacagccacuuacgcugacacgauauguaucggcuaucacgcaaacaauagcaccgauacaguggacacugucuuggagaagaacguuaccgugacacauuccguaaauuuacuggaagauucucacaacgggaaacuaugccuccugagaggaauugcgccccuucagcuggguaauuguucaguggccggcuggaucuuggggaacccugagugcgaaagucucauuagcaaggaguccuggucuuacaucgucgaaaaaccaaauccggagaacggaaccuguuaucccggcuacuuugcugacuaugaggaacugagggagcaacugucgucagugagcaguuucgaacgguuugagauauucccuaaggaguccucuuggccaaaucauacuguuacaggugugagcgccuccugcucauacaacgggaagggaaauuuuuauaaaaaccucuuauggcugacccgcaagaauggccuuuaccccaacuugaguaaaagcuacacgaauaacaaggaaaaagagguccugauccuauggggcgugcaccauccuucuaacauuaaggaucagcgaacucucuaucacaccgaaaaugcauacguauccguugugucaagccacuauagucguagauucacaccagagaucacuaagaggcccaaaguccgggaccaggaagggcgcauuaacuacuauuggacccugcuugagccuggagauacaaucauauuugaggccaaugguaaccugauugcuccaugguacgcauucgccuugucuagaggcuuuggguccggaaucauuaccagcaaugcuccgauggacgaaugugaggccaagugccagacgcccaggggcgcgaucaacucgucucucccuuuccaaaaugugcauccagugacuaucggugaaugucccaaauauguccgguccgcaaagcugcgcaugguuacaggguuacgaaacauuccuucaauacagaguagaggacuguuuggcgccaucgcuggcuucauugaagggggauggaccgguaugaucgauggcugguacggguaccaccaucagaaugaacagggaagcggcuaugccgcagacaaagaguccacucaaaacgcuauaaaugguauuacaaacaagguaaauucugugaucgagaaaaugaacacccaguuuacgaccguggggaaggaguucaauaagcucgagaggcggauggaaaaccuuaacaaaaaggucgaugacggcuuccuggauaucuggacauacaaugccgaguugcuagugcugcucgaaaacgagcguacucuggacuuucacgacagcaauguuaaaauucuuuaugagaaggugaaaucacagcugaagaacaaugcgaaggaaaucggaaacggcugcuucgaguuuuaccacaaauguaauaacgaaugcauggagagugucaagaaugggaccuaugauuacccaaaauauuccgaggaaagcaaguugaaccgcgagaaaauugacggagugaagcucgaaucuauggguguauaccagauacuggccaucuacucaacaguugcaaguagcuuagugcugcuagucucccucggcgcuauuucuuucuggaugugcucgaaugggagccugcaauguagaaucugcaucuga

SEQ ID NO: 140823 - RNA, 1698 nt, Artificial Sequence
  derived and/or modified CDS sequence (opt3) from hemagglutinin__InfluenzaA__AIT38360
augaagaucaaacugcucauucuucugugcaccuucacagccacuuacgcugacacgauauguaucggcuaucacgcaaacaauagcaccgauacaguggacacugucuuggagaagaacguuaccgugacacauuccguaaauuuacuggaagauucucacaacgggaaacuaugccuccugaagggaauugcgccccuucagcuggguaauuguucaguggccggcuggaucuuggggaacccugagugcgaaagucucauuagcaaagaguccuggucuuacaucgucgaaaagccaaauccggagaacggaaccuguuaucccggcuacuuugcugacuaugaggaacugagagagcaacugucgucagugagcaguuucgaaagguuugagauauucccuaaggaguccucuuggccaaaucauacuguuacaggugugagcgccuccugcucauacaacgggaaaggaaauuuuuauaagaaccucuuauggcugacccggaaaaauggccuuuaccccaacuugaguaagagcuacacgaauaacaaagaaaaggagguccugauccuauggggcgugcaccauccuucuaacauugaagaucagcgcacucucuaucacaccgagaaugcauacguauccguugugucaagccacuauagucgacguuucacaccagaaaucacuaagagacccaaagucagggggcaggagggacggauuaacuacuauuggacccugcuugagccuggugacacaaucauauuugaagccaauggcaaccugauugcuccaugguacgcauucgccuugucucgcgggcucggauccggcaucauuaccagcaaugcuccgauggaugagugugaagccaagugccagacgcccagaggugcgaucaacucgucucugccuuuucaaaaugugcauccagugacuaucggggagugucccaaauaugucagguccgcaaaguuacggaugguuacaggacugcgcaacauuccuucaauacagagucgaggccucuucggcgccaucgcuggguuuauugaaggagguuggaccggcaugaucgacgggugguacggauaccaccaucagaaugagcagggcagcgguuaugccgcagauaaagaguccacucaaaacgcuauaaaugggauuacaaacaagguaaauucugugaucgaaaagaugaacacccaguucacgaccgugggcaaggaguuuaauaaacuugaaagaaggauggagaaccugaacaaaaaggucgacgauggauucuuggacaucuggacauacaaugccgaacuacuggugcuccuggagaacgagcggacucuugauuuccacgacagcaauguuaaaaaccuguaugaaaaggugaaaucacaguugaagaauaacgcgaaggagauuggcaaugggugcuuugaguucuaccacaaauguaacaaugaaugcauggagagugucaagaacggaaccuaugacuacccaaaauauuccgaagagagcaagcucaaucgugagaaaaucgauggugugaagcuggaaucuaugggcguauaccagauuuuagccauauacucaacaguugcaaguagccuggugcuacucgucucccugggggcuaucucuuuuuggaugugcucgaacggaagccuucaaugucgcauuugcaucuga

SEQ ID NO: 140824 - RNA, 1701 nt, Artificial Sequence; identical to SEQ ID NO: 138088
  derived and/or modified CDS sequence (opt3) from hemagglutinin__InfluenzaA__AIT93147

SEQ ID NO: 140825 - RNA, 1701 nt, Artificial Sequence; identical to SEQ ID NO: 130717
  derived and/or modified CDS sequence (opt3) from hemagglutinin__InfluenzaA__AIU39700

SEQ ID NO: 140826 - RNA, 1701 nt, Artificial Sequence
  derived and/or modified CDS sequence (opt3) from hemagglutinin__InfluenzaA__AIU39702
augaaggccauccuggugguccuccuuuacaccuucgcuacagcaaacgccgacacucugugcauuggcuaucacgcgaauaacagcacggauaccguugacacaguguuggagaaaaauguaacugugacccauuccgucaacuuacuggaagauaagcacaaugggaaacuauguaagcucagaggaguggcuccccugcaucuugguaaaugcaacauagccggcuggauccuggggaauccugagugugaaucuuugucaacagcaaguagcugguccuacauuguugagaccucuucgucagacaacggaacuugcuauccaggcgauuuuaucgacuacgaggagcucagggagcagcugagcaguguguccucuuucgaacgguuugagauuuucccgaagacaagcuccuggcccaaucacgauucaaacaagggugucaccgccgcuuguccucaugcaggggccaaaaguuuuuauaagaaucugaucuggcucgugaaaaagggaaacagcuacccaaaauuaucuaaguccuauauaaaugacaagggcaaagaaguacugguucuuuggggcauccaccaccccucaacgagcgcugaucaacagaguuuguaccagaacgccgacgcguacguguucgucgggacuucucgcuauuccaagaaauuuaagccugagauugcaauccgaccaaaagugcgugaucaggagggaagaaugaauuacuauuggacccugguggaacccggugacaagauuacauucgaggccacuggcaaccuagucguuccuagguacgcuuuugccauggaacggaacgcagggagcggaaucauaauuucggauaccccagugcaugacugcaauacaaccugucaaacgccgaaaggcgcuaucaacacuucuuuccccuuucagaauauucacccuaucacaaucgguaagugcccaaaguauguaaaauccaccaagcuccgccuggccacugggcuuagaaacauucccucaauacagaguaggggacuguucggcgcgaucgccggcuuuauugaagggggauggacagguaugguggacggcugguacggguaucaucaccagaaugaacaaggaagcggcuacgcagcugauuugaaauccacccagaacgccaucgacgagauaacgaauaaggucaacucugugauugagaaaaugaauacccaguucacagcuguugguaaggaguucaaccaccucgaaaagcggaucgaaaaucugaacaaaaagguggaugacggguuuuuagauaucuggacuuacaaugccgagcugcucguccuucuggaaaacgagcgcaccuuggacuaucaugauagcaaugugaaaaaccuauacgagaagguacgaucacagcugaaaaacaaugcaaaggaaauuggcaacggauguuucgaguuuuaucacaagugcgacaauacauguauggaaaguguuaaaaacggcacuuacgauuauccuaaguacuccgaggaagccaaacucaauagagaggagaucgacggggugaagcuggaaagcaccaggauuuaucaaauacuugcuaucuacucuacagucgcgucaagucugguguuggucgugagccucggagcaauuuccuucuggaugugcucuaacgguucgcugcagugccggaucuguaucuga

SEQ ID NO: 140827 - RNA, 1701 nt, Artificial Sequence; identical to SEQ ID NO: 134957
  derived and/or modified CDS sequence (opt3) from hemagglutinin__InfluenzaA__AIU39704

SEQ ID NO: 140828 - RNA, 1704 nt, Artificial Sequence
  derived and/or modified CDS sequence (opt3) from hemagglutinin__InfluenzaA__AIU46609
auggagaagaucgugcugcuccuugccauugucagccugguuaaauccgaccagauaugcaucggcuaccacgcuaacaauucuaccgaacaaguggauacaauuauggagaagaacguaacugugacgcaugcacaggacaucuuggagaaaacccacaaugggaaguuaugugaucugaacggagucaaaccccuaauucucaaggacugcucaguggccgguuggcugcuuggcaauccuaugugugaugaguucaucagaguuccagaauggaguuauauaguggagagggcgaacccggcuaaugaccugugcuaccccgggaacuugaaugauuaugaggaacucaagcaucugcugagccggaucaaccacuuugagaaaauucucaucauuccuaaguccucuuggacaaaucaugaaacuucguuaggagucucagccgcauguccauaccagggcacccccagcuucuuucgcaacgugguauggcugaucaaaaagaaugacgccuauccuacaauaaaaauuaguuacaacaauaccaaccaggaggaucuuuugauccugugggguauucaccacuccaacaaugcugcagagcaaacuaaccuauauaagaauccaacaaccuacaucucuguugggacgagcacucucaaccagcgacuggugcccaagaucgccacccguucccaggucaauggacagagaggcaggauggacuucuuuuggacaauucuuaaaccuaacgaugcuauacauuucgaaucaaauggcaacuuuaucgccccagaguacgcguauaagauugugaaaaagggggacaguacuaucaugaaaagcgaaguggaguacggacacugcaauaccaagugucaaacaccgauaggugcaauuaacucuuccaugcccuuccauaauauccacccucugaccaucggcgaaugcccaaaauaugucaagucaaacaaguugguucucgccacggggcugcggaauagccccuuacgcgagaaaagaaggaagcggggacuguuuggcgcuauugccgguuucaucgaagggggauggcagggcaugguggauggcugguacggguaucaccauaguaacgaacagggaucugguuacgcagcugacaaagaguccacucagaaggccauugacggcguaacaaauaaagugaacagcauaaucgauaagaugaacacccaauuugaagcggucgggcgcgaguucaauaaccucgaacgaagaauugagaaucuuaacaagaaaauggaggacggauuucuggauguguggacuuauaaugccgaauugcuaguucugauggagaacgaaaggacacucgacuuccacgauucgaaugugaagaaccuguacgacaaaguccggcuucagcugcgugauaaugcaaaggaguugggcaacgguuguuucgaauuuuaccauaaaugcgacaaugaguguauggagucugugcgcaacgggaccuaugauuacccucaguauuccgaagaggcuagacucaagagggaagagaucucaggcguaaagcuggagaguaucggaacguaccaaauuuuaagcauauauuccaccguugccucuagccuggcucuagccaucauuguggcaggccucucacuguggaugugcaguaaugggucccuucagugccggaucuguauuuga

SEQ ID NO: 140829 - RNA, 1689 nt, Artificial Sequence
  derived and/or modified CDS sequence (opt3) from hemagglutinin__InfluenzaA__AIU46714
auggccaucauuuaccugauacuccuuuucaccgcugugagaggcgaccagaucugcauuggguaucacgcaaacaauagcacagagaaggucgauacuauccuggaaaggaacguuacggugacccaugccaaagacauuuuggagaagacacacaauggaaaauuauguaagcugaacgguauacccccucuagaacucggcgauugcuccaucgcgggguggcugcuuggaaauccagagugugaccggcuguugcgcguaccggaauggucuuacaucauggagaaagagaaccccaaguauucacucugcuacccuggcaguuuuaaugauuaugaagaacugaagcaucugcucagcuccgugaaacacuucgaaaaggucaaaauuuuaccaaaggacgguuggacucaacauaaaaccgaugggggaucuaaggcuugugccgugucgggcaagcagucauuuuuccgaaacaugguuuggcugaccaaaaagggccagaauuaccccguggcaaaacguagcuauaacaauacaaguggggagcagaugcuuaucauuuggggaguccaccacccuaacgacgaggaggagcaaagagccuuguaccagaagguggguacuuacguauccgcuucuacaagcacccugaauaaaagguccacgccagaaaucgcagcccggcccgagguuaacggccuagggucacgcauggaauuuaguuggacucuccuggaugugugggacaccauaaauuucgagagcacaggaaaccuugucgcuccugaguauggcuuuaagauuucuaaaagagguuccucagggaucauuaagacugaaggaacccugggcaacugcgagacaaagugucagaccccauugggcgccaucaauacgacucucccguuccauaacgugcacccccugacaaucggggaaugcccuaaauacguaaagagcgagaaauuaguccuggcgaccggacucaggaauguuccacagauugaaagucggggucuuuuuggcgcaauagccggguucaucgagggaggcuggcaagguaugguggaugggugguauggcuaccaucacucuaacgaccagggauccggcuaugcugccgauaaggagagcacucagaaagcauuugaccgcauuacaaauaagguaaacucggugaucgaaaagaugaauacccaguucgaggcugucgggaaagaauuuucuaaccuggagcgaagauuggaaaaucuaaacaagaaaauggaggacggauuccuggauguguggacguacaaugccgagcuccugguucuuauggaaaacgagaggacccuggacuuccacgauuccaaugugaagaacuuguaugacaaaguccggaugcaacuccgugauaaugugaaggaacuggguaacggcuguuuugaguucuaccauaagugcgacaacgaguguaugaacucagugaaaaaugggacauacgauuaucccaaguacgaagaggaaaguaaauuaaagcgcaaugagauaaaaggaguuaagcugagcuccaugggcguguaucagauucuagcgaucuacgccacugucgcagguucucucagccuggcuaucaugauugccgggaucucauuuuggaugugcaguaacggcucccuucagugcagaauuuguauauga

SEQ ID NO: 140830 - RNA, 1701 nt, Artificial Sequence
  derived and/or modified CDS sequence (opt3) from hemagglutinin__InfluenzaA__AIV09219
augaaggccauccuggugguccuccuuuacaccuucgcuacaacuaacgcagacauucugugcauaggcuaucacgccaauaacagcacggauaccguugacacaguguuggagaaaaauguaacugugacccauuccgucaacuuacuggaagauaagcacaaugggaaacuauguaagcucagaggaguggcgccccugcaucuugguaaaugcaacaucgcuggcuggauucuggggaauccugagugugaauugcucucuacaaccucaaguuggagcuacaucguugagacuuccucuucggacaacggaacaugcuauccaggcgauuuuauugacuacgaagaacugagggagcagcugucaagcgugaguuccuucgaacgguuugagaucuucccgaagaccucuagcuggcccgaucacgacuccaauaagggugucacggccgcauguccucaugccggggcuggaucauuuuauaaaaaccucauaugguuagugaagaaaggcaauaguuacccaaagcugagcaaaucuuauaucaacgauaagggcaaggaaguacuuguuuugugggggauucaccaucccccuacuuccgcagaccaacagcgccuguaccagaaugccgaugcuuacguguucgucggaaccucacgauauagcaaaaaguuuaaaccagagaucgccauucgucccaaggugagagaccaggaggguaggaugaacuacuauuggacacuuguggaaccuggcgauaaaaucacuuucgaggcgaccgggaaucucgucguuccacgguacgcauuugccauggaacgcaacgcuggaaguggcauaauuacaucugacaccccggugcacgacugcaacacgacuugucaaacacccaagggugccaucaauaccucccugccuuuccagaacauucacccaaucacuaucgggaaaugccccaaguauguaaagagcacaaaacuuagacuggcaaccggauugaggaaugugccuucgauucagucucggggccucuuuggcgcuauagccggguucaucgagggagguuggacgggcauggucgaugggugguacggauaucaucaccagaacgaacaaggcuccgguuacgcggccgaccugaagucaacccagaaugcaauugaugagaucacaaacaaagugaauaguguuauagacaagaugaacacucaguuuaccgcuguggggaaagaguucaaucacuuagaaaagcgcauugagaaccugaauaagaaagucgaugacggcuuccucgauaucuggacauacaacgccgaacuucugguguugcuagagaaugaacgaacucuggacuaucaugauagcaacguaaagaaucucuacgagaaaguuagaucccagcugaagaacaacgcuaaagagaucggaaauggcuguuuugaguucuaucacaagugcgacaacaccuguauggagucugugaagaaugggacauacgauuauccaaaauacagcgaagaggccaagcuaaacagggaagagauugacggagucaaacuggagucaacccggaucuaucaaauuuuggcaauauacaguacuguggccuccagccucguccuggugguuucuuuaggugcuaucucauuuuggaugugcaguaauggcagccugcagugccguauuuguaucuga

SEQ ID NO: 140831 - RNA, 1701 nt, Artificial Sequence
  derived and/or modified CDS sequence (opt3) from hemagglutinin__InfluenzaA__AIW60689
augaagaccaucauugcccugagcuacauacucugccuuguguucgcucagaaacugcccggcaacgacaauuccacagcaacuuuguguuuagggcaccaugccgucccuaacggaacgcugguuaagaccaucacaaaugaucaaauugaggugacuaacgcgaccgaacuuguacagucuucaaguacagguagaaucugcgacagcccacacaggauucucgauggcaaaaauuguacccugaucgacgcucuacugggggauccgcauugcgacggauuucagaacaaggagugggauuuguucguggaacgguccaaagccuauucugacuguuaccccuaugaugucccugacuacgcaucgcuccgcucacugguggccagcaguggcacucuggaguuuacaaaugaagguuucaacuggaccgggguugcucaggauggaacguccuaugcaugcaagcgaggcucugucaagagcuuuuucucccgucucaauugguuacacaaacuggaguacaaguauccagcccuuaacgugacuaugcccaauaacgacaaauuugauaaguuguacauauggggcgugcaucacccuucaaccgacagugaccaaacaagcaucuacguacaggcuucugggagaguuacuguguccaccaaaaggucacagcagacagucauuccaaauaucggaagccggcccugggugcgcgguauuaguucuagaaucuccauauauuggaccauugugaagccuggcgauauccugcuaauuaacagcacggggaaucucaucgccccaaggggauacuucaagauccggucgggcaaaucuuccauuaugcgcucagacgcgccgauagguaacuguaacagugagugcaucacucccaaugggagcauuccuaacgauaagccauuucaaaaugucaaccgaaucacauauggagcaugucccagauacguuaaacagaauacccugaaacuugccacuggcaugaggaacgugccugaaaagcagacacggggcauauucggggcuauugccggauuuaucgagaaugguugggaaggcaugguagacgggugguauggauuccgucaccagaacuacgagggcaccggucaagcagcugaucugaaguccacgcaggccgcgaucaaucagauuaacgggaaauugaaucgccucaucgagaagaccaacgaaaaguuucaucaaauugagaaagaguucucugaaguggaaggcagaauacaggaccuggagaaguaugucgaggauacaaaaaucgacuuauggagcuacaaugccgaacugcucguggcacuugagaaccagcacacuauugaucugaccgacucagaaaugaauaaguuguucgagaggacacggaaacagcuacgagaaaacgcugaggauaugggaaacggcugcuuuaagaucuaccauaagugugacaaugccugcaucgggaguauucgcaacggaacuuaugaccacgaugcuuacagagacgaggcccugaauaacagguuccaaauaaaagguguugaacucaaguccggcuauaaagauuggauccuguggauuagcuuugcaaucucuugcuuccuucuguguguggucuugcucggguuuauuaugugggccugccagaagggaaauauccgguguaacauaugcaucuga

SEQ ID NO: 140832 - RNA, 1701 nt, Artificial Sequence
  derived and/or modified CDS sequence (opt3) from hemagglutinin__InfluenzaA__AIW60690
augaagaccaucauugcccugagcuacauacucugccuuguguucgcucagaaacugcccggcaacgacaauuccacagcaacuuuguguuuagggcaccaugccgucccuaacggaacgcugguuaagaccaucacaaaugaucaaauugaggugacuaacgcgaccgaacuuguacagucuucaaguacagguagaaucugcgacagcccacacaggauucucgauggcaaaaauuguacccugaucgacgcucuacugggggauccgcauugcgacggauuucagaacaaggagugggauuuguucguggaacgguccaaagccuauucugacuguuaccccuaugaugucccugacuacgcaucgcuccgcucacugguggccagcaguggcacucuggaguuuacaaaugaagguuucaacuggaccgggguugcucaggauggaacguccuaugcaugcaagcgaggcucugucaagagcuuuuucucccgucucaauugguuacacaaacuggaguacaaguauccagcccuuaacgugacuaugcccaauaacgacaaauuugauaaguuguacauauggggcgugcaucacccuucaaccgacagugaccaaacaagccuguacguacaggcuucugggagaguuacuguguccaccaaaaggucacagcagacagucaucccaaauauuggaagccggcccugggugcgcggugugaguucuagaaucuccauuuauuggaccaucgucaagccuggcgauauacuacucauuaacagcacggggaaucugaucgccccaaggggauacuucaagauucggucgggcaaaucuuccaucaugcgcucagacgcgccgaucgguaacuguaacagugagugcauuacucccaaugggagcauaccuaacgauaagccauuucaaaauguuaaccgaaucacauauggagcaugucccagauacgugaaacagaauacccuuaagcuggccacuggcaugaggaacguaccugaaaaacagacacggggcauuuucggggcuaucgccggauuuauagagaaugguugggaaggcaugguggacgggugguauggauuccgucaccagaacuacgagggcaccggucaagcagcugauuugaaguccacgcaggccgcgauuaaucagaucaacgggaaacucaaucgccugaucgagaagaccaacgaaaaguuucaucaaauugagaaagaguucucugaagucgaaggcagaauccaggacuuagagaaguauguggaggauacaaaaauugaccuguggagcuacaaugccgaacuccuuguugcacuggagaaccagcacacuauagauuugaccgacucagaaaugaauaagcuauucgagaggacacggaaacagcugcgagaaaacgcugaggauaugggaaacggcugcuuuaagaucuaccauaagugugacaaugccugcauugggaguauccgcaacggaacuuaugaccacgaugcuuacagagacgaggcccucaauaacagguuccaaaucaaagguguggaacugaaguccggcuauaaagauuggauucuuuggaucagcuuugcaauaucuugcuuccuguugugugucgugcuccugggguuuauuaugugggccugccagaagggaaauauccgguguaacauuugcaucuga

SEQ ID NO: 140833 - RNA, 1701 nt, Artificial Sequence
  derived and/or modified CDS sequence (opt3) from hemagglutinin__InfluenzaA__AIW60691
augaagaccaucauugcccugagcuacauacucugccuuguguucgcucagaaacugcccggcaacgacaauuccacagcaacuuuguguuuagggcaccaugccgucccuaacggaacgcugguuaaggcgaucaccaaugaucaaauugaggugacaaacgcuacugagcuaguacagucuucaaguaccgguagaaucugcgacagcccacacaggauucucgauggcaaaaauuguacacugaucgacgcccuucugggggauccgcauugcgacggauuucagaacaaggaaugggauuuguucguggaacgguccaaagcauauucugacuguuaccccuaugaugucccugacuacgccucgcuccgcucacugguggcuagcaguggcacccuggaguuuacuaaugaagguuucaacuggacagggguugcacaggauggaaccuccuaugccugcaagcgaggcucugucaagagcuuuuucucccgucucaauugguuacacaaacuggaguacaaguauccagcucuuaacgugacgaugcccaauaacgacaaauuugauaaguuguacauauggggcgugcaucacccuucaacugacagugaccaaaccagacuguacguacaggccagcgggaggguuacagugucuacuaaacggucccagcagaccgucaucccaaauauuggaucacgccccugggugagagguaucagcaguaggauuucuaucuauuggacaauagugaagccuggcgauauucuacucaucaacuccaccgggaaucugauugcgccacggggauacuucaagauccgcagcggcaaaucgucuaucaugcgauccgacgcaccgauugguaacuguaacucagagugcauaacgcccaaugggaguaucccuaacgauaagccauuucaaaaugucaacagaauuacuuauggagccugucccagguacguuaaacagaauacacuuaagcuggcuaccggcaugcggaacgugccugaaaaacagacucguggcaucuucggggccauagcaggauuuauugagaaugguugggaaggcaugguagacgggugguauggauuccgccaccagaacagcgagggcacaggucaagcugccgauuugaaguccacccaggcggccaucaaucagaucaacgggaaacucaauagacugauugagaagacgaacgaaaaguuucaucaaaucgagaaagaguucucugaaguggaaggcaggauucaggacuuagagaaguacgucgaggauaccaaaauagaccuguggagcuauaaugcagaacuccuuguggcucuggagaaccagcacacaaucgauuugacugacucagaaaugaauaagcuauucgagcggacccgaaaacagcugcgcgaaaacgccgaggauaugggaaacggcugcuuuaagauuuaccauaagugugacaaugcuugcaucgggaguaucagaaacggaacauacgaccacgauguuuauagggacgaggcccucaauaaccgguuccaaauuaaagguguggaacugaaguccggcuacaaagauuggauacuuuggaucagcuuugcaauuucuugcuuccuguugugugucgugcuccugggguuuaucaugugggccugccagaagggaaauauucgcuguaacaucugcauauga

SEQ ID NO: 140834 - RNA, 1701 nt, Artificial Sequence
  derived and/or modified CDS sequence (opt3) from hemagglutinin__InfluenzaA__AIW60692
augaagaccaucauugcccugagcuacauacucugccuuguguucgcucagaaacugcccggcaacgacaauuccacagcaacuuuguguuuagggcaccaugccgucccuaacggaacgcugguuaaggcgaucaccaaugaucaaauugaggugacaaacgcuacugaacugguacagucuucaaguaccgguagaaucugcgacagcccacacaggauucucgauggcaaaaauuguacacugaucgacgcccuucugggggauccgcauugcgacggauuucagaacaaggagugggauuuguucguggaacgguccaaagcauauucugacuguuaccccuaugaugucccugacuacgccucgcuccgcucacugguggcuagcaguggcacccuggaguuuacuaaugaagguuucaacuggacagggguugcacaggauggaaccuccuaugccugcaagcgaggcucugucaagagcuuuuucucccgucucaauugguuacacaaacuggaguacaaguauccagcucuuaacgugacgaugcccaauaacgacaaauuugauaaguuguacauauggggcgugcaucacccuucaacugacagugaccaaaccagccuguacguacaggccucugggagaguuacaguguccacuaaaaggucacagcagaccgucaucccaaauauuggaagccggcccugggugcgcgguaucaguucuagaauuuccaucuauuggacaauagugaagccuggcgauauucuacucaucaacagcaccgggaaucugauugcgccaaggggauacuucaagauccggucgggcaaaucuuccaucaugcgcucagacgcaccgauugguaacuguaacagugagugcauaacgcccaaugggagcaucccuaacgauaagccauuucaaaaugucaaccgaauuacuuauggagccugucccagauacguuaaacagaauacacuuaagcuggcuaccggcaugaggaacgugccugaaaaacagacucggggcaucuucggggccauagcaggauuuauugagaaugguugggaaggcaugguagacgggugguauggauuccgucaccagaacuccgagggcacaggucaagcugccgauuugaagucuacccaggcggccaucaaucagaucaacgggaaacucaaucgccugauugagaagacgaacgaaaaguuucaucaaaucgagaaagaguucagcgaaguggaaggcaggauucaggacuuagagaaguacgucgaggauaccaaaauagaccuguggucauauaaugcagaacuccuuguggcucuggagaaccagcacacaaucgauuugacugacagugaaaugaauaagcuauucgagagaacccggaaacagcugcgagaaaacgccgaggauaugggaaacggcugcuuuaagauuuaccauaagugugacaaugcuugcaucggguccauccgcaacggaacauacgaccacgauguuuauagagacgaggcccucaauaacagguuccaaauuaaagguguggaacuaaagagcggcuacaaagauuggauacuuuggaucucuuuugcaauuucaugcuuccuguugugugucgugcuccugggguuuaucaugugggccugccagaagggaaauauucgguguaacaucugcauauga

SEQ ID NO: 140835 - RNA, 1701 nt, Artificial Sequence
  derived and/or modified CDS sequence (opt3) from hemagglutinin__InfluenzaA__AIW60693
augaagaccaucauugcccugagcuacauacucugccuuguguucgcucagaaacugcccggcaacgacaauuccacagcaacuuuguguuuagggcaccaugccguccugaacggaacgcuaguuaagaccaucacaaaugaucaaauugaggugacuaacgcgaccgaacucguacagaauagcucaacagguagaaucugcgacaguccucaccagauucuggauggcgagaacuguacccuuaucgacgcucuguugggggauccacauugcgacggauuucagaauaaagaaugggaucucuucguggagaggagcaaggccuauuccaacuguuacccguaugacguccccgauuacgcaucucugcggucgcugguggccucaagcggcacucucgaauuuaauaacgagaguuucaauuggacagguguugcucaaaacgggaccuccucugcaugcaaacgccgaagcauaaaguccuuuuucucacguuuaaauuggcugcaccagcuuaaguauaaauacccugccuugaacgugacgaugccaaauaacgagaaguuugacaaacuguauaucuggggaguccaucaccccaguacugauagcgaccagaccucuauuuacgcucaggccuccggcagagugacaguaucaacuaagaggagccaacagaccguuaucccuaacauuggcagucggccaugggugcgcggggucucuuccaucauaagcauuuacuggacaaucgugaaacccggagauauucuacucaucaauucgaccgguaaccugaucgcgccuagaggcuauuucaagauuaggucugggaaguccucaauaaugcggagugacgcaccaaucggaaaauguaauagcgaaugcauuacgccgaacggcuccauccccaaugacaagccuuuucagaacgugaaucgcauaacuuacggugccuguccacgauaugucaaacagaacacacuuaagcuggcuaccgggaugagaaauguucccgagaaacaaacuaggggaauuuucggcgccaucgcaggcuuuaucgaaaacgggugggagggaaugguggaugguugguacggcuuccggcaccaaaauucugaggggacaggacaggcugccgacuugaagucuacccaggcggccauuaaccagaucaauggcaaacucaaccgucugauugaaaagacgaaugagaaguuucaucagauagaaaaagaguucucagaaguagagggucgcauccaggauuuagagaaguauguggaagacaccaaaauugaucuguggaguuacaacgcagagcuccuugucgcucuggaaaaccaacacacaaucgacuugacugauuccgagaugaauaagcuauucgaaagaaccaggaaacagcugcgggagaacgccgaggacauggggaauggcugcuuuaagaucuaucauaagugugauaacgcuugcauuggaagcauacgaaauggcacauacgaccacgauguguaccgcgacgaagcccucaacaauagauuccagaucaaagggguugagcugaagucuggauauaaagacuggauucuuuggaucucauuugcaauuaguugcuuccuguugugugugguccuccuggguuuuaucaugugggccugccagaagggcaacauaagguguaauaucugcauuuga

SEQ ID NO: 140836 - RNA, 1701 nt, Artificial Sequence
  derived and/or modified CDS sequence (opt3) from hemagglutinin__InfluenzaA__AIW60694
augaagaccaucauugcccugagcuacauacucugccuuguguucgcucagaaacugcccggcaacgacaauuccacagcaacuuuguguuuagggcaccaugccguccugaacggaacgcuaguuaagaccaucacaaaugaucaaauugaggugacuaacgcgaccgaacucguacaaaauucuucaacagguagaaucugcgacaguccucaccagauucuggauggcgagaacuguacccuuaucgacgcucuguugggggauccacauugcgacggauuucagaauaaagaaugggaucucuucguggagaggagcaaggccuauuccaacuguuacccguaugacguccccgauuacgcaucucugcggucgcugguggccucaagcggcacucucgaauuuaauaacgagaguuucaauuggacagguguugcucagaacgggaccuccucugcaugcaaacgccgaagcauaaaguccuuuuucucacguuuaaauuggcugcaccagcuuaaguauaaauacccugccuugaacgugacgaugccaaauaacgagaaguuugacaaacuguauaucuggggaguccaucaccccaguacugauagcgaccagaccucucuauacgcucaggccuccggcagagugacaguaucaacuaagaggagccaacagaccguuauuccuaacaucggcagucggccaugggugcgcggggucucuuccagaauuagcaucuacuggacaauagugaaacccggagauauucuccugaucaauucgaccgguaaccuuauugcgccuaggggcuauuucaagauccggucugggaaguccucaaucaugcgcagugacgcaccaauuggaaaauguaauagcgaaugcauaacgccgaacggcuccauccccaaugacaagccuuuucagaacgugaaucgaauuacuuacggugccuguccaagauaugucaaacagaacacacugaaguuggcuaccgggaugaggaauguucccgagaaacaaacucggggaaucuucggcgccauagcaggcuuuauugaaaacgggugggagggaaugguggaugguugguacggcuuccgucaccaaaauucugaggggacaggacaggcugccgaccucaagagcacccaggcggccaucaaccagaucaauggcaaacugaaccgcuuaauugaaaagacgaaugagaaguuucaucagaucgaaaaagaguucucagaaguagaggguaggauucaggaucuggagaaguauguggaagacaccaaaauagaucucuggaguuacaacgcagagcuucuggucgcuuuggaaaaccaacacacaaucgaccuaacugauuccgagaugaauaagcuguucgaaagaacccggaaacagcuccgagagaacgccgaggacauggggaauggcugcuuuaagauuuaucauaagugugauaacgcuugcaucggaagcauccgcaauggcacauacgaccacgauguguacagagacgaagcccugaacaauagguuccagauuaaagggguugagcuuaagucuggauauaaagacuggauacuguggaucucauuugcaauuaguugcuucuugcucugugugguccuguuagguuuuaucaugugggccugccagaagggcaacauucgguguaauaucugcauauga

SEQ ID NO: 140837 - RNA, 1701 nt, Artificial Sequence
  derived and/or modified CDS sequence (opt3) from hemagglutinin__InfluenzaA__AIW60695
augaagaccaucauugcccugagcuacauacucugccuuguguucgcucagaaacugcccggcaacgacaauuccacagcaacuuuguguuuagggcaccaugccgucccuaacggaacgcugguuaagaccaucacaaaugaucaaauugaggugacuaacgcgaccgaacuuguacagucuucaaguacagguggcaucugcgacagcccacaccagauucucgauggggagaauuguacccugaucgacgcucuacugggagauccgcauugcgacggcuuucagaacaaagaaugggauuuguucguggagagauccaaggccuauucuaauuguuaccccuaugacgucccugauuacgcaucgcucaggucacugguggccagcagugguacucuggaauuuaacaaugaguccuucaacuggacagggguugcucaaaauggaaccucuagcgcaugcaaacggcgcuccaacaagucauuuuucagucgacucaauugguuacaccagcugaacuauaaguacccagcccuuaaugugacgaugcccaacaacgagaaauuugacaaguuguauauauggggcguccaucacccuagcacugauucugaccagaucuccauuuacgcucaggccccaggccgugugaccguaucaacaaaaagaagccaacagacuguuauccccaauauugggaguaggccuugggugcggggagucucuuccaucauaagcauuuacuggaccaucgugaagccaggugauauucugcuaaucaacuguacaggcaaucucaucgcgccgcgcggguauuucaaaauuagaucgggaaagucuuccauaaugaggucagacgcaaguaucggcaagugcaacagcgaauguauuacccccaaugguuccaucccuaacgacaaaccauuucagaaugugaaccggauaacguacggggccugcccccgcuaugucaagcagaauacucugaaacuugcuacaggaaugcgaaacguuccugagaagcaaaccagaggcauuuucggcgccaucgcaggguuuaucgaaaauggaugggaggguaugguggauggcugguacggguucaggcaccagaacucugagggaacuggccaggcugccgaccugaaaagcacacaagcggccauuaaucagaucaacgguaaguugaaucggcucauugagaaaaccaacgaaaaguuucaucagauagaaaaggaguucucagaaguagaggggcguauccaggaucuggagaaauauguggaagacacgaagauugauuuauggaguuacaacgcagagcugcucgucgcucuugaaaaucaacacaccaucgaccugacagauuccgagaugaacaaauuguucgaacgcacuaagaaacagcuaagagagaaugccgaggacaugggcaacggauguuuuaagaucuaucauaagugcgauaaugcuugcauuggcagcauaaggaacgggaccuacgaccacgauguguaccgggacgaagcccugaauaaccgauuccagaucaaaggaguugagcucaagucugguuauaaagacuggauucuguggaucucauuugcaauuaguuguuuccuucugugcguggucuugcucggcuuuaucaugugggccugucagaaggggaauauacgcugcaacaucuguauuuga

SEQ ID NO: 140838 - RNA, 1701 nt, Artificial Sequence
  derived and/or modified CDS sequence (opt3) from hemagglutinin__InfluenzaA__AIW60696
augaagaccaucauugcccugagcuacauacucugccuuguguucgcucagaaacugcccggcaacgacaauuccacagcaacuuuguguuuagggcaccaugccgucccuaacggaacgcugguuaagaccaucacaaaugaucaaauugaggugacuaacgcgaccgaacuuguacagucuucaaguacagguggcaucugcgacagcccacaccagauucucgauggggagaauuguacccugaucgacgcucuacugggagauccgcauugcgacggcuuucagaacaaagaaugggauuuguucguggagagauccaaggccuauucuaauuguuaccccuaugacgucccugauuacgcaucgcucaggucacugguggccagcagugguacucuggaauuuaacaaugaguccuucaacuggacagggguugaccaaaauggaaccucuagcgcuugcaaacggcgcuccaacaagucauuuuucagucgacucaauugguuacaccagcugaaguauaaauacccagcacuuaacguggccaugcccaauaacgagaaguuugauaaauuguauauauggggcguccaucacccuagcacggacucugaucagaucucccuguacgcucaggccccaggccgugugacuguaucaaccaagagaagccaacagacaguuauucccaacaucgggaguaggccuugggugcggggagucucuucccgcauuagcaucuacuggacuauagugaaaccaggugacauucuacucaucaauuguaccggcaaccugauugcgccgagaggguauuucaagaucaggucgggaaagucuuccaucaugcggucagacgcaaguauuggcaaaugcaauagcgaauguauaacacccaacgguuccaucccuaaugauaagccauuucagaacgugaaucgcauuaccuacggggccugcccccgauaugucaaacagaacacgcuuaagcuggcuacuggaaugagaaauguuccugagaaacaaacaaggggcaucuucggcgccauagcaggguuuauugaaaacggaugggaggguaugguggacggcugguacggguuccggcaccaaaauucugagggaaccggccaggcugccgauuugaaaagcacucaggcggccaucaaccagaucaaugguaaacucaaccgucugauugaaaagacaaaugagaaguuucaucagaucgaaaaagaguucucagaaguagaggggcgcauucaggacuuagagaaguauguggaagauaccaaaauagaccuguggaguuacaacgcagagcuccuugucgcucuggaaaaccaacacacgaucgauuugaccgacuccgagaugaauaagcuauucgaaagaacaaagaagcagcugagggagaacgccgaggauaugggcaauggauguuuuaagauuuaucauaaaugcgacaacgcuugcaucggcagcauccggaaugggacuuacgaucacgacguguaccgagacgaagcccucaacaaucgcuuccagauuaagggaguugagcugaaaucugguuauaaggauuggauacuuuggaucucauuugcaauuaguuguuuccuguugugcgugguccuccugggcuuuaucaugugggccugucagaaagggaacauuagaugcaauaucuguauauga

SEQ ID NO: 140839 - RNA, 1701 nt, Artificial Sequence
  derived and/or modified CDS sequence (opt3) from hemagglutinin__InfluenzaA__AIW60697
augaagaccaucauugcccugagcuacauacucugccuuguguucgcucagaaacugcccggcaacgacaauuccacagcaacuuuguguuuagggcaccaugccgucccuaacggaacgaucguuaagaccauuacaaaugaucaaaucgaggugacuaacgcgaccgaacugguacagucuucaaguacagguggcauuugcgacagcccacaccagauccuagauggggagaauuguacccucauagacgcucugcuuggagauccgcagugcgacggcuuucaaaacaaaaagugggaucuguucguggaaagauccaaagccuauucuaauuguuaccccuaugacgucccugaucaugcaucguugaggucacucguggccagcagugguacucuggaguuuaacaaugaauccuucgacuggacagggguuacccagaacggaacgucuagcuccugcaagcggcgcucaaauaagagcuuuuucagucgacugaacuggcucacucacuuaaaauacaaguauccagcucugaaugugaccaugcccaacaaugagaaauuugauaaacuuuacaucuggggcguccaucacccugacacagauucugugcagauuuccuuguaugcacaggccucaggccguaucacuguaagcaccaagagaagucaacagacaguuauuccaaacaucgggucuaggccccgggugcgcgacauauccagcagaauuucgaucuacuggaccauugucaagccuggagacauccugcuaaucaacucuacggguaaucucauugcuccaaggggcuacuucaagauacgguccgggaaaucaaguaucaugcgcagcgaugccccgauuggaaaguguaacuccgagugcaucacucccaauggcucuauaccuaacgacaaaccauuucagaaugugaaccgaauuacauauggugcgugucccagauacgugaagcagaauacccugaaacuugcaacugggaugaggaacgucccugaaaagcaaacacggggaaucuucggcgccaucgcuggcuuuauugagaaugggugggaaggaaugguugaugguugguauggcuuccgucaccagaacagcgaggggaccggacaggccgcagaccugaaaucaacgcaagcugccaucaaucagauuaacggcaaguugaaucgccucauagguaagaccaacgagaaauuucaucagaucgaaaaggaguucagugaaguggaggggaggauucaggaucuggaaaaauacguagaggacacaaagaucgauuuaugguccuauaaugcggagcugcucguggcccuugaaaaccaacacacuaucgaccugaccgauagcgagaugaacaaauuguucgaaagaacaaagaagcagcuacgggagaaugcagaagacaugggcaacggaugcuuuaaaauuuaccauaagugugauaaugcuugcauaggcucuauccgaaacgggacuuaugaccacgacgucuaccgcgaugaggcccugaauaacagauuccagauuaaaggaguggagcucaagucagguuacaaagacuggauccuguggauuaguuuugcuaucagcugcuuccuucuguguguugccuugcucggcuuuauaaugugggcaugccagaaggggaauaucagguguaacauuugcaucuga

SEQ ID NO: 140840 - RNA, 1701 nt, Artificial Sequence
  derived and/or modified CDS sequence (opt3) from hemagglutinin__InfluenzaA__AIW60698
augaagaccaucauugcccugagcuacauacucugccuuguguucgcucagaaacugcccggcaacgacaauuccacagcaacuuuguguuuagggcaccaugccgucccuaacggaacgaucguuaagaccauuacaaaugaucaaaucgaggugacuaacgcgaccgaacugguacagucuucaaguacagguggcauuugcgacagcccacaccagauccuagauggggagaauuguacccucauagacgcucugcuuggagauccgcagugcgacggcuuucaaaacaaaaagugggaucuguucguggaaagauccaaagccuauucuaauuguuaccccuaugacgucccugaucaugcaucguugaggucacucguggccagcagugguacucuggaguuuaacaaugaauccuucgacuggacagggguuacccagaacggaacgucuagcgcuugcaagcggcgcuccaauaagucauuuuucagucgacugaacuggcucacucacuuaaaauacaaguauccagcacugaaugugaccaugcccaacaaugagaaauuugauaaacuuuacaucuggggcguccaucacccuggcacagacagcgaucagauuucuuuguaugcccaggcuuccgggcguaucacugugucaaccaagagaagccaacagacaguaauuccaaacaucggaaguaggccccggguucgcgacauaucuuccagaauuagcaucuacuggaccauugugaagccuggugacauccugcuaaucaacucgacgggcaaucucauugccccaaggggguacuucaagauacggucuggaaaauccucaaucaugcgcagugaugcgccgauuggcaaguguaacagcgagugcaucacucccaaugguuccauaccuaacgacaaaccauuucagaaugucaaccgaauuacauauggggcaugucccagauacgugaagcagaauacccugaaacuugccacuggaaugaggaacgugccugaaaagcaaacacggggcaucuucggcgcuaucgccggguuuauugagaauggaugggaagguauggucgauggcugguauggguuccgucaccagaacucugagggaaccggccaggcagcugaccugaaaagcacgcaagccgcgaucaaucagauuaacgguaaguugaaucgccucauagggaagaccaacgagaaauuucaucagaucgaaaaggaguucucagaaguugagggcaggauucaggaucuggaaaaauacguggaggacacaaagaucgauuuauggaguuauaaugccgagcugcucguagcacuugaaaaccaacacacuaucgaccugaccgauuccgagaugaacaaauuguucgaaagaacaaagaagcagcuacgggagaaugcugaagacaugggaaacggcugcuuuaaaauuuaccauaagugugauaaugccugcauagggagcauccgaaacggaacuuaugaccacgacguguaccgcgaugaggcucugaauaacagauuccagauuaaaggugucgagcucaagucuggcuacaaagacuggauccuguggauuucauuugccaucaguugcuuccuucuguguguggcauugcucggguuuauaaugugggccugccagaagggaaauaucagguguaacauuugcaucuga
